United States Patent Application Publication US 2025/0320254 A1 - sequence listing, part 8

SEQ ID NO: 35883 - protein, 754 aa, Homo sapiens
LPALCDLLASAADPQIRQFAAVLTRRRLNTRWRRLAAEQRESLKSLILTALQRETEHCVSLSLAQLSATIFRKEGLEAWPQLLQLLQHSTHSPHSPEREMGLLLLSVVVTSRPEAFQPHHRELLRLLNETLGEVGSPGLLFYSLRTLTTMAPYLSTEDVPLARMLVPKLIMAMQTLIPIDEAKACEALEALDELLESEVPVITPYLSEVLTFCLEVARNVALGNAIRIRILCCLTFLVKVKSKALLKNRLLPPLLHTLFPIVAAEPPPGQLDPEDQDSEEEELEIELMGETPKHFAVQVVDMLALHLPPEKLCPQLMPMLEEALRSESPYQRKAGLLVLAVLSDGAGDHIRQRLLPPLLQIVCKGLEDPSQVVRNAALFALGQFSENLQPHISSYSREVMPLLLAYLKSVPLGHTHHLAKACYALENFVENLGPKVQPYLPELMECMLQLLRNPSSPRAKELAVSALGAIATAAQASLLPYFPAIMEHLREFLLTGREDLQPVQIQSLETLGVLARAVGEPMRPLAEECCQLGLGLCDQVDDPDLRRCTYSLFAALSGLMGEGLAPHLEQITTLMLLSLRSTEGIVPQYDGSSSFLLFDDESDGEEEEELMDEDVEEEDDSEISGYSVENAFFDEKEDTCAAVGEISVNTSVAFLPYMESVFEEVFKLLECPHLNVRKAAHEALGQFCCALHKACQSCPSEPNTAGCPGPSRAILHAGSEQGAGTPGGDGRAGGPDRGAPQLWDPHTEAPWAPR

SEQ ID NO: 35884 - protein, 152 aa, Homo sapiens
LRGGGGRGELAMSGLGRLFGKGKKEKGPTPEEAIQKLKETEKILIKKQEFLEQKIQQELQTAKKYGTKNKRAALQALRRKKRFEQQLAQTDGTLSTLEFQREAIENATTNAEVLRTMELAAQSMKKAYQDMWVRGEGWRGPRHWEEWLAITL

SEQ ID NO: 35885 - protein, 26 aa, Homo sapiens
VWGVSIFLACEMGLVVLRCRDQNVRH

SEQ ID NO: 35886 - protein, 64 aa, Homo sapiens
LRQTLTGKEIEIDIEPTDKVERIKERVEEKEGIPPQQQRLIYSGKQILHSLAFLGRHARRPSVP

SEQ ID NO: 35887 - protein, 78 aa, Homo sapiens
LFQTLTGKEIEIDIEPTDKVERIKERVEEKEGIPPQQQRLIYSGKQMNDEKTAADYKILGGSVLHLVLALRGGGGLRQ

SEQ ID NO: 35888 - protein, 78 aa, Homo sapiens
LRQTLTGKEIEIDIEPTDKVERIKERVEEKEGIPPQQQRLIYSGKQMNDEKTAADYKILGGSVLHLVLALRGGGGLRQ

SEQ ID NO: 35889 - protein, 90 aa, Homo sapiens
LPILWVLQALLEVFGLFGLWSFSPGTEVEMGRRPGQCSWKLTLHFSAPVFQFKSAFSSAETTELSGKCVVALATGEVWGQLVIRKGMEDV

SEQ ID NO: 35890 - protein, 290 aa, Homo sapiens
LLAPSLAQKDVGLLPSPRERDTAELEDFAGHRHSLPAAGGAAGAAWQRLRGVELGGLAACTGATAGGHACAAPGAGRRRGAAAHAALCGLPDPAGLAAGPGGLQGGVLRVRAQHVRQRAAHRPAQPAALPRSHPPLPGASAAQPGPGPPPAAGGLAGRPVARRPGRRLPPPVEGPRMPAVPPVAGPRRRPPEPGDSDRFRASFRADARLLQRDAGTAAGRPLGLRAARGAGGPAGERHRACLRLALGPLPRSQPSAGGRSAGSTGRGLGEAGRSRPGGASGNYGLGLLQF

SEQ ID NO: 35891 - protein, 211 aa, Homo sapiens
LQSPSAMLGAKPHWLPGPLHSPGLPLVLVLLALGAGWAQEGSEPVLLEGECLVVCEPGRAAAGGPGGAALGEAPPGRVAFAAVRSHHHEPAGETGNGTSGAIYFDQVLVNEGGGFDRASGSFVAPVRGVYSFRFHVVKVYNRQTVQVSLMLNTWPVISAFANDPDVTREAATSSVLLPLDPGDRVSLRLRRGNLLGGWKYSSFSGFLIFPL

SEQ ID NO: 35892 - protein, 262 aa, Homo sapiens
LGSLSGKMQPLLLLLAFLLPTGAEAGEIIGGRESRPHSRPYMAYLQIQSPAGQSRCGGFLVREDFVLTAAHCWGSNINVTLGAHNIQRRENTQQHITARRAIRHPQYNQRTIQNDIMLLQLSRRVRRNRNVNPVALPRAQEGLRPGTLCTVAGWGRVSMRRGTDTLREVQLRVQRDRQCLRIFGSYDPRRQICVGDRRERKAAFKGDSGGPLLCNNVAHGIVSYGKSSGVPPEVFTRVSSFLPWIRTTMRSFKLLDQMETPL

SEQ ID NO: 35893 - protein, 75 aa, Homo sapiens
LGSLSGKMQPLLLLLAFLLPTGAEAGEIIGGRESRPHSRPYMAYLQIQSPAGQSRCGGFLVREDFVLTAAHCWGR

SEQ ID NO: 35894 - protein, 253 aa, Homo sapiens
LGSLPEKMQPFLLLLAFLLTPGAGTEEIIGGHEAKPHSRPYMAFVQFLQEKSRKRCGGILVRKDFVLTAAHCQGSSINVTLGAHNIKEQERTQQFIPVKRPIPHPAYNPKNFSNDIMLLQLERKAKWTTAVRPLRLPSSKAQVKPGQLCSVAGWGYVSMSTLATTLQEVLLTVQKDCQCERLFHGNYSRATEICVGDPKKTQTGFKGDSGGPLVCKDVAQGILSYGNKKGTPPGVYIKVSHFLPWIKRTMKRL

SEQ ID NO: 35895 - protein, 21 aa, Homo sapiens
MQPILLLLAFLLLPRADAGMF

SEQ ID NO: 35896 - protein, 26 aa, Homo sapiens
LMKNWSLTWFVSGLLLSLQHSSLKSC

SEQ ID NO: 35897 - protein, 535 aa, Homo sapiens
LLPERSVPPLPPAPPAPRSAPTGRRRPPRRCPAPAPPPPFPPDDWVMLDMGDRKEVKMIPKSSFSINSLVPEAVQNDNHHASHGHHNSHHPQHHHHHHHHHHHPPPPAPQPPPPPQQQQPPPPPPPAPQPPQTRGAPAADDDKGPQQLLLPPPPPPPPAAALDGAKADGLGGKGEPGGGPGELAPVGPDEKEKGAGAGGEEKKGAGEGGKDGEGGKEGEKKNGKYEKPPFSYNALIMMAIRQSPEKRLTLNGIYEFIMKNFPYYRENKQGWQNSIRHNLSLNKCFVKVPRHYDDPGKGNYWMLDPSSDDVFIGGTTGKLRRRSTTSRAKLAFKRGARLTSTGLTFMDRAGSLYWPMSPFLSLHHPRASSTLSYNGTTSAYPSHPMPYSSVLTQNSLGNNHSFSTANGLSVDRLVNGEIPYATHHLTAAALAASVPCGLSVPCSGTYSLNPCSVNLLAGQTSYFFPHVPHPSMTSQSSTSMSARAASSSTSPQAPSTLPCESLRPSLPSFTTGLSGGLSDYFTHQNQGSSSNPLIH

SEQ ID NO: 35898 - protein, 100 aa, Homo sapiens
LNVQKCNRNSALISKGLISGGALTVLSCLHCLPSNILGMGSNTGIGGGRTADPNNFRLLKGGGENGREEWKGKRKNICVHLHISCAEQKSPTISKRSLFL

SEQ ID NO: 35899 - protein, 67 aa, Homo sapiens
MWSVGVIIYVSLSGTFPFNEDEDIHDQIQNAAFMYPPNPWKEISHEDVDLIQYNTYILGCLSSHCTA

SEQ ID NO: 35900 - protein, 701 aa, Homo sapiens
LHRVSQFYREWRSSWRRWGPELRHTLWPRPSGLCFRGGKGSHVIPPLRSPAGQWLVGAKMAAAAAATAAAAASIRERQTVALKRMLNFNVPHIKNSTGEPVWKVLIYDRFGQDIISPLLSVKELRDMGITLHLLLHSDRDPIPDVPAVYFVMPTEENIDRMCQDLRNQLYESYYLNFISAISRSKLEDIANAALAASAVTQVAKVFDQYLNFITLEDDMFVLCNQNKELVSYRAINRPDITDTEMETVMDTIVDSLFCFFVTLGAVPIIRCSRGTAAEMVAVKLDKKLRENLRDARNSLFTGDTLGAGQFSFQRPLLVLVDRNIDLATPLHHTWTYQALVHDVLDFHLNRVNLEESSGVENSPAGARPKRKNKKSYDLTPVDKFWQKHKGSPFPEVAESVQQELESYRAQEDEVKRLKSIMGLEGEDEGAISMLSDNTAKLTSAVSSLPELLEKKRLIDLHTNVATAVLEHIKARKLDVYFEYEEKIMSKTTLDKSLLDIISDPDAGTPEDKMRLFLIYYISTQQAPSEADLEQYKKALTDAGCNLNPLQYIKQWKAFTKMASAPASYGSTTTKPMGLLSRVMNTGSQFVMEGVKNLVLKQQNLPVTRILDNLMEMKSNPETDDYRYFDPKMLRGNDSSVPRNKNPFQEAIVFVVGGGNYIEYQNLVDYIKGKQGKHILYGCSELFNATQFIKQLSQLGQK

SEQ ID NO: 35901 - protein, 32 aa, Homo sapiens
VGAKMAAAAAATAAAAASIRERQTGTDLFSSP

SEQ ID NO: 35902 - protein, 28 aa, Homo sapiens
VGAKMAAAAAATAAAAASIRERQTGTHL

SEQ ID NO: 35903 - protein, 52 aa, Homo sapiens
VGAKMAAAAAATAAAAASIRERQTVALKRMLNFNVPHIKNSTGEPVWKAFTL

SEQ ID NO: 35904 - protein, 79 aa, Homo sapiens
VGAKMAAAAAATAAAAASIRERQTVALKRMLNFNVPHIKNSTGEPVWKVLIYDRFGQDIISPLLSVKELRDMGITLHLH

SEQ ID NO: 35905 - protein, 167 aa, Homo sapiens
VGAKMAAAAAATAAAAASIRERQTVALKRMLNFNVPHIKNSTGEPVWKVLIYDRFGQDIISPLLSVKELRDMGITLHLLLHSDRDPIPDVPAVYFVMPTEENIDRMCQDLRNQLYESYYLNFISAISRSKLEDIANAALAASAVTQVAKPLTGQISQTRKWKLLWTL

SEQ ID NO: 35906 - protein, 384 aa, Homo sapiens
LTASSAFLLLWVWGIHVQVCYMGKLRVTGVWCTNEFVTQAMGMVPDREFFDPHPLCSGAVPIIRCSRGTAAEMVAVKLDKKLRENLRDARNSLFTGDTLGAGQFSFQRPLLVLVDRNIDLATPLHHTWTYQALVHDVLDFHLNRVNLEESSGVENSPAGARPKRKNKKSYDLTPVDKFWQKHKGSPFPEVAESVQQELESYRAQEDEVKRLKSIMGLEGEDEGAISMLSDNTAKLTSAVSSLPELLEKKRLIDLHTNVATAVLEHIKARKLDVYFEYEEKIMSKTTLDKSLLDIISDPDAGTPEDKMRLFLIYYISTQQAPSEADLEQYKKALTDAGCNLNPLQYIKQWKAFTKMASAPASYGSTTTKPMGIYLLLVFWTILWR

SEQ ID NO: 35907 - protein, 32 aa, Homo sapiens
LMEWAENVMQIHADRKSVLEVISYKIRFREQE

SEQ ID NO: 35908 - protein, 25 aa, Homo sapiens
VRGVCVLFCFVFLFKKTMELTCQEF

SEQ ID NO: 35909 - protein, 1576 aa, Homo sapiens
MDAVMSDGNLETRLGSTDVAASQHMLVCALQELGNLIHNLGTTAAPLLQDSSTGLLDSILSVILHPSISVRLAAAWCLHCIAVALPSYLTPLLDRCLERLTGHKSSPEAVTGFSFAVAALLGAVKHCPLGIPHGKGKIIMTLAEDLLCSAAQNSRLSAQRTQAGWLLISALMTLGPAVVSHHLARVLLLWKCVFPASPKDLETEKSRGDSFTWQVTLEGRAGALCAIKSFVSHCGDLLTEEVTQRLLPPLPCAVDLLTQLSSILKMYGSPLKTPSVVYRQRLYELLILLPPETYEGNLCAILRELAADLTAPDIQVAASTFLLPPLCHQDDLLILSPFLQETDHRFIEEQLLLGNGVACGSLEYDPYSIYEKDVEGDSVPKPLPPALSVISSASKLFGVVCAHVGETQRLLILEQLLDSIKHTKGARQQVVQLHVVSSVSSFLKYVAGSKGCLGPEEMKRFALTLVMGALESPNPLLRCAAAESWARLAQVVDDGAFTAGLAQVSFDKLKSARDVVTRTGHSLALGSLHRYLGGISSSQHLNSCIGILYTLAQDSTSPDVQTWALHSLSLIIDSAGPLYYVHVEPTLSLIIMLLLNVPPTHAEVHQSLGRCLNALITTLGPELQGNSTSISTLRTSCLLGCAVMQDNPDCLVQAQAISCLQQLHMFAPRHVNLSSLVSCLCVNLCSPYLLLRRAVLACLRQLVQREAAEVSEHAVMLAKDSREELTPDANIREVGLEGALLILLDKETDERLCHDIKETLNYMLTSMAVEKLSLWLKLCKDVLAASADFTAVTCVDTMQEEEGDKGDDASVLTTRRDEKSHPFTNPRWATRVFAAECVCRIINQCENANSAHFDIALAQEMKKRDSRNDFLVLHLADLIRMAFMAATDHSDQLRLSGLEMLLVVIRRFATVPEPEFPGHVILEQYQANVGAALRPAFTSETPPDVTAKACQVCSAWIASGVVSDLNDLRRVHQLLVSSLTKIQAGKEALSHLYNESASTMEILAVLKAWAEVYIIAVQRHKNHRQPLKTTTCLEDGIRNGSCSSDGLLDLVYADLGTLSRLWLAALQDFALLTLPSEFASQLPAEGGAFYTAETSENAKLHYYNSWALILHATALWLTSTGFVVADPDEGASNLSRPVTPTSMCQGSSSGATIKSPEDVYTDRFHLILGISVEFLCSLRSDATMESITACLHALQALLDVPWPRSKIGSDQDLGIELLNVLHRVILTRESPSIQLASLEVVRQIICAAQEHVKEKRRSAEVDDGAAEKETLPEFGEGKDTGGLVPGKSLVFATLELCVCILVRQLPELNPKLTGSPGVKATKPQILLEDGSRLVSAALVILSELPAVCSPEVDETHQELDEVSLLTAITVFILSTSPEVTTIPCLQKRCIDKFKATLEIKDPVVQIKTYQLLHSIFQYPNPAVSYPYIYSLASCIMEKLQEIDKRKPENTAELEIFQEGIKVLETLVTVAEEHHRAQLVACLLPILISFLLDENSLGSATSIMRNLHDFALQNLMQIGPQYSSVFKSLVASSPALKARLEAAIKGNQESVKVKIPTSKYTKSPGKNSSIQLKTSFL

SEQ ID NO: 35910 - protein, 1147 aa, Homo sapiens
LGGLLQGMELAHSLLLNEEAYNQLGEVQKAEFIFEWLRYLEKLLLATSRNDVREKQKTLVEQLLSLLNSSPGPPTRKLLAKNLAILYSIGDTFSVHEAIDKCNDLIRSKDDSPSYLPTKLAAVVCLGSLYKKLGRILGNTFTDTVGNILKAMKSAESQGRYEIMLSLQNILNGLGAAAAPCHRDVYKAARSCLTDRSMAVRCAAAKCLLELQNEAIFMWSTDLDSVATLCFKSFEGSNYDVRISVSKLLGIILAKAVISKHPGTAASRQSIRRVSLEEVLELLGTGFLRGSSGFLRASGDMLKGTSSVSRDVRVGVTQAYVVFVSTLGGAWLEKNFAAFFSHILSLASPSHPKATQTQIDAVCCRRCVSFILRTTIGGLLGEKAQLAAVKDICQAIWKLKKVMDAVMSDGNLETRLGSTDVAASQHMLVCALQELGNLIHNLGTTAAPLLQDSSTGLLDSILSVILHPSISVRLAAAWCLHCIAVALPSYLTPLLDRCLERLTGHKSSPEAVTGFSFAVAALLGAVKHCPLGIPHGKGKIIMTLAEDLLCSAAQNSRLSAQRTQAGWLLISALMTLGPAVVSHHLARVLLLWKCVFPASPKDLETEKSRGDSFTWQVTLEGRAGALCAIKSFVSHCGDLLTEEVTQRLLPPLPCAVDLLTQLSSILKMYGSPLKTPSVVYRQRLYELLILLPPETYEGNLCAILRELAADLTAPDIQVAASTFLLPPLCHQDDLLILSPFLQETDHRFIEEQLLLGNGVACGSLEYDPYSIYEKDVEGDSVPKPLPPALSVISSASKLFGVVCAHVGETQRLLILEQLLDSIKHTKGARQQVVQLHVVSSVSSFLKYVAGSKGCLGPEEMKRFALTLVMGALESPNPLLRCAAAESWARLAQVVDDGAFTAGLAQVSFDKLKSARDVVTRTGHSLALGSLHRYLGGISSSQHLNSCIGILYTLAQDSTSPDVQTWALHSLSLIIDSAGPLYYVHVEPTLSLIIMLLLNVPPTHAEVHQSLGRCLNALITTLGPELQGNSTSISTLRTSCLLGCAVMQDNPDCLVQAQAISCLQQLHMFAPRHVNLSSLVSCLCVNLCSPYLLLRRAVLACLRQLVQREAAEVSEHAVMLAKDSREELTPVFTASSPGVDSICRNHLE

SEQ ID NO: 35911 - protein, 48 aa, Homo sapiens
LLLPFLLFRFLVVTQEQTTVLQRNQILCSRFQTGHGHRMLLDKSPYGL

SEQ ID NO: 35912 - protein, 48 aa, Homo sapiens
MSLPPPPPGPLPLRRRRRRPTLLGKMIPMILKMFLHRNEGNTKNQIQF

SEQ ID NO: 35913 - protein, 76 aa, Homo sapiens
LRLVPFLLLKLAFTVFHINPPCTFPQTYLHFSMHSIIDLTHFIVSHLNTLRLVQLTSRLQLLKIKVQFKAQSVTLN

SEQ ID NO: 35914 - protein, 14 aa, Homo sapiens
LLALFILVTVPEFS

SEQ ID NO: 35915 - protein, 294 aa, Homo sapiens
MTTLTEIKLLPSLVLLVCCEYLAIFKKTVAMHEVFLCRVAAHPILRRDLNFHVFLEYNQDLSVRGKNKKEKLEDFFKNMVKSADGVIVSGVKDVDDFFEHERTFLLEYHNRVKDASAKSDRMTRSHKSAADDYNRIGSSLYALGTQDSTDICKFFLKVSELFDKTRKIEARVSADEDLKLSDLLKYYLRESQAAKDLLYRRSRSLVDYENANKALDKARAKNKDVLQAETSQQLCCQKFEKISESAKQELIDFKTRRVAAFRKNLVELAELELKHAKGNLQLLQNCLAVLNGDT

SEQ ID NO: 35916 - protein, 37 aa, Homo sapiens
MQKIEARVSADEDLKLSDLLKYYLRESQAAKVILIFF

SEQ ID NO: 35917 - protein, 206 aa, Homo sapiens
LQLPACPALSAAHPLARPSFSSQCHRAEARAAAAATAEGTMASGVTVNDEVIKVFNDMKVRKSSTQEEIKKRKKAVLFCLSDDKRQIIVEEAKQILVGDIGDTVEDPYTSFVKLLPLNDCRYALYDATYETKESKKEDLVFIFWAPESAPLKSKMIYASSKDAIKKKFTGIKHEWQVNGLDDIKDRSTLGEKLGGNVVVSLEGKPL

SEQ ID NO: 35918 - protein, 34 aa, Homo sapiens
MRKEMNKKICCYFSSSKLESISLKILCMFSKHPS

SEQ ID NO: 35919 - protein, 28 aa, Homo sapiens
LSAIKSAVETGQADDERVREYYLLHLQR

SEQ ID NO: 35920 - protein, 60 aa, Homo sapiens
MKRNCERRRFPQAGTNELLGHVVRTRQRHTIKENAGLSWPLKSGLPRLPPSIKMVVGRPS

SEQ ID NO: 35921 - protein, 501 aa, Homo sapiens
LSAFAGAAKERSQMNSQTEDHALAPVRNTIQLPTQPLNSEEWDKLKEDLKENTGKTSFESWIISQMAGCHSSIDVAKSLLAWVAAKNNGIVSYDLLVKYLYLCVFHMQTSEVIDVFEIMKARYKTLEPRGYSLLIRGLIHSDRWREALLLLEDIKKVITPSKKNYNDCIQGALLHQDVNTAWNLYQELLGHDIVPMLETLKAFFDFGKDIKDDNYSNKLLDILSYLRNNQLYPGESFAHSIKTWFESVPGKQWKGQFTTVRKSGQCSGCGKTIESIQLSPEEYECLKGKIMRDVIDGGDQYRKTTPQELKRFENFIKSRPPFDVVIDGLNVAKMFPKVRESQLLLNVVSQLAKRNLRLLVLGRKHMLRRSSQWSRDEMEEVQKQASCFFADDISEDDPFLLYATLHSGNHCRFITRDLMRDHKACLPDAKTQRLFFKWQQGHQLAIVNRFPGSKLTFQRILSYDTVVQTTGDSWHIPYDEDLVERCSCEVPTKWLCLHQKT

SEQ ID NO: 35922 - protein, 75 aa, Homo sapiens
LGEKYILRVRMRTGVACSVSQAQKDELILEGNDIELVSNLEALIQQATTVKNKDIRKFLDGIYVSEKGTVQPADE

SEQ ID NO: 35923 - protein, 231 aa, Homo sapiens
LEVAMAGLRREYAFKAINQGGLTSVAVRGKDCAVIVTQKKVPDKLLDSSTVTHLFKITENIGCVMTGMTADSRSQVQRARYEAANWKYKYGYEIPVDMLCKRIADISQVYTQNAEMRPLGCCMILIGIDEEQGPQVYKCDPAGYYCGFKATAAGVKQTESTSFLEKKVKKKFDWTFEQTVETAITCLSTVLSIDFKPSEIEVGVVTVENPKFRILTEAEIDAHLVALAERD

SEQ ID NO: 35924 - protein, 28 aa, Homo sapiens
LIGHLNRQWKILTEAEIDAHLVALAERD

SEQ ID NO: 35925 - protein, 271 aa, Homo sapiens
VGHGGPPRRAEEGAATGRPPRQRPGLHERRGVRADGQGAAGDPPRAAGGAARLGALEAAAHRGRGLTPLHLAVITNQPEIAEALLGAGCDPELRDFRGNTPLHLACEQGCLASVGVLTQSCTTPHLHSILKATNYNGHTCLHLASIHGYLGIVELLVSLGADVNAQEPCNGRTALHLAVDLQNPDLVSLLLKCGADVNRVTYQGYSPYQLTWGRPSTRIQQQLGQLTLENLQMLPESEDEESYDTESEFTEFTEDELPYDDCVFGGQRLTL

SEQ ID NO: 35926 - protein, 702 aa, Homo sapiens
MDKRLVVSLLLCLLDWIMALPLKTLLQPFHATGAESDKTEKSVLNCIYKVLHGCVYGAQCFSNPRYFPMSLSDLASVDYDPFMHLESLKEPEPLHSPDSERSSKLQPVTEVKTQMQHGLISIAARTVITHLVNHLGHYPMSGGPAMLTSQVCENHDNHYSESTELSPELFESPNIQFFVLNNTTLVSCIQIRSEENMPGGGLSAGLASANSNVRIIVRDLSGKYSWDSAILYGPPPVSGLSEPTSFMLSLSHQEKPEEPPTSNECLEDITVKDGLSLQFKRFRETVPTWDTIRDEEDVLDELLQYLGVTSPECLQRTGISLNIPAPQPVCISEKQENDVINAILKQHTEEKEFVEKHFNDLNMKAVEQDEPIPQKPQSAFYYCRLLLSILGMNSWDKRRSFHLLKKNEKLLRELRNLDSRQCRETHKIAVFYVAEGQEDKHSILTNTGGSQAYEDFVAGLGWEVNLTNHCGFMGGLQKNKSTGLTTPYFATSTVEVIFHVSTRMPSDSDDSLTKKLRHLGNDEVHIVWSEHTRDYRRGIIPTEFGDVLIVIYPMKNHMFSIQIMKKPEVPFFGPLFDGAIVNGKVLPIMVRATAINASRALKSLIPLYQNFYEERARYLQTIVQHHLEPTTFEDFAAQVFSPAPYHHLPSDAVGSYPEILPSETPTATQVDGADLASPMSPRTSKSRMSMKLRRSSGSANKS

SEQ ID NO: 35927 - protein, 93 aa, Homo sapiens
VRRPSARQPPRLRSEEPLRPAAAPSEKNIWWNPMMAVFIRLKLAHNHADDAAMRRELMVLRGDAVLDFLEPKARQLLHNGSFPLELLSFPRKA

SEQ ID NO: 35928 - protein, 541 aa, Homo sapiens
MAKFGVHRILLLAISLTKCLESTKLLADLKKCGDLECEALINRVSAMRDYRGPDCRYLNFTKGEEISVYVKLAGEREDLWAGKGKEFGYFPRDAVQIEEVFISEEIQMSTKESDFLCLLGVSYTFDNEDSELNGDYGENIYPYEEDKDEKSSIYESDFQIEPGFYATYESTLFEDQVPALEAPEDIGSTSESKDWEEVVVESMEQDRIPEVHVPPSSAVSGVKEWFGLGGEQAEEKAFESVIEPVQESSFRSRKIAVEDENDLEELNNGEPQTEHQQESESEIDSVPKTQSELASESEHIPKPQSTGWFGGGFTSYLGFGDEDTGLELIAEESNPPLQDFPNSISSDKEATVPCTEILTEKKDTITNDSLSLKPSWFDFGFAILGFAYAKEDKIMLDDRKNEEDGGADEHEHPLTSELDPEKEQEIETIKIIETEDQIDKKPVSEKTDESDTIPYLKKFLYNFDNPWNFQNIPKETELPFPKQILDQNNVIENEETGEFSIDNYPTDNTKVMIFKSSYSLSGWYENIYIRIYFIFKHNLFL

SEQ ID NO: 35929 - protein, 81 aa, Homo sapiens
MRFGLILRAVVLAGACCLRPAEVLTAAYPGRPRQPREASRRRHSSQKNGLRGTRRCALPTTSGLWTLDRKASRLSCGLVRV

SEQ ID NO: 35930 - protein, 300 aa, Homo sapiens
MRNILSLRNLLKFIELFRELTQKFWKVMHTKKKENFRHFLQSCLYGQSFFEEDGKEYIYKEPKLTGLSEISLRLVKLYGEKFGMANVKKIQDTDEVNTKEFDPKYAHIQVTYVKPYFDDKELTERKTEFGRNHNISRFVFEAPYTLSGKKQGCTEEQCKCRTILTTSKSFPYVKRRIPINCEQQINLKPIDVATDEIKDKTADLQKLCSSVYVDMIQLQLKLQGCVSMQVNAGPLAYAGAFLNDSQASKYPPRKVSELKDMFRKSIQACSIALELNEWLIKEDQVEYHEGLKSNFRDVVK

SEQ ID NO: 35931 - protein, 548 aa, Homo sapiens
MQGLLRFEDQDSARGDQNIAMFYPTSTQMVYRRGLQAIPLSVDLWIHYINFLKETLDPGDPETNNTIRGTFEHAVLAAGTDFRSDRLWEMYINWENEQGNLREVTAIYDRILGIPTQLYSHHFQRFKEHVQNNLPRDLLTGEQFIQLRRELASVNGHSGDDGPPGDDLPSGIEDITDPAKLITEIENMRHRIIEIHQEMFNYNEHEVSKRWTFEEGIKRPYFHVKPLEKAQLKNWKEYLEFEIENGTHERVVVLFERCVISCALYEEFWIKYAKYMENHSIEGVRHVFSRACTIHLPKKPMVHMLWAAFEEQQGNINEARNILKTFEECVLGLAMVRLRRVSLERRHGNLEEAEHLLQDAIKNAKSNNESSFYAVKLARHLFKIQKNLPKSRKVLLEAIERDKENTKLYLNLLEMEYSGDLKQNEENILNCFDKAVHGSLPIKMRITFSQRKVEFLEDFGSDVNKLLNAYDEHQTLLKEQDSLKRKAENGSEEPEEKKAHTEDTTSSSTQMIDGDLQANQAVYNYSAWYQYNYQNPWNYGQYYPPPPT

SEQ ID NO: 35932 - protein, 38 aa, Homo sapiens
MFYPTSTQMVMVDYLNKIPVISISKVHRITQCCLSVKK

SEQ ID NO: 35933 - protein, 251 aa, Homo sapiens
VAPPRPRGRGDAELRRAGSVKRRQRGKMAAAVPQRAWTVEQLRSEQLPKKDIIKFLQEHGSDSFLAEHKLLGNIKNVAKTANKDHLVTAYNHLFETKRFKGTESISKVSEQVKNVKLNEDKPKETKSEETLDEGPPKYTKSVLKKGDKTNFPKKGDVVHCWYTGTLQDGTVFDTNIQTSAKKKKNAKPLSFKVGVGKVIRGWDEALLTMSKGEKARLEIEPEWAYGKKGQPDAKIPPNAKLTFEVELVDID

SEQ ID NO: 35934 - protein, 444 aa, Homo sapiens
LISVSMLIYPAAQEKSPLVTREGDTIELQCQVTGKPKPIILWSRADKEVAMPDGSMQMESYDGTLRIVNVSREMSGMYRCQTSQYNGFNVKPREALVQLIVQYPPAVEPAFLEIRQGQDRSVTMSCRVLRAYPIRVLTYEWRLGNKLLRTGQFDSQEYTEYAVKSLSNENYGVYNCSIINEAGAGRCSFLVTGKAYAPEFYYDTYNPVWQNRHRVYSYSLQWTQMNPDAVDRIVAYRLGIRQAGQQRWWEQEIKINGNIQKGELITYNLTELIKPEAYEVRLTPLTKFGEGDSTIRVIKYSGEFHCGFEDGNICLFTQDDTDNFDWTKQSTATRNTKYTPNTGPNADRSGSKEGFYMYIETSRPRLEGEKARLLSPVFSIAPKNPYGPTNTAYCFSFFYHMYGQHIGSCYVAQAGLKESSHLRLSKCWDYRHESLCPARKLLRS

SEQ ID NO: 35935 - protein, 15 aa, Homo sapiens
MAAPGGGKEEVSKPA

SEQ ID NO: 35936 - protein, 12 aa, Homo sapiens
MERTETKPSRGS

SEQ ID NO: 35937 - protein, 121 aa, Homo sapiens [sequence omitted]

SEQ ID NO: 35938 - protein, 16 aa, Homo sapiens
MAYFAFMQTMLQVCFI

SEQ ID NO: 35939 - protein, 29 aa, Homo sapiens
MASSPGGSFRVLGAACSPIELANVNLLED

SEQ ID NO: 35940 - protein, 45 aa, Homo sapiens
MLLAGINIIAILWVDLGRFKPTSDPYHPSSRDWLRDSHPMQANAR

SEQ ID NO: 35941 - protein, 43 aa, Homo sapiens
VWTLFLVCSIVGALRVSARPLMQTIAAALKMEERWDSAVFCFG

SEQ ID NO: 35942 - protein, 51 aa, Homo sapiens
MGLLAVLFIQSLIRLVNMERLLCTRPGTGYRKNQTARFLPPFISLCPFLEY

SEQ ID NO: 35943 - protein, 75 aa, Homo sapiens
LYAPPPPPRGRAVQRLSGGGGDGKPGAAGRRAGGGRGCGLGSRSRAPRSTKTGPPPLDGAAGGGSMLGSGAVRAC

SEQ ID NO: 35944 - protein, 226 aa, Homo sapiens
MAKPLTDQEKRRQISIRGIVGVENVAELKKSFNRHLHFTLVKDRNVATTRDYYFALAHTVRDHLVGRWIRTQQHYYDKCPKRVYYLSLEFYMGRTLQNTMINLGLQNACDEAIYQLGLDIEELEEIEEDAGLGNGGLGRLAACFLDSMATLGLAAYGYGIRYEYGIFNQKIRDGWQVEEADDWLRYGNPWEKSRPEFMLPVHFYGKVEHTNTGTKWIDTQVFRVLV

SEQ ID NO: 35945 - protein, 68 aa, Homo sapiens
VLSAVFENALCFCLVLRLQMAGTLRVSFSFCHGWQELMGHELHLYKHEQISRYSQMGQMLPYCRQFLV

SEQ ID NO: 35946 - protein, 31 aa, Homo sapiens
MQFGLMALMYSHCAFLFLSSFSSTPPSTPPH

SEQ ID NO: 35947 - protein, 33 aa, Homo sapiens
MESLFLFSILFVRVSRPLFTNSLQLERSFPKIW

SEQ ID NO: 35948 - protein, 24 aa, Homo sapiens
MLSLGIFILLCLSSLIFASSCSWQ

SEQ ID NO: 35949 - protein, 75 aa, Homo sapiens
LGGRSATPLQVGEVVPGYPASLARPRLLPPPPSRGGGNCWPRGLGNGPGPRPQVPGSRKSLWKIFPVISDFRNHY

SEQ ID NO: 35950 - protein, 205 aa, Homo sapiens
LVKVNYLFAFHCFFLGLCVEKRAFYRLISGLHASINVHLSARYLLQETWLEKKWGHNITEFQQRFDGILTEGEGPRRLKNLYFLYLIELRALSKVLPFFERPDFQLFTGNKIQDEENKMLLLEILHEIKSFPLHFDENSFFAGDKKEAHKLKEDFRLHFRNISRIMDCVGCFKCRLWGKLQNFYKCERIRKLQELVTEYSLKKTS

SEQ ID NO: 35951 - protein, 282 aa, Homo sapiens
LRAHGPRPSVRTGLPSVGRQAAGAAMGRGWGFLFGLLGAVWLLSSGHGEEQPPETAAQRCFCQVSGYLDDCTCDVETIDRFNNYRLFPRLQKLLESDYFRYYKVNLKRPCPFWNDISQCGRRDCAVKPCQSDEVPDGIKSASYKYSEEANNLIEECEQAERLGAVDESLSEETQKAVLQWTKHDDSSDNFCEADDIQSPEAEYVDLLLNPERYTGYKGPDAWKIWNVIYEENCFKPQTIKRPLNPLASGQGKLLICVSLLFLRSLCRKKSILQTYIWPTCKH

SEQ ID NO: 35952 - protein, 85 aa, Homo sapiens
VHLSFHLIKCLDSLLPLTKQKPFAEPGNRALEMTRPRARDKALCHPALSLWSSTPSGVEMAQSSPGDRTSAALSKGTIKRTYQAV

SEQ ID NO: 35953 - protein, 88 aa, Homo sapiens
LKPGTRVALDMTTLTIMRYLPREVDPLVYNMSHEDPGNVSYSEIGGLSEQIRELREVIELPLTNPELFQRVGIIPPKGCLLYGPPGWY

SEQ ID NO: 35954 - protein, 236 aa, Homo sapiens
LDPGRPEGPRASTMEDVKLEFPSLPQCKEDAEEWTYPMRREMQEILPGLFLGPYSSAMKSKLPVLQKHGITHIICIRQNIEANFIKPNFQQLFRYLVLDIADNPVENIIRFFPMTKEFIDGSLQMGGKVLVHGNAGISRSAAFVIAYIMETFGMKYRDAFAYVQERRFCINPNAGFVHQLQEYEAIYLAKLTIQMMSPLQIERSLSVHSGTTGSLKRTHEEEDDFGTMQVATAQNG

SEQ ID NO: 35955 - protein, 41 aa, Homo sapiens
LNLFLHCIFLKVWLPFLVVKSMGNKELYVCYLCCSFKKSIH

SEQ ID NO: 35956 - protein, 88 aa, Homo sapiens
VAPWPPPPLACARPCVRGQRRGGGVGAATSGPRFPTVARAVEEEVGLALKPDPDPVLCTLVGESPTRLARSADRRASTVPVTSTVPDS

SEQ ID NO: 35957 - protein, 714 aa, Homo sapiens
VRERDPAGTRGGAAGRGTGSQPALCLGAGRQEGAMALDGIRMPDGCYADGTWELSVHVTDLNRDVTLRVTGEVHIGGVMLKLVEKLDVKKDWSDHALWWEKKRTWLLKTHWTLDKYGIQADAKLQFTPQHKLLRLQLPNMKYVKVKVNFSDRVFKAVSDICKTFNIRHPEELSLLKKPRDPTKKKKKKLDDQSEDEALELEGPLITPGSGSIYSSPGLYSKTMTPTYDAHDGSPLSPTSAWFGDSALSEGNPGILAVSQPITSPEILAKMFKPQALLDKAKINQGWLDSSRSLMEQDVKENEALLLRFKYYSFFDLNPKYDAIRINQLYEQAKWAILLEEIECTEEEMMMFAALQYHINKLSIMTSENHLNNSDKEVDEVDAALSDLEITLEGGKTSTILGDITSIPELADYIKVFKPKKLTLKGYKQYWCTFKDTSISCYKSKEESSGTPAHQMNLRGCEVTPDVNISGQKFNIKLLIPVAEGMNEIWLRCDNEKQYAHWMAACRLASKGKTMADSSYNLEVQNILSFLKMQHLNPDPQLIPEQITTDITPECLVSPRYLKKYKNKQITARILEAHQNVAQMSLIEAKMRFIQAWQSLPEFGITHFIARFQGGKKEELIGIAYNRLIRMDASTGDAIKTWRFSNMKQWNVNWEIKMVTVEFADEVRLSFICTEVDCKVVHEFIGGYIFLSTRAKDQNESLDEEMFYKLTSGWV

SEQ ID NO: 35958 - protein, 76 aa, Homo sapiens
LCLGAGRQEGAMALDGIRMPDGCYADGTWELSVHVTDLNRDVTLRVTGEVHIGGVMLKLVEKLEKRSPTRCKKRLV

SEQ ID NO: 35959 - protein, 79 aa, Homo sapiens
LSRVNCSQFLGLCALPVAACLLLYLSDTISPEQAIDSLRDLRGSGAIQTIKQYNYLHEFRDKLAAHLSSRDSQSRSVSR

SEQ ID NO: 35960 - protein, 23 aa, Homo sapiens
LNKEEIIFIVMKLCKVFPYIGNC

SEQ ID NO: 35961 - protein, 24 aa, Homo sapiens
LSFLMTLHIIMCVVFETFISQRES

SEQ ID NO: 35962 - protein, 20 aa, Homo sapiens
LIYPLALKIRLLMDKVLLTY

SEQ ID NO: 35963 - protein, 297 aa, Homo sapiens
LFRRQEEPRAAGAVAAAALAAVSQAAPASSGPSPSDPSPLLDPTAVSDIAGKMSDEFSLADALPEHSPAKTSAVSNTKPGQPPQGWPGSNPWNNPSAPSSVPSGLPPSATPSTVPFGPAPTGMYPSVPPTGPPPGPPAPFPPSGPSCPPPGGPYPAPTVPGPGPTGPYPTPNMPFPELPRPYGAPTDPAAAGPLGPWGSMSSGPWAPGMGGQYPTPNMPYPSPGPYPAPPPPQAPGAAPPVPWGTVPPGAWGPPAPYPAPTGSYPTPGLYPTPSNPFQVPSGPSGAPPMPGGPHSYH

SEQ ID NO: 35964 - protein, 8 aa, Homo sapiens
MFCILGWL

SEQ ID NO: 35965 - protein, 19 aa, Homo sapiens
LGILMFVIVFLTVMKKYVL

SEQ ID NO: 35966 - protein, 154 aa, Homo sapiens
MAASRRLMKELEEIRKCGMKNFCNIQVDEANLLTWQGLIVPDNPPYDKGAFRIEINFPAEYPFKPPKITFKTKIYHPNIDEKGQVCLPVISAENWKPATKTDQVIQSLIALVNDPQPKHPLRADLAEEYSKDRKKFCKNAEEFTKKYGEKRPVD

SEQ ID NO: 35967 - protein, 94 aa, Homo sapiens
MNTMKAVLEEKEKDLANTGKWLQDLQEENESLKAHVQEVAQHNLKEASSASQFEELEIVLKEKENELKRLEAMLKERESDLSSKTQLLQVNMVT

SEQ ID NO: 35968 - protein, 347 aa, Homo sapiens
LYYCLPKILLHVFMFWFRISEREKEISGLWNELDSLKDAVEHQRKKNNDLREKNWEAMEALASTEKMLQDKVNKTSKERQQQVEAVELEAKEVLKKLFPKVSVPSNLSYGEWLHGFEKKAKECMAGTSGSEEVKVLEHKLKEADEMHTLLQLECEKYKSVLAETEGILQKLQRSVEQEENKWKVKVDESHKTIKQMQSSFTSSEQELERLRSENKDIENLRREREHLEMELEKAEMERSTYVTEVRELKAQLNETLTKLRTEQNERQKVAGDLHKAQQSLELIQSKIVKAAGDTTVIENSDVSPETESSEKETMSVSLNQTVTQLQQLLQAVNQQLTKEKEHYQVLE

SEQ ID NO: 35969 - protein, 70 aa, Homo sapiens
LKAQLNETLTKLRTEQNERQKVAGDLHKAQQSLELIQSKIVKAAGDTTVIENSDVSPETVCIFFIPRSLS

SEQ ID NO: 35970 - protein, 670 aa, Homo sapiens
MRGPIVLHICLAFCSLLLFSVATQCLAFPKIERRREIAHVHAEKGQSDKMNTDDLENSSVTSKQTPQLVVSEDPMMMSAVPSATSLNKAFSINKETQPGQAGLMQTERPGVSTPTESGVPSAEEVFGSSQPERISPESGLAKAMLTIAITATPSLTVDEKEELLTSTNFQPIVEEITETTKGFLKYMDNQSFATESQEGVGLGHSPSSYVNTKEMLTTNPKTEKFEADTDHRTTSFPGAESTAGSEPGSLTPDKEKPSQMTADNTQAAATKQPLETSEYTLSVEPETDSLLGAPEVTVSVSTAVPAASALSDEWDDTKLESVSRIRTPKLGDNEETQVRTEMSQTAQVSHEGMEGGQPWTEAAQVALGLPEGETHTGTALLIAHGNERSPAFTDQSSFTPTSLMEDMKVSIVNLLQSTGDFTESTKENDALFFLETTVSVSVYESEADQLLGNTMKDIITQEMTTAVQEPDATLSMVTQEQVATLELIRDSGKTEEEKEDPSPVSDVPGVTQLSRRWEPLATTISTTVVPLSFEVTPTVEEQMDTVTGPNEEFTPVLGSPVTPPGIMVGEPSISPALPALEASSERRTVVPSITRVNTAASYGLDQLESEETGFHHVAQARLKLLGLRSLPASASQSVGITSVNSCTQPRKYLNSCLKWKLNPKHFATGV

SEQ ID NO: 35971 - protein, 122 aa, Homo sapiens
MPLYEGLGSGGEKTAVVIDLGEAFTKCGFAGETGPRCIIPSVIKRAGMPKPVRVVQYNINTEELYSYLKEFIHILYFRHLLVNPRDRRVVIIESVLCPSHFRETLTRVLFKYFEVPVFISNK

SEQ ID NO: 35972 - protein, 16 aa, Homo sapiens
LKSSRLVILLVFTRDC

SEQ ID NO: 35973 - protein, 1504 aa, Homo sapiens
LFPPGEEWKSTRERLAFWLDVLGSSDLTSARNCYQPLLENPMVSESDFSKDVAVQVLPLDKIEENNKQKANDIFISQYTMGQKDALRTVLKQKAQSMPVFKEVKVHLLEDAGIEKDAVTQETRISPSGIDSATTVAAATAAAIATAAPLIKVQSDLEAKVNSVTELLSKLQETDKHLQRVTEQQTSIQRKQEKLHCHDHEKQMNVFMEQHIRHLEKLQQQQIDIQTHFISAALKTSSFQPVSMPSSRAVEKYSVKPEHPNLGSCNPSLYNTFASKQAPLKEVEDTSFDKQKSPLETPAPRRFAPVPVSRDDELSKRENLLEEKENMEVSCHRGNVRLLEQILNNNDSLTRKSESSNTTSLTRSKIGWTPEKTNRFPSCEELETTKVTMQKSDDVLHDLGQKEKETNSMVQPKESLSMLKLPDLPQNSVKLQTTNTTRSVLKDAEKILRGVQNNKKVLEENLEAIIRAKDGAAMYSLINALSTNREMSEKIRIRKTVDEWIKTISAEIQDELSRTDYEQKRFDQKNQRTKKGQNMTKDIRTNTQDKTVNKSVIPRKHSQKQIEEHFRNLPMRGMPASSLQKERKEGLLKATTVIQDEDYMLQVYGKPVYQGHRSTLKKGPYLRFNSPSPKSRPQRPKVIERVKGTKVKSIRTQTDFYATKPKKMDSKMKHSVPVLPHGDQQYLFSPSREMPTFSGTLEGHLIPMAILLGQTQSNSDTMPPAGVIVSKPHPVTVTTSIPPSSRKVETGVKKPNIAIVEMKSEKKDPPQLTVQVLPSVDIDSISNSSADVLSPLSSPKEASLPPVQTWIKTPEIMKVDEEEVKFPGTNFDEIIDVIQEEEKCDEIPDSEPILEFNRSVKADSTKYNGPPFPPVASTFQPTADILDKVIERKETLENSLIQWVEQEIMSRIISGLFPVQQQIAPSISVSVSETSEPLTSDIVEGTSSGALQLFVDAGVPVNSNVIKHFVNEALAETIAVMLGDREAKKQGPVATGVSGDASTNETYLPARVCTPLPTPQPTPPCSPSSPAKECVLVKTPDSSPCDSDHDMAFPVKEICAEKGDDMPAIMLVNTPTVTPTTTPPPAAAVFTPTLSDISIDKLKVSSPELPKPWGDGDLPLEEENPNSPQEELHPRAIVMSVAKDEEPESMDFPAQPPPPEPVPFMPFPAGTKAPSPSQMPGSDSSTLESTLSVTVTETETLDKPISEGEILFSCGQKLAPKILEDIGLYLTNLNDSLSSTLHDAVEMEDDPPSEGQVIRMSHKKFHADAILSFAKQNQESAVSQQAVYHSEDLENSVGELSEGQRPQLTAAAENILMGHSLYMQPPVTNTQSLDQQCDPKPLSRQFDTVSGSIYEDSCASHGPMSLGELELEPNSKLVLPTTLLTAQENDVNLPVAAEDFSQYQLKQNQDVKQVEHKPSQSYLRVRNKSDIAPSQQQVSPGDMDRTQIELNPYLTCVFSGGKAVPLSASQMPPAKMSVMLPSVNLEDCSQSLSLSTMQEDMESSGADTF

SEQ ID NO: 35974 - protein, 1545 aa, Homo sapiens
LFPPGEEWKSTRERLAFWLDVLGSSDLTSARNCYQPLLENPMVSESDFSKDVAVQVLPLDKIEENNKQKANDIFISQYTMGQKDALRTVLKQNVSLCLTGWSDHSGVITTHCSLYLLRLMRSSHLSLPSSWDYRAQSMPVFKEVKVHLLEDAGIEKDAVTQETRISPSGIDSATTVAAATAAAIATAAPLIKVQSDLEAKVNSVTELLSKLQETDKHLQRVTEQQTSIQRKQEKLHCHDHEKQMNVFMEQHIRHLEKLQQQQIDIQTHFISAALKTSSFQPVSMPSSRAVEKYSVKPEHPNLGSCNPSLYNTFASKQAPLKEVEDTSFDKQKSPLETPAPRRFAPVPVSRDDELSKRENLLEEKENMEVSCHRGNVRLLEQILNNNDSLTRKSESSNTTSLTRSKIGWTPEKTNRFPSCEELETTKVTMQKSDDVLHDLGQKEKETNSMVQPKESLSMLKLPDLPQNSVKLQTTNTTRSVLKDAEKILRGVQNNKKVLEENLEAIIRAKDGAAMYSLINALSTNREMSEKIRIRKTVDEWIKTISAEIQDELSRTDYEQKRFDQKNQRTKKGQNMTKDIRTNTQDKTVNKSVIPRKHSQKQIEEHFRNLPMRGMPASSLQKERKEGLLKATTVIQDEDYMLQVYGKPVYQGHRSTLKKGPYLRFNSPSPKSRPQRPKVIERVKGTKVKSIRTQTDFYATKPKKMDSKMKHSVPVLPHGDQQYLFSPSREMPTFSGTLEGHLIPMAILLGQTQSNSDTMPPAGVIVSKPHPVTVTTSIPPSSRKVETGVKKPNIAIVEMKSEKKDPPQLTVQVLPSVDIDSISNSSADVLSPLSSPKEASLPPVQTWIKTPEIMKVDEEEVKFPGTNFDEIIDVIQEEEKCDEIPDSEPILEFNRSVKADSTKYNGPPFPPVASTFQPTADILDKVIERKETLENSLIQWVEQEIMSRIISGLFPVQQQIAPSISVSVSETSEPLTSDIVEGTSSGALQLFVDAGVPVNSNVIKHFVNEALAETIAVMLGDREAKKQGPVATGVSGDASTNETYLPARVCTPLPTPQPTPPCSPSSPAKECVLVKTPDSSPCDSDHDMAFPVKEICAEKGDDMPAIMLVNTPTVTPTTTPPPAAAVFTPTLSDISIDKLKVSSPELPKPWGDGDLPLEEENPNSPQEELHPRAIVMSVAKDEEPESMDFPAQPPPPEPVPFMPFPAGTKAPSPSQMPGSDSSTLESTLSVTVTETETLDKPISEGEILFSCGQKLAPKILEDIGLYLTNLNDSLSSTLHDAVEMEDDPPSEGQVIRMSHKKFHADAILSFAKQNQESAVSQQAVYHSEDLENSVGELSEGQRPQLTAAAENILMGHSLYMQPPVTNTQSLDQQCDPKPLSRQFDTVSGSIYEDSCASHGPMSLGELELEPNSKLVLPTTLLTAQENDVNLPVAAEDFSQYQLKQNQDVKQVEHKPSQSYLRVRNKSDIAPSQQQVSPGDMDRTQIELNPYLTCVFSGGKAVPLSASQMPPAKMSVMLPSVNLEDCSQSLSLSTMQEDMESSGADTF

SEQ ID NO: 35975 - protein, 127 aa, Homo sapiens
MRRSAAATGPHGGAAAAPPTSEHGLTGQPALRRPLRGRPTWRDFLRGHGGRALLQHRGDRGAGEPERRKRRRHSCRSRWRRPWRVRGSAGGGGGGEAAARPGGGAAAVARSCSGGPGARPPAHLPAV

SEQ ID NO: 35976 - protein, 35 aa, Homo sapiens
MFGAAARSADLVLLEKNLQAAHGMPWTLLWEDPII

SEQ ID NO: 35977 - protein, 38 aa, Homo sapiens
MFGFVFVLFMVRLTDLENAKLCNTLLHRVILSATLEGR

SEQ ID NO: 35978 - protein, 226 aa, Homo sapiens
VHARRPRGEPRRAPKARTMQATADSTKMDCVWSNWKSQAIDLLYWRDIKQTGIVFGSFLLLLFSLTQFSVVSVVAYLALAALSATISFRIYKSVLQAVQKTDEGHPFKAYLELEITLSQEQIQKYTDCLQFYVNSTLKELRRLFLVQDLVDSLKFAVLMWLLTYVGALFNGLTLLLMAVVSMFTLPVVYVKHQAQIDQYLGLVRTHINAVVAKIQAKIPGAKRHAE

SEQ ID NO: 35979 - protein, 111 aa, Homo sapiens
VHARRPRGEPRRAPKARTMQATADSTKMDCVWSNWKSQAIDLLYWRDIKQTGIVFGSFLLLLFSLTQFSVVSVVAYLALAALSATISFRIYKSVLQAVQKTDEGHPFNLQS

SEQ ID NO: 35980 - protein, 76 aa, Homo sapiens
LRHRSFPERRVPPGTAAGSARAATEPLPSQAAVAAPVARCHGNCIHRCGRCFQCHGPHLLNNIKRWGRIVLHISHF

SEQ ID NO: 35981 - protein, 235 aa, Homo sapiens
MNWELLLWLLVLCALLLLLVQLLRFLRADGDLTLLWAEWQGRRPEWELTDMVVWVTGASSGIGEELAYQLSKLGVSLVLSARRVHELERVKRRCLENGNLKEKDILVLPLDLTDTGSHEAATKAVLQEFGRIDILVNNGGMSQRSLCMDTSLDVYRKLIELNYLGTVSLTKCVLPHMIERKQGKIVTVNSILGIISVPLSIGYCASKHALRVRLLKLNSDRTDLNVYMGDMAITV

SEQ ID NO: 35982 - protein, 24 aa, Homo sapiens
MSPRLFLLLLRDPLSASLSNARMI

SEQ ID NO: 35983 - protein, 85 aa, Homo sapiens
MADVLDLHEAGGEDFAMDEDGDESIHKLKEKAKKQKGRGFGSEEGSRARMREDYDSVEQDGDEPGPQRSVEGWILFVAGVHEEAT

SEQ ID NO: 35984 - protein, 41 aa, Homo sapiens
MKTFMMIQFHLIVGVQWCDLSSLQPLPPGLKQSSHLSLQSS

SEQ ID NO: 35985 - protein, 41 aa, Homo sapiens
MKRRMEKSLLKPLASCLLLGSLLFFWPSSSSSSTRSCVLKR

SEQ ID NO: 35986 - protein, 232 aa, Homo sapiens
LRTRSERRFRDWRDGPAGARAARRAAVAATAAVSARLKSDSRKSRSEHRTPRFYLTGACADLVSGPSSQAYPTKVLTYTLTTSKVAYFKRKYAEEEDLHQDYHGYFPKHLILPEDRTCILKLSLEKLRFLEDPETYLRRSVLINNLLRKIHLETEKESYEYFKEAPCYKTAYSDTRKRLKFMVQECCSQSLYYEELHSYHIVPYASENAIYEMGYTSSHLEQNSQLLIYKMN

SEQ ID NO: 35987 - protein, 11 aa, Homo sapiens
MLDVTWKMRKI

SEQ ID NO: 35988 - protein, 37 aa, Homo sapiens
LYSVKWTFLLLPSPIACPLPPLISLSLMPGSFYSPQL

SEQ ID NO: 35989 - protein, 409 aa, Homo sapiens
LRFLRYRLRLLRVLLPLDAAVDMEKIEEQFANLHIVKCSLGTKEPTYLLGIDTSKTVQAGKENLVAVLCSNGSIRIYDKERLNVLREFSGYPGLLNGVRFANSCDSVYSACTDGTVKCWDARVAREKPVQLFKGYPSNIFISFDINCNDHIICAGTEKVDDDALLVFWDARMNSQNLSTTKDSLGAYSETHSDDVTQVRFHPSNPNMVVSGSSDGLVNVFDINIDNEEDALVTTCNSISSVSCIGWSGKGYKQIYCMTHDEGFYWWDLNHLDTDEPVTRLNIQDVREVVNMKEDALDYLIGGLYHEKTDTLHVIGGTNKGRIHLMNCSMSGLTHVTSLQGGHAATVRSFCWNVQDDSLLTGGEDAQLLLWKPGAIEKTFTKKESMKIASSVHQRVRVHSNDSYKRRKKQ

SEQ ID NO: 35990 - protein, 530 aa, Homo sapiens
LMKDKAKHLDKCLKMLDMSFKDAERGDDTSCENLLDAFSIKLSETHGYGVQEEFTEENKLLEACIFKNNELLKNIQDVQSQISKIGLKDPTVPAVKHRKKSLIRLDKVLDEYEEEKRHLQEMANSLPHFKDGREKTVNQQCQNTVVLWENTKALVTECLEQCGRVLELLKQYQNFKSILTTLIQKEESVISLQASYMGKENLKKRIAEIEIVKEEFNEHLEVVDKINQVCKNLQFYLNKMKTFEEPPFEKEANIIVDRWLDINEKTEDYYENLGRALALWDKLFNLKNVIDEWTEKALQKMELHQLTEEDRERLKEELQVHEQKTSEFSRRVAEIQFLLQSSEIPLELQVMESSILNKMEHVQKCLTGESNCHALSGSTAELREDLDQAKTQIGMTESLLKALSPSDSLEIFTKLEEIQQQILQQKHSMILLENQIGCLTPELSELKKQYESVSDLFNTKKSVLQDHFSKLLNDQCKNFNDWFSNIKVNLKECFESSETKKSVEQKLQKLSVRDICVFLIKIFNTKILEA

SEQ ID NO: 35991 - protein, 522 aa, Homo sapiens
VFSQLLSQDMDIKNSPSSLNSPSSYNCSQSILPLEHGSIYIPSSYVDSHHEYPAMTFYSPAVMNYSIPSNVTNLEGGPGRQTTSPNVLWPTPGHLSPLVVHRQLSHLYAEPQKSPWCEARSLEHTLPVNRETLKRKVSGNRCASPVTGPGSKRDAHFCAVCSDYASGYHYGVWSCEGCKAFFKRSIQGHNDYICPATNQCTIDKNRRKSCQACRLRKCYEVGMVKCGSRRERCGYRLVRRQRSADEQLHCAGKAKRSGGHAPRVRELLLDALSPEQLVLTLLEAEPPHVLISRPSAPFTEASMMMSLTKLADKELVHMISWAKKIPGFVELSLFDQVRLLESCWMEVLMMGLMWRSIDHPGKLIFAPDLVLDRDEGKCVEGILEIFDMLLATTSRFRELKLQHKEYLCVKAMILLNSSMYPLVTATQDADSSRKLAHLLNAVTDALVWVIAKSGISSQQQSMRLANLLMLLSHVRHASSLSLSWRLFMLREASCHGVRQTPGGAHVSVSRSRSFEACQQPRE

SEQ ID NO: 35992 - protein, 504 aa, Homo sapiens
VFSQLLSQDMDIKNSPSSLNSPSSYNCSQSILPLEHGSIYIPSSYVDSHHEYPAMTFYSPAVMNYSIPSNVTNLEGGPGRQTTSPNVLWPTPGHLSPLVVHRQLSHLYAEPQKSPWCEARSLEHTLPVNRETLKRKVSGNRCASPVTGPGSKRDAHFCAVCSDYASGYHYGVWSCEGCKAFFKRSIQGHNDYICPATNQCTIDKNRRKSCQACRLRKCYEVGMVKCGSRRERCGYRLVRRQRSADEQLHCAGKAKRSGGHAPRVRELLLDALSPEQLVLTLLEAEPPHVLISRPSAPFTEASMMMSLTKLADKELVHMISWAKKIPGFVELSLFDQVRLLESCWMEVLMMGLMWRSIDHPGKLIFAPDLVLDRDEGKCVEGILEIFDMLLATTSRFRELKLQHKEYLCVKAMILLNSSMYPLVTATQDADSSRKLAHLLNAVTDALVWVIAKSGISSQQQSMRLANLLMLLSHVRHARAEKASQTLTSFGMKMETLLPEATMEQ

SEQ ID NO: 35993 - protein, 448 aa, Homo sapiens
VFSQLLSQDMDIKNSPSSLNSPSSYNCSQSILPLEHGSIYIPSSYVDSHHEYPAMTFYSPAVMNYSIPSNVTNLEGGPGRQTTSPNVLWPTPGHLSPLVVHRQLSHLYAEPQKSPWCEARSLEHTLPVNRETLKRKVSGNRCASPVTGPGSKRDAHFCAVCSDYASGYHYGVWSCEGCKAFFKRSIQGHNDYICPATNQCTIDKNRRKSCQACRLRKCYEVGMVKCGSRRERCGYRLVRRQRSADEQLHCAGKAKRSGGHAPRVRELLLDALSPEQLVLTLLEAEPPHVLISRPSAPFTEASMMMSLTKLADKELVHMISWAKKIPGMYPLVTATQDADSSRKLAHLLNAVTDALVWVIAKSGISSQQQSMRLANLLMLLSHVRHASNKGMEHLLNMKCKNVVPVYDLLLEMLNAHVLRGCKSSITGSECSPAEDSKSKEGSQNPQSQ

SEQ ID NO: 35994 - protein, 539 aa, Homo sapiens
VFSQLLSQDMDIKNSPSSLNSPSSYNCSQSILPLEHGSIYIPSSYVDSHHEYPAMTFYSPAVMNYSIPSNVTNLEGGPGRQTTSPNVLWPTPGHLSPLVVHRQLSHLYAEPQKSPWCEARSLEHTLPVNRETLKRKVSGNRCASPVTGPGSKRDAHFCAVCSDYASGYHYGVWSCEGCKAFFKRSIQGHNDYICPATNQCTIDKNRRKSCQACRLRKCYEVGMVKCGSRRERCGYRLVRRQRSADEQLHCAGKAKRSGGHAPRVRELLLDALSPEQLVLTLLEAEPPHVLISRPSAPFTEASMMMSLTKLADKELVHMISWAKKIPGFVELSLFDQVRLLESCWMEVLMMGLMWRSIDHPGKLIFAPDLVLDRDEGKCVEGILEIFDMLLATTSRFRELKLQHKEYLCVKAMILLNSSMYPLVTATQDADSSRKLAHLLNAVTDALVWVIAKSGISSQQQSMRLANLLMLLSHVRHASNKGMEHLLNMKCKNVVPVYDLLLEMLNAHVLRGCKSSITGSECSPAEDSKSKEGSQNPQSQ

SEQ ID NO: 35995 - protein, 332 aa, Homo sapiens
VFSQLLSQDMDIKNSPSSLNSPSSYNCSQSILPLEHGSIYIPSSYVDSHHEYPAMTFYSPAVMNYSIPSNVTNLEGGPGRQTTSPNVLWPTPGHLSPLVVHRQLSHLYAEPQKSPWCEARSLEHTLPVNRETLKRKVSGNRCASPVTGPGSKRDAHFCAVCSDYASGYHYGVWSCEGCKAFFKRSIQGHNDYICPATNQCTIDKNRRKSCQACRLRKCYEVGMVKCGSRRERCGYRLVRRQRSADEQLHCAGKAKRSGGHAPRVRELLLDALSPEQLVLTLLEAEPPHVLISRPSAPFTEASMMMSLTKLADKELVHMISWAKKIPGMRGNA

SEQ ID NO: 35996 - protein, 959 aa, Homo sapiens
LLGCGGSGTSILVVSIVGSGLIKAMAPAEILNGKEISAQIRARLKNQVTQLKEQVPGFTPRLAILQVGNRDDSNLYINVKLKAAEEIGIKATHIKLPRTTTESEVMKYITSLNEDSTVHGFLVQLPLDSENSINTEEVINAIAPEKDVDGLTSINAGKLARGDLNDCFIPCTPKGCLELIKETGVPIAGRHAVVVGRSKIVGAPMHDLLLWNNATVTTCHSKTAHLDEEVNKGDILVVATGQPEMVKGEWIKPGAIVIDCGINYVPDDKKPNGRKVVGDVAYDEAKERASFITPVPGGVGPMTVAMLMQSTVESAKRFLEKFKPGKWMIQYNNLNLKTPVPSDIDISRSCKPKPIGKLAREIGLLSEEVELYGETKAKVLLSALERLKHRPDGKYVVVTGITPTPLGEGKSTTTIGLVQALGAHLYQNVFACVRQPSQGPTFGIKGGAAGGGYSQVIPMEEFNLHLTGDIHAITAANNLVAAAIDARIFHELTQTDKALFNRLVPSVNGVRRFSDIQIRRLKRLGIEKTDPTTLTDEEINRFARLDIDPETITWQRVLDTNDRFLRKITIGQAPTEKGHTRTAQFDISVASEIMAVLALTTSLEDMRERLGKMVVASSKKGEPVSAEDLGVSGALTVLMKDAIKPNLMQTLEGTPVFVHAGPFANIAHGNSSIIADRIALKLVGPEGFVVTEAGFGADIGMEKFFNIKCRYSGLCPHVVVLVATVRALKMHGGGPTVTAGLPLPKAYIQENLELVEKGFSNLKKQIENARMFGIPVVVAVNAFKTDTESELDLISRLSREHGAFDAVKCTHWAEGGKGALALAQAVQRAAQAPSSFQLLYDLKLPVEDKIRIIAQKIYGADDIELLPEAQHKAEVYTKQGFGNLPICMAKTHLSLSHNPEQKGVPTGFILPIRDIRASVGAGFLYPLVGTMSTMPGLPTRPCFYDIDLDPETEQVNGLF

SEQ ID NO: 35997 - protein, 44 aa, Homo sapiens
LLTSSVCMRLGLIASFISTVSAPLTPYKTNVCSINSHQQKNPTF

SEQ ID NO: 35998 - protein, 60 aa, Homo sapiens
MCGDCVEKEYPNRGNTCLENGSFLLNFTGCAVCSKRDFMLITNKSLKEEDGEEIVTYDRK

SEQ ID NO: 35999 - protein, 39 aa, Homo sapiens
VCVWGGLGLLLSVTSPSPSPLPLPAAAAVAAPWAVGNER

SEQ ID NO: 36000 - protein, 57 aa, Homo sapiens
LGCSGAALRSTALHRGRREFSESERHVERMKYRTIKLPTHITRRISLKDSLQDYQRE

SEQ ID NO: 36001 - protein, 37 aa, Homo sapiens
LVSRKHVERMKYRTIKLPTHITRRISLKDSLQDYQRE

SEQ ID NO: 36002 - protein, 319 aa, Homo sapiens
MSSEAETQQPPAAPALSAADTKPGTTGSGAGSGGPGGLTSAAPAGGHKKVIATKVLGTVKWFNVRNGYGFIHRNDTKEDVFVHHTAMKKNNPRKYLRSVGDGETVEFDVVEGEKGAKAANVTGPGGVPVQGSKYAADRNHYRRYPRPRGPPRNYQQNYQNSESGEKNEGSESAPEGQAQQRRPYRRRRFPPYYMRRPYGRRPQYSNPPVQGEVMEGADNQGAGEQGRPVRQNMYRGYRPRFRRGPPLQRQPREDGNEEDKENQGDETQGQQPPQRRYRRNFNYRRRRPENPKPQDGKETKAANPPAENSSAPEAEQGGA

SEQ ID NO: 36003 - protein, 30 aa, Homo sapiens
VENKKALSFVKNRRRETKRTVEKAFPVCIM

SEQ ID NO: 36004 - protein, 42 aa, Homo sapiens
VENKKALSFVKNRRRETKRTVEKAFPVCIIFPSWILFHSIIM

SEQ ID NO: 36005 - protein, 40 aa, Homo sapiens
VENKKALSFVKNRRRETKRTVEKAFPVCIIGTSEAPRDGC

SEQ ID NO: 36006 - protein, 43 aa, Homo sapiens
LTQLLNKKALSFVKNRRRETKRTVEKAFPVCIIGTSEAPRDGC

SEQ ID NO: 36007 - protein, 296 aa, Homo sapiens
VSLLPLSNKRGQVTQPADSRRGRHCGGQFWSYCSLGCPAGDPSRKVIVRMSGKDRIEIFPSRMAQTIMKARLKGAQTGRNLLKKKSDALTLRFRQILKKIIETKMLMGEVMREAAFSLAEAKFTAGDFSTTVIQNVNKAQVKIRAKKDNVAGVTLPVFEHYHEGTDSYELTGLARGGEQLAKLKRNYAKAVELLVELASLQTSFVTLDEAIKITNRRVNAIEHVIIPRIERTLAYIITELDEREREEFYRLKKIQEKKKILKEKSEKDLEQRRAAGEVLEPANLLAEEKDEDLLFE

SEQ ID NO: 36008 - protein, 34 aa, Homo sapiens
LLIKGRSKHLYLAGMLAIACARLLYKLESNKNVL

SEQ ID NO: 36009 - protein, 76 aa, Homo sapiens [sequence omitted]

SEQ ID NO: 36010 - protein, 20 aa, Homo sapiens
MSVMSRFTLLLLLPELLEIS

SEQ ID NO: 36011 - protein, 101 aa, Homo sapiens
LWTKCSGVTTYSVHPGTVQSELVRHSSFMRWMWWLFSFFIKTPQQGAQTSLHCALTEGLEILSGNHFSDCHVAWVSAQARNETIARRLWDVSCDLLGLPID

SEQ ID NO: 36012 - protein, 231 aa, Homo sapiens
MVELMFPLLLLLLPFLLYMAAPQIRKMLSSGVCTSTVQLPGKVVVVTGANTGIGKETAKELAQRGARVYLACRDVEKGELVAKEIQTTTGNQQVLVRKLDLSDTKSIRAFAKGFLAEEKHLHVLINNAGVMMCPYSKTADGFEMHIGVNHLGSGVTTYSVHPGTVQSELVRHSSFMRWMWWLFSFFIKTPQQGAQTSLHCALTEGLEILSGNHFRYECYLFLQMRFIAQRR

SEQ ID NO: 36013 - protein, 28 aa, Homo sapiens
MAALRALLLWAPGAGGTPRMRTLRMCSA

SEQ ID NO: 36014 - protein, 141 aa, Homo sapiens
LTVFVCAIFFTHRLVEIAESRFPRYFNTEEKLLLTSSKVHLYRELTCDEVLQRIESLEEEIISKGIKLVILDSVASVVRKEFDAQLQGNLKERNKFLAREASSLKYLAEEFSIPVSFSFFLFFLFLSFVSFILHSLTYGIK

SEQ ID NO: 36015 - protein, 47 aa, Homo sapiens
MHNRQVPYFVSRCLFFSGLSLKCQITREKAVTVYRSNLVPCNLTLSL

SEQ ID NO: 36016 - protein, 148 aa, Homo sapiens
MVMASDFYLRYYVGHKGKFGHEFLESEFQLDGKLRYANSSNYKNDVMIRKEAYVHKSLMEELKRIIDDNEITKEDDGLWPPPDRAGRQELEIVIGDEHISFTTSKIGSLIDVNQSKDPEGLRVFYYLVQDLNCLVFSLIGLHFKINPI

SEQ ID NO: 36017 - protein, 162 aa, Homo sapiens
LVSIGAEEIVDGNVKMTLGMIWTIILRFAIQDISVEETSAKEGLLLWCQRKTAPYKNVNIQNFHISWKDGLGFCALIHRHRPELIDYGKLRKDDPLTNLNTAFDVAEKYLDIPKMLDAEDIVGTARPDEKAIMTYVSSFYHAFSGAQKMCRHAKAGWEGRVT

SEQ ID NO: 36018 - protein, 13 aa, Homo sapiens
MLVPVLQLFISTL

SEQ ID NO: 36019 - protein, 47 aa, Homo sapiens
LAKASFSSALPSCLKVWLVYLAGWSLELRQGLNHLTSKFAFPSGPHY

SEQ ID NO: 36020 - protein, 86 aa, Homo sapiens [sequence omitted]

SEQ ID NO: 36021 - protein, 56 aa, Homo sapiens
LRARASGGVEAVSAPIPEVSAGSRVNQLPADFRILLDFKFFLFKKTWTDKRCAMAG

SEQ ID NO: 36022 - protein, 144 aa, Homo sapiens
MRQAGEVTFADAHRPKLNEGVVEFASYGDLKNAIEKLSGKEINGRKIKLIEGSKRHRSRSRSRSRTRSSSRSRSRSRSRSRKSYSRSRSRSRSRSRSKSRSVSRSPVPEKSQKRGSSSRSKSPASVDRQRSRSRSRSRSVDSGN

SEQ ID NO: 36023 - protein, 482 aa, Homo sapiens
LRAPAAGPRPAPRRREGPERRKEGRRAVRPAEPANPARCRLPSLAGTMLPARCARLLTPHLLLVLVQLSPARGHRTTGPRFLISDRDPQCNLHCSRTQPKPICASDGRSYESMCEYQRAKCRDPTLGVVHRGRCKDAGQSKCRLERAQALEQAKKPQEAVFVPECGEDGSFTQVQCHTYTGYCWCVTPDGKPISGSSVQNKTPVCSGSVTDKPLSQGNSGRKDDGSKPTPTMETQPVFDGDEITAPTLWIKHLVIKDSKLNNTNIRNSEKVYSCDQERQSALEEAQQNPREGIVIPECAPGGLYKPVQCHQSTGYCWCVLVDTGRPLPGTSTRYVMPSCESDARAKTTEADDPFKDRELPGCPEGKKMEFITSLLDALTTDMVQAINSAAPTGGGRFSEPDPSHTLEERVVHWYFSQLDSNSSNDINKREMKPFKRYVKKKAKPKKCARRFTDYCDLNKDKVISLPELKGCLGVSKEVGRLV

SEQ ID NO: 36024 - protein, 481 aa, Homo sapiens
LRAPAAGPRPAPRRREGPERRKEGRRAVRPAEPANPARCRLPSLAGTMLPARCARLLTPHLLLVLVQLSPARGHRTTGPRFLISDRDPQCNLHCSRTQPKPICASDGRSYESMCEYQRAKCRDPTLGVVHRGRCKDAGQSKCRLERAQALEQAKKPQEAVFVPECGEDGSFTQVQCHTYTGYCWCVTPDGKPISGSSVQNKTPVCSGSVTDKPLSQGNSGRKDDGSKPTPTMETQPVFDGDEITAPTLWIKHLVIKDSKLNNTNIRNSEKVYSCDQERQSALEEAQQNPREGIVIPECAPGGLYKPVQCHQSTGYCWCVLVDTGRPLPGTSTRYVMPSCESDARAKTTEADDPFKDRELPGCPEGKKMEFITSLLDALTTDMVQAINSAAPTGGGRFSEPDPSHTLEERVVHWYFSQLDSNSSNDINKREMKPFKRYVKKKAKPKKCARRFTDYCDLNKDKVISLPELKGCLGVSKEGRLV

SEQ ID NO: 36025 - protein, 44 aa, Homo sapiens
MMTMQASSLLNVILFMSVRVLVLWRSRFCGHQVPGVQSSSPLGQ

SEQ ID NO: 36026 - protein, 165 aa, Homo sapiens
LRRRMNNRRRRLLRAAAAPHPMDRPLHGALQSASRLPSERRRCRPAGGGWSRGRGRGGGGGGGGGGGGGGPRGAGLRRAAALLDGRVRVRGGGRGRADPAAGRRGGGAVQGLAGVRRRGLVDRAAEPAGGHLPQQLRDPAQRLLQPLPARRRGPQLLPAHSVVRN

SEQ ID NO: 36027 - protein, 803 aa, Homo sapiens
VTIIWWVCFLTSVSMSAQTSPAEKGLNPGLMCQESYACSGTDEAIFECDECCSLQCLRCEEELHRQERLRNHERIRLKPGHVPYCDLCKGLSGHLPGVRQRAIVRCQTCKINLCLECQKRTHSGGNKRRHPVTVYNVSNLQESLEAEEMDEETKRKKMTEKVVSFLLVDENEEIQVTNEEDFIRKLDCKPDQHLKVVSIFGNTGDGKSHTLNHTFFYGREVFKTSPTQESCTVGVWAAYDPVHKVAVIDTEGLLGATVNLSQRTRLLLKVLAISDLVIYRTHADRLHNDLFKFLGDASEAYLKHFTKELKATTARCGLDVPLSTLGPAVIIFHETVHTQLLGSDHPSEVPEKLIQDRFRKLGRFPEAFSSIHYKGTRTYNPPTDFSGLRRALEQLLENNTTRSPRHPGVIFKALKALSDRFSGEIPDDQMAHSSFFPDEYFTCSSLCLSCGVGCKKSMNHGKEGVPHEAKSRCRYSHQYDNRVYTCKACYERGEEVSVVPKTSASTDSPWMGLAKYAWSGYVIECPNCGVVYRSRQYWFGNQDPVDTVVRTEIVHVWPGTDGFLKDNNNAAQRLLDGMNFMAQSVSELSLGPTKAVTSWLTDQIAPAYWRPNSQILSCNKCATSFKDNDTKHHCRACGEGFCDSCSSKTRPVPERGWGPAPVRVCDNCYEARNVQLAVTEAQVDDEGGTLIARKVGEAVQNTLGAVVTAIDIPLGLVKDAARPAYWVPDHEILHCHNCRKEFSIKLSKHHCRACGQGFCDECSHDRRAVPSRGWDHPVRVCFNCNKKPAWTSLSVMTGKGPLC

SEQ ID NO: 36028 - protein, 777 aa, Homo sapiens
VTIIWWVCFLTSVSMSAQTSPAEKGLNPGLMCQESYACSGTDEAIFECDECCSLQCLRCEEELHRQERLRNHERIRLKPGHVPYCDLCKGLSGHLPGVRQRAIVRCQTCKINLCLECQKRTHSGGNKRRHPVTVYNVSNLQESLEAEEMDEETKRKKMTEKVVSFLLVDENEEIQVTNEEDFIRKLDCKPDQHLKVVSIFGNTGDGKSHTLNHTFFYGREVFKTSPTQESCTVGVWAAYDPVHKVAVIDTEGLLGATVNLSQRTRLLLKVLAISDLVIYRTHADRLHNDLFKFLGDASEAYLKHFTKELKATTARCGLDVPLSTLGPAVIIFHETVHTQLLGSDHPSEVPEKLIQDRFRKLGRFPEAFSSIHYKGTRTYNPPTDFSGLRRALEQLLENNTTRSPRHPGVIFKALKALSDRFSGEIPDDQMAHSSFFPDEYFTCSSLCLSCGVGCKKSMNHGKEGVPHEAKSRCRYSHQYDNRVYTCKACYERGEEVSVVPKTSASTDSPWMGLAKYAWSGRQYWFGNQDPVDTVVRTEIVHVWPGTDGFLKDNNNAAQRLLDGMNFMAQSVSELSLGPTKAVTSWLTDQIAPAYWRPNSQILSCNKCATSFKDNDTKHHCRACGEGFCDSCSSKTRPVPERGWGPAPVRVCDNCYEARNVQLAVTEAQVDDEGGTLIARKVGEAVQNTLGAVVTAIDIPLGLVKDAARPAYWVPDHEILHCHNCRKEFSIKLSKHHCRACGQGFCDECSHDRRAVPSRGWDHPVRVCFNCNKKPGDL

SEQ ID NO: 36029 - protein, 791 aa, Homo sapiens
VTIIWWVCFLTSVSMSAQTSPAEKGLNPGLMCQESYACSGTDEAIFECDECCSLQCLRCEEELHRQERLRNHERIRLKPGHVPYCDLCKGLSGHLPGVRQRAIVRCQTCKINLCLECQKRTHSGGNKRRHPVTVYNVSNLQESLEAEEMDEETKRKKMTEKVVSFLLVDENEEIQVTNEEDFIRKLDCKPDQHLKVVSIFGNTGDGKSHTLNHTFFYGREVFKTSPTQESCTVGVWAAYDPVHKVAVIDTEGLLGATVNLSQRTRLLLKVLAISDLVIYRTHADRLHNDLFKFLGDASEAYLKHFTKELKATTARCGLDVPLSTLGPAVIIFHETVHTQLLGSDHPSEVPEKLIQDRFRKLGRFPEAFSSIHYKGTRTYNPPTDFSGLRRALEQLLENNTTRSPRHPGVIFKALKALSDRFSGEIPDDQMAHSSFFPDEYFTCSSLCLSCGVGCKKSMNHGKEGVPHEAKSRCRYSHQYDNRVYTCKACYERGEEVSVVPKTSASTDSPWMGLAKYAWSGYVIECPNCGVVYRSRQYWFGNQDPVDTVVRTEIVHVWPGTDGFLKDNNNAAQRLLDGMNFMAQSVSELSLGPTKAVTSWLTDQIAPAYWRPNSQILSCNKCATSFKDNDTKHHCRACGEGFCDSCSSKTRPVPERGWGPAPVRVCDNCYEARNVQLAVTEAQVDDEGGTLIARKVGEAVQNTLGAVVTAIDIPLGLVKDAARPAYWVPDHEILHCHNCRKEFSIKLSKHHCRACGQGFCDECSHDRRAVPSRGWDHPVRVCFNCNKKPGDL

SEQ ID NO: 36030 - protein, 38 aa, Homo sapiens
MKERTSRGFVFCETVFLYSCSNDRVTCTVVLLPECTDV

SEQ ID NO: 36031 - protein, 34 aa, Homo sapiens
VLVIQVAEQRAENQVSVGDYGWDVANFRWCSFGE

SEQ ID NO: 36032 - protein, 1264 aa, Homo sapiens
LAAASRRQRRQAEMRLLLLVPLLLAPAPGSSAPKVRRQSDTWGPWSQWSPCSRTCGGGVSFRERPCYSQRRDGGSSCVGPARSHRSCRTESCPDGARDFRAEQCAEFDGAEFQGRRYRWLPYYSAPNKCELNCIPKGENFYYKHREAVVDGTPCEPGKRDVCVDGSCRVVGCDHELDSSKQEDKCLRCGGDGTTCYPVAGTFDANDLSRAVKNVRGEYYLNGHWTIEAARALPAASTILHYERGAEGDLAPERLHARGPTSEPLVIELISQEPNPGVHYEYHLPLRRPSPGFSWSHGSWSDCSAECGGGHQSRLVFCTIDHEAYPDHMCQRQPRPADRRSCNLHPCPETKRWKAGPWAPCSASCGGGSQSRSVYCISSDGAGIQEAVEEAECAGLPGKPPAIQACNLQRCAAWSPEPWGECSVSCGVGVRKRSVTCRGERGSLLHTAACSLEDRPPLTEPCVHEDCPLLSDQAWHVGTWGLCSKSCSSGTRRRQVICAIGPPSHCGSLQHSKPVDVEPCNTQPCHLPQEVPSMQDVHTPASNPWMPLGPQESPASDSRGQWWAAQEHPSARGDHRGERGDPRGDQGTHLSALGPAPSLQQPPYQQPLRSGSGPHDCRHSPHGCCPDGHTASLGPQWQGCPGAPCQQSRYGCCPDRVSVAEGPHHAGCTKSYGGDSTGGMPRSRAVASTVHNTHQPQAQQNEPSECRGSQFGCCYDNVATAAGPLGEGCVGQPSHAYPVRCLLPSAHGSCADWAARWYFVASVGQCNRFWYGGCHGNANNFASEQECMSSCQGSLHGPRRPQPGASGRSTHTDGGGSSPAGEQEPSQHRTGAAVQRKPWPSGGLWRQDQQPGPGEAPHTQAFGEWPWGQELGSRAPGLGGDAGSPAPPFHSSSYRISLAGVEPSLVQAALGQLVRLSCSDDTAPESQAAWQKDGQPISSDRHRLQFDGSLIIHPLQAEDAGTYSCGSTRPGRDSQKIQLRIIGGDMAVLSEAELSRFPQPRDPAQDFGQAGAAGPLGAIPSSHPQPANRLRLDQNQPRVVDASPGQRIRMTCRAEGFPPPAIEWQRDGQPVSSPRHQLQPDGSLVISRVAVEDGGFYTCVAFNGQDRDQRWVQLRVLGELTISGLPPTVTVPEGDTARLLCVVAGESVNIRWSRNGLPVQADGHRVHQSPDGTLLIYNLRARDEGSYTCSAYQGSQAVSRSTEVKVVSPAPTAQPRDPGRDCVDQPELANCDLILQAQLCGNEYYSSFCCASCSRFQPHAQPIWQ

SEQ ID NO: 36033 - protein, 1330 aa, Homo sapiens
LRCTEAHPAVLLRVSWSPVGHRERRAHTLSPAPRTAAGAPGRSNPMRLPQAEMRLLLLVPLLLAPAPGSSAPKVRRQSDTWGPWSQWSPCSRTCGGGVSFRERPCYSQRRDGGSSCVGPARSHRSCRTESCPDGARDFRAEQCAEFDGAEFQGRRYRWLPYYSAPNKCELNCIPKGENFYYKHREAVVDGTPCEPGKRDVCVDGSCRVVGCDHELDSSKQEDKCLRCGGDGTTCYPVAGTFDANDLSRGYNQILIVPMGATSILIDEAAASRNFLAVKNVRGEYYLNGHWTIEAARALPAASTILHYERGAEGDLAPERLHARGPTSEPLVIELISQEPNPGVHYEYHLPLRRPSPGFSWSHGSWSDCSAECGGGHQSRLVFCTIDHEAYPDHMCQRQPRPADRRSCNLHPCPETKRWKAGPWAPCSASCGGGSQSRSVYCISSDGAGIQEAVEEAECAGLPGKPPAIQACNLQRCAAWSPEPWGECSVSCGVGVRKRSVTCRGERGSLLHTAACSLEDRPPLTEPCVHEDCPLLSDQAWHVGTWGLCSKSCSSGTRRRQVICAIGPPSHCGSLQHSKPVDVEPCNTQPCHLPQEVPSMQDVHTPASNPWMPLGPQESPASDSRGQWWAAQEHPSARGDHRGERGDPRGDQGTHLSALGPAPSLQQPPYQQPLRSGSGPHDCRHSPHGCCPDGHTASLGPQWQGCPGAPCQQSRYGCCPDRVSVAEGPHHAGCTKSYGGDSTGGMPRSRAVASTVHNTHQPQAQQNEPSECRGSQFGCCYDNVATAAGPLGEGCVGQPSHAYPVRCLLPSAHGSCADWAARWYFVASVGQCNRFWYGGCHGNANNFASEQECMSSCQGSLHGPRRPQPGASGRSTHTDGGGSSPAGEQEPSQHRTGAAVQRKPWPSGGLWRQDQQPGPGEAPHTQAFGEWPWGQELGSRAPGLGGDAGSPAPPFHSSSYRISLAGVEPSLVQAALGQLVRLSCSDDTAPESQAAWQKDGQPISSDRHRLQFDGSLIIHPLQAEDAGTYSCGSTRPGRDSQKIQLRIIGGDMAVLSEAELSRFPQPRDPAQDFGQAGAAGPLGAIPSSHPQPANRLRLDQNQPRVVDASPGQRIRMTCRAEGFPPPAIEWQRDGQPVSSPRHQLQPDGSLVISRVAVEDGGFYTCVAFNGQDRDQRWVQLRVLGELTISGLPPTVTVPEGDTARLLCVVAGESVNIRWSRNGLPVQADGHRVHQSPDGTLLIYNLRARDEGSYTCSAYQGSQAVSRSTEVKVVSPAPTAQPRDPGRDCVDQPELANCDLILQAQLCGNEYYSSFCCASCSRFQPHAQPIWQ

SEQ ID NO: 36034 - protein, 1304 aa, Homo sapiens
LLRVSWSPVGHRERRAHTLSPAPRTAAGAPGRSNPMRLPQAEMRLLLLVPLLLAPAPGSSAPKVRRQSDTWGPWSQWSPCSRTCGGGVSFRERPCYSQRRDGGSSCVGPARSHRSCRTESCPDGARDFRAEQCAEFDGAEFQGRRYRWLPYYSAPNKCELNCIPKGENFYYKHREAVVDGTPCEPGKRDVCVDGSCRVVGCDHELDSSKQEDKCLRCGGDGTTCYPVAGTFDANDLSRGYNQILIVPMGATSILIDEAAASRNFLAVKNVRGEYYLNGHWTIEAARALPAASTILHYERGAEGDLAPERLHARGPTSEPLVIELISQEPNPGVHYEYHLPLRRPSPGFSWSHGSWSDCSAECGGGHQSRLVFCTIDHEAYPDHMCQRQPRPADRRSCNLHPCPETKRWKAGPWAPCSASCGGGSQSRSVYCISSDGAGIQEAVEEAECAGLPGKPPAIQACNLQRCAAWSPEPWGECSVSCGVGVRKRSVTCRGERGSLLHTAACSLEDRPPLTEPCVHEDCPLLSDQAWHVGTWGLCSKSCSSGTRRRQVICAIGPPSHCGSLQHSKPVDVEPCNTQPCHLPQEVPSMQDVHTPASNPWMPLGPQESPASDSRGQWWAAQEHPSARGDHRGERGDPRGDQGTHLSALGPAPSLQQPPYQQPLRSGSGPHDCRHSPHGCCPDGHTASLGPQWQGCPGAPCQQSRYGCCPDRVSVAEGPHHAGCTKSYGGDSTGGMPRSRAVASTVHNTHQPQAQQNEPSECRGSQFGCCYDNVATAAGPLGEGCVGQPSHDWAARWYFVASVGQCNRFWYGGCHGNANNFASEQECMSSCQGSLHGPRRPQPGASGRSTHTDGGGSSPAGEQEPSQHRTGAAVQRKPWPSGGLWRQDQQPGPGEAPHTQAFGEWPWGQELGSRAPGLGGDAGSPAPPFHSSSYRISLAGVEPSLVQAALGQLVRLSCSDDTAPESQAAWQKDGQPISSDRHRLQFDGSLIIHPLQAEDAGTYSCGSTRPGRDSQKIQLRIIGGDMAVLSEAELSRFPQPRDPAQDFGQAGAAGPLGAIPSSHPQPANRLRLDQNQPRVVDASPGQRIRMTCRAEGFPPPAIEWQRDGQPVSSPRHQLQPDGSLVISRVAVEDGGFYTCVAFNGQDRDQRWVQLRVLGELTISGLPPTVTVPEGDTARLLCVVAGESVNIRWSRNGLPVQADGHRVHQSPDGTLLIYNLRARDEGSYTCSAYQGSQAVSRSTEVKVVSPAPTAQPRDPGRDCVDQPELANCDLILQAQLCGNEYYSSFCCASCSRFQPHAQPIWQ

SEQ ID NO: 36035 - protein, 65 aa, Homo sapiens
VPVQPLLQFKILIYIHRLEYWWASNPQTPHLGQMRKLRLGEVTKLVQNHTTCKGHSQDSEPGCKN

SEQ ID NO: 36036 - protein, 32 aa, Homo sapiens
MASPLSKAGLILCFLWHLVTMAVQEPLLPKVP

SEQ ID NO: 36037 - protein, 78 aa, Homo sapiens
VATSSLGGRPRQVLSLCCLLAALLGLESFLSVGGGASVLVQSTHPAAGKGAVRRLEAAGLGPRELLTSLALPASHLFG

SEQ ID NO: 36038 - protein, 62 aa, Homo sapiens
LEAESMLSDELESKPELLVQFVQNTSIPLGQGLVESEAKDITCLSLLPVTEASECSRLMLPE

SEQ ID NO: 36039 - protein, 101 aa, Homo sapiens
LEAESMLSDELESKPELLVQFVQNTSIPLGQGLVESEAKDITCLSLLPVTEASECSRLMLPGGPFLSCFEKPSGECGSRRRGDESSDCTEIPGVFVHFRVF

SEQ ID NO: 36040 - protein, 349 aa, Homo sapiens
LEAESMLSDELESKPELLVQFVQNTSIPLGQGLVESEAKDITCLSLLPVTEASECSRLMLPDDTTNHSNSSKEVPSSAVLRSLRVNVGPDGEETRAQTVQKSPEFLSTSESSSLLQDLQPSDSTSFILLNLTRAGLGSSAEHLVFVQDEAEDSGNDFLSSESTDSSIPWFLRVQELAHDSLIAATRAQLAKNAKTSSNGENVHLGSGDGQSKDSGPLPQVEKKLKCTVEGCDRTFVWPAHFKYHLKTHRNDRSFICPAEGCGKSFYVLQRLKVHMRTHNGEKPFMCHESGCGKQFTTAGNLKNHRRIHTGEKPFLCEAQGCGRSFAEYSSLRKHLVVHSGIRTSAIHRF

SEQ ID NO: 36041 - protein, 456 aa, Homo sapiens
VRRRRSAPWRPGLSADAGLCVQLPTAARWCPGAGGPAPQQTPCMTWWCRVEAWWALPWPVPWDMIFTFMTRKSCCSKQVQRKYWRNCQKLTATGSAPFPLALQRFSVVWDACSEALIMFDKDNLDDMGYIVENDVIMHALTKQLEAVSDRVTVLYRSKAIRYTWPCPFPMADSSPWVHITLGDGSTFQTKLLIGADGHNSGVRQAVGIQNVSWNYDQSAVVATLHLSEATENNVAWQRFLPSGPIALLPLSDTLSSLVWSTSHEHAAELVSMDEEKFVDAVNSAFWSDADHTDFIDTAGAMLQYAVSLLKPTKVSARQLPPSVARVDAKSRVLFPLGLGHAAEYVRPRVALIGDAAHRVHPLAGQGVNMGFGDISSLAHHLSTAAFNGKDLGSVSHLTGYETERQRHNTALLAATDLLKRLYSTSASPLVLLRTWGLQATNAVSPLKEQIMAFASK

SEQ ID NO: 36042 - protein, 166 aa, Homo sapiens
MAARLVSRCGAVRAAPHSGPLVSWRRWSGASTDTVYDVVVSGGGLVGAAMACALGYDIHFHDKKILLLEAGPKKVLEKLSETYSNRVSSISPGSATLLSSFGAWDHICNMRYRAFRRMQVWDACSEALIMFDKDNLDDMGYIVENDVIMHALTKQLEAVSEAAKLF

SEQ ID NO: 36043 - protein, 119 aa, Homo sapiens
LPKDNFSGYDIHFHDKKILLLEAGPKKVLEKLSETYSNRVSSISPGSATLLSSFGAWDHICNMRYRAFRRMQVWDACSEALIMFDKDNLDDMGYIVENDVIMHALTKQLEAVSEAAKLF

SEQ ID NO: 36044 - protein, 187 aa, Homo sapiens
LLLTFHLVCLVADAAQWSDADHTDFIDTAGAMLQYAVSLLKPTKVSARQLPPSVARVDAKSRVLFPLGLGHAAEYVRPRVALIGDAAHRVHPLAGQGVNMGFGDISSLAHHLSTAAFNGKDLGSVSHLTGYETERQRHNTALLAATDLLKRLYSTSASPLVLLRTWGLQATNAVSPLKEQIMAFASK

SEQ ID NO: 36045 - protein, 151 aa, Homo sapiens
MGWKMASPTDGTDLEASLLSFEKLDRASPDLWPEQLPGVAEFAASFKSPITSSPPKWMAEIERDDIDMLKELGSLTTANLMEKVRGLQNLAYQLGLDEWSPSVTQAGVQWCDLGSLQPLPPGLKQVPHLSFPSSWDYRCEPQRPARNAFLI

SEQ ID NO: 36046 - protein, 56 aa, Homo sapiens
LSILTSQEALAFCRRLLCCAGSADDERILRFLELAGLVSGERDPQDPSPPGSTSYR

SEQ ID NO: 36047 - protein, 182 aa, Homo sapiens
LGSSPGPPRQVCLVTAGGRCFFPELGTSLSAMRFLAATFLLLALSTAAQAEPVQFKDCGSVDGVIKEVNVSPCPTQPCQLSKGQSYSVNVTFTSNIQSKSSKAVVHGILMGVPVPFPIPEPDGCKSGINCPIQKDKTYSYLNKLPVKSEYPSIKLVVEWQLQDDKNQSLFCWEIPVQIVSHL

SEQ ID NO: 36048 - protein, 1812 aa, Homo sapiens
LAAGRGRENSPRASSVPTTKLFAVPARTTLQPPRAMRPRTKARSPGRALRNPWRGFLPLTLALFVGAGHAQRDPVGRYEPAGGDANRLRRPGGSYPAAAAAKVYSLFREQDAPVAGLQPVERAQPGWGSPRRPTEAEARRPSRAQQSRRVQPPAQTRRSTPLGQQQPAPRTRAAPALPRLGTPQRSGAAPPTPPRGRLTGRNVCGGQCCPGWTTANSTNHCIKPVCEPPCQNRGSCSRPQLCVCRSGFRGARCEEVIPDEEFDPQNSRLAPRRWAERSPNLRRSSAAGEGTLARAQPPAPQSPPAPQSPPAGTLSGLSQTHPSQQHVGLSRTVRLHPTATASSQLSSNALPPGPGLEQRDGTQQAVPLEHPSSPWGLNLTEKIKKIKIVFTPTICKQTCARGHCANSCERGDTTTLYSQGGHGHDPKSGFRIYFCQIPCLNGGRCIGRDECWCPANSTGKFCHLPIPQPDREPPGRGSRPRALLEAPLKQSTFTLPLSNQLASVNPSLVKVHIHHPPEASVQIHQVAQVRGGVEEALVENSVETRPPPWLPASPGHSLWDSNNIPARSGEPPRPLPPAAPRPRGLLGRCYLNTVNGQCANPLLELTTQEDCCGSVGAFWGVTLCAPCPPRPASPVIENGQLECPQGYKRLNLTHCQDINECLTLGLCKDAECVNTRGSYLCTCRPGLMLDPSRSRCVSDKAISMLQGLCYRSLGPGTCTLPLAQRITKQICCCSRVGKAWGSECEKCPLPGTEAFREICPAGHGYTYASSDIRLSMRKAEEEELARPPREQGQRSSGALPGPAERQPLRVVTDTWLEAGTIPDKGDSQAGQVTTSVTHAPAWVTGNATTPPMPEQGIAEIQEEQVTPSTDVLVTLSTPGIDRCAAGATNVCGPGTCVNLPDGYRCVCSPGYQLHPSQAYCTDDNECLRDPCKGKGRCINRVGSYSCFCYPGYTLATSGATQECQDINECEQPGVCSGGQCTNTEGSYHCECDQGYIMVRKGHCQDINECRHPGTCPDGRCVNSPGSYTCLACEEGYRGQSGSCVDVNECLTPGVCAHGKCTNLEGSFRCSCEQGYEVTSDEKGCQDVDECASRASCPTGLCLNTEGSFACSACENGYWVNEDGTACEDLDECAFPGVCPSGVCTNTAGSFSCKDCDGGYRPSPLGDSCEDVDECEDPQSSCLGGECKNTVGSYQCLCPQGFQLANGTVCEDVNECMGEEHCAPHGECLNSHGSFFCLCAPGFVSAEGGTSCQDVDECATTDPCVGGHCVNTEGSFNCLCETGFQPSPESGECVDIDECANDTMCGSHGFCDNTDGSFRCLCDQGFEISPSGWDCVDVNECELMLAVCGAALCENVEGSFLCLCASDLEEYDAQEGHCRPRGAGGQSMSEAPTGDHAPAPTRMDCYSGQKGHAPCSSVLGRNTTQAECCCTQGASWGDACDLCPSEDSAEFSEICPSGKGYIPVEGAWTFGQTMYTDADECVIFGPGLCPNGRCLNTVPGYVCLCNPGFHYDASHKKCEDHDECQDLACENGECVNTEGSFHCFCSPPLTLDLSQQRCMNSTSSTEDLPDHDIHMDICWKKVTNDVCSEPLRGHRTTYTECCCQDGEAWSQQCALCPPRSSEVYAQLCNVARIEAEREAGVHFRPGYEYGPGPDDLHYSIYGPDGAPFYNYLGPEDTVPEPAFPNTAGHSADRTPILESPLQPSELQPHYVASHPEPPAGFEGLQAEECGILNGCENGRCVRVREGYTCDCFEGFQLDAAHMACVDVNECDDLNGPAVLCVHGYCENTEGSYRCHCSPGYVAEAGPPHCTAKE

SEQ ID NO: 36049 - protein, 1939 aa, Homo sapiens
LSLRGGGLVWIKETKKPGEVSKNKTVRVPFRRLQAQGGGAKVQQPCEPSWSRSADSRLGARSPRSAESRAPSRPLQGPLDSEKLAAGRGRENSPRASSVPTTKLFAVPARTTLQPPRAMRPRTKARSPGRALRNPWRGFLPLTLALFVGAGHAQRDPVGRYEPAGGDANRLRRPGGSYPAAAAAKVYSLFREQDAPVAGLQPVERAQPGWGSPRRPTEAEARRPSRAQQSRRVQPPAQTRRSTPLGQQQPAPRTRAAPALPRLGTPQRSGAAPPTPPRGRLTGRNVCGGQCCPGWTTANSTNHCIKPVCEPPCQNRGSCSRPQLCVCRSGFRGARCEEVIPDEEFDPQNSRLAPRRWAERSPNLRRSSAAGEGTLARAQPPAPQSPPAPQSPPAGTLSGLSQTHPSQQHVGLSRTVRLHPTATASSQLSSNALPPGPGLEQRDGTQQAVPLEHPSSPWGLNLTEKIKKIKIVFTPTICKQTCARGHCANSCERGDTTTLYSQGGHGHDPKSGFRIYFCQIPCLNGGRCIGRDECWCPANSTGKFCHLPIPQPDREPPGRGSRPRALLEAPLKQSTFTLPLSNQLASVNPSLVKVHIHHPPEASVQIHQVAQVRGGVEEALVENSVETRPPPWLPASPGHSLWDSNNIPARSGEPPRPLPPAAPRPRGLLGRCYLNTVNGQCANPLLELTTQEDCCGSVGAFWGVTLCAPCPPRPASPVIENGQLECPQGYKRLNLTHCQDINECLTLGLCKDAECVNTRGSYLCTCRPGLMLDPSRSRCVSDKAISMLQGLCYRSLGPGTCTLPLAQRITKQICCCSRVGKAWGSECEKCPLPGTEAFREICPAGHGYTYASSDIRLSMRKAEEEELARPPREQGQRSSGALPGPAERQPLRVVTDTWLEAGTIPDKGDSQAGQVTTSVTHAPAWVTGNATTPPMPEQGIAEIQEEQVTPSTDVLVTLSTPGIDRCAAGATNVCGPGTCVNLPDGYRCVCSPGYQLHPSQAYCTDDNECLRDPCKGKGRCINRVGSYSCFCYPGYTLATSGATQECQDINECEQPGVCSGGQCTNTEGSYHCECDQGYIMVRKGHCQDINECRHPGTCPDGRCVNSPGSYTCLACEEGYRGQSGSCVDVNECLTPGVCAHGKCTNLEGSFRCSCEQGYEVTSDEKGCQDVDECASRASCPTGLCLNTEGSFACSACENGYWVNEDGTACEDLDECAFPGVCPSGVCTNTAGSFSCKDCDGGYRPSPLGDSCEDVDECEDPQSSCLGGECKNTVGSYQCLCPQGFQLANGTVCEDVNECMGEEHCAPHGECLNSHGSFFCLCAPGFVSAEGGTSCQDVDECATTDPCVGGHCVNTEGSFNCLCETGFQPSPESGECVDIDECEDYGDPVCGTWKCENSPGSYRCVLGCQPGFHMAPNGDCIDIDECANDTMCGSHGFCDNTDGSFRCLCDQGFEISPSGWDCVDVNECELMLAVCGAALCENVEGSFLCLCASDLEEYDAQEGHCRPRGAGGQSMSEAPTGDHAPAPTRMDCYSGQKGHAPCSSVLGRNTTQAECCCTQGASWGDACDLCPSEDSAEFSEICPSGKGYIPVEGAWTFGQTMYTDADECVIFGPGLCPNGRCLNTVPGYVCLCNPGFHYDASHKKCEDHDECQDLACENGECVNTEGSFHCFCSPPLTLDLSQQRCMNSTSSTEDLPDHDIHMDICWKKVTNDVCSEPLRGHRTTYTECCCQDGEAWSQQCALCPPRSSEVYAQLCNVARIEAEREAGVHFRPGYEYGPGPDDLHYSIYGPDGAPFYNYLGPEDTVPEPAFPNTAGHSADRTPILESPLQPSELQPHYVASHPEPPAGFEGLQAEECGILNGCENGRCVRVREGYTCDCFEGFQLDAAHMACVDVNECDDLNGPAVLCVHGYCENTEGSYRCHCSPGYVAEAGPPHCTAKE

SEQ ID NO: 36050 - protein, 1904 aa, Homo sapiens
VGVAGIPRSLSGNEGAELSLRGGGLVWIKETKKPGEVSKNKTVRVPFRRLQAQGGGAKVQQPCEPSWSRSADSRLGARSPRSAESRAPSRPLQGPLDSEKLAAGRGRENSPRASSVPTTKLFAVPARTTLQPPRAMRPRTKARSPGRALRNPWRGFLPLTLALFVGAGHAQRDPVGRYEPAGGDANRLRRPGGSYPAAAAAKVYSLFREQDAPVAGLQPVERAQPGWGSPRRPTEAEARRPSRAQQSRRVQPPAQTRRSTPLGQQQPAPRTRAAPALPRLGTPQRSGAAPPTPPRGRLTGRNVCGGQCCPGWTTANSTNHCIKPVCEPPCQNRGSCSRPQLCVCRSGFRGARCEEVIPDEEFDPQNSRLAPRRWAERSPNLRRSSAAGEGTLARAQPPAPQSPPAPQSPPAGTLSGLSQTHPSQQHVGLSRTVRLHPTATASSQLSSNALPPGPGLEQRDGTQQAVPLEHPSSPWGLNLTEKIKKIKIVFTPTICKQTCARGHCANSCERGDTTTLYSQGGHGHDPKSGFRIYFCQIPCLNGGRCIGRDECWCPANSTGKFCHLPIPQPDREPPGRGSRPRALLEAPLKQSTFTLPLSNQLASVNPSLVKVHIHHPPEASVQIHQVAQVRGGVEEALVENSVETRPPPWLPASPGHSLWDSNNIPARSGEPPRPLPPAAPRPRGLLGRCYLNTVNGQCANPLLELTTQEDCCGSVGAFWGVTLCAPCPPRPASPVIENGQLECPQGYKRLNLTHCQDINECLTLGLCKDAECVNTRGSYLCTCRPGLMLDPSRSRCVSDKAISMLQGLCYRSLGPGTCTLPLAQRITKQICCCSRVGKAWGSECEKCPLPGTEAFREICPAGHGYTYASSDIRLSMRKAEEEELARPPREQGQRSSGALPGPAERQPLRVVTDTWLEAGTIPDKGDSQAGQVTTSVTHAPAWVTGNATTPPMPEQGIAEIQEEQVTPSTDVLVTLSTPGIDRCAAGATNVCGPGTCVNLPDGYRCVCSPGYQLHPSQAYCTDDNECLRDPCKGKGRCINRVGSYSCFCYPGYTLATSGATQECQDINECEQPGVCSGGQCTNTEGSYHCECDQGYIMVRKGHCQDINECRHPGTCPDGRCVNSPGSYTCLACEEGYRGQSGSCVDVNECLTPGVCAHGKCTNLEGSFRCSCEQGYEVTSDEKGCQDVDECASRASCPTGLCLNTEGSFACSACENGYWVNEDGTACEDLDECAFPGVCPSGVCTNTAGSFSCKDCDGGYRPSPLGDSCEDVDECEDPQSSCLGGECKNTVGSYQCLCPQGFQLANGTVCEDVNECMGEEHCAPHGECLNSHGSFFCLCAPGFVSAEGGTSCQDVDECATTDPCVGGHCVNTEGSFNCLCETGFQPSPESGECVDIDECEDYGDPVCGTWKCENSPGSYRCVLGCQPGFHMAPNGDCIDIDECANDTMCGSHGFCDNTDGSFRCLCDQGFEISPSGWDCVDVNECELMLAVCGAALCENVEGSFLCLCASDLEEYDAQEGHCRPRGAGGQSMSEAPTGDHAPAPTRMDCYSGQKGHAPCSSVLGRNTTQAECCCTQGASWGDACDLCPSEDSAEFSEICPSGKGYIPVEGAWTFGQTMYTDADECVIFGPGLCPNGRCLNTVPGYVCLCNPGFHYDASHKKCEDHDECQDLACENGECVNTEGSFHCFCSPPLTLDLSQQRCMNSTSSTEDLPDHDIHMDICWKKVTNDVCSEPLRGHRTTYTECCCQDGEAWSQQCALCPPRSSEVYAQLCNVARIEAEREAGVHFRPGYEYGPGPDDLHYSIYGPDGAPFYNYLGPEDTVPEPAFPNTAGHSADRTPILESPLQPSELQPHYVASHPGLCCCKTGEEVGTKAVSLPSPPPASHIASRSPQPASKGFRRRSAAS

SEQ ID NO: 36051 - protein, 95 aa, Homo sapiens
VMLSRSRCVSRAFSRSLSAFQKGNCPLGRRSLPGVSLCQGPGYPNSRKVVINNSVFSVRFFRTTAVCKDDLVTVKTPAFAESVTEGDVRWEKGKI

SEQ ID NO: 36052 - protein, 105 aa, Homo sapiens
VMLSRSRCVSRAFSRSLSAFQKGNCPLGRRSLPGVSLCQGPGYPNSRKVVINNSVFSVRFFRTTAVCKDDLVTVKTPAFAESVTEGDVRWEKDICAGSITSKWRD

SEQ ID NO: 36053 - protein, 84 aa, Homo sapiens
VMLSRSRCVSRAFSRSLSAFQKGNCPLGRRSLPALTTVSSVFAFSELQLYADDLVTVKTPAFAESVTEGDVRWEKGSITSKWRD

SEQ ID NO: 36054 - protein, 167 aa, Homo sapiens
VMLSRSRCVSRAFSRSLSAFQKGNCPLGRRSLPGVSLCQGPGYPNSRKVVINNSVFSVRFFRTTAVCKDDLVTVKTPAFAESVTEGDVRWEKAVGDTVAEDEVVCEIETDKTSVQVPSPANGVIEALLVPDGGKVEGGTPLFTLRKTGGKEVLLVVKVSSVPSWDWD

SEQ ID NO: 36055 - protein, 454 aa, Homo sapiens
VMLSRSRCVSRAFSRSLSAFQKGNCPLGRRSLPGVSLCQGPGYPNSRKVVINNSVFSVRFFRTTAVCKDDLVTVKTPAFAESVTEGDVRWEKAVGDTVAEDEVVCEIETDKTSVQVPSPANGVIEALLVPDGGKVEGGTPLFTLRKTGAAPAKAKPAEAPAAAAPKAEPTAAAVPPPAAPIPTQMPPVPSPSQPPSGKPVSAVKPTVAPPLAEPGAGKGLRSEHREKMNRMRQRIAQRLKEAQNTCAMLTTFNEIDMSNIQEMRARHKEAFLKKHNLKLGFMSAFVKASAFALQEQPVVNAVIDDTTKEVVYRDYIDISVAVATPRGLVVPVIRNVEAMNFADIERTITELGEKARKNELAIEDMDGGTFTISNGGVFGSLFGTPIINPPQSAILGMHGIFDRPVAIGGKVEVRPMMYVALTYDHRLIDGREAVTFLRKIKAAVEDPRVLLLDL

SEQ ID NO: 36056 - protein, 131 aa, Homo sapiens
MPVMRLFPCFLQLLAGLALPAVPPQQWALSAGNGSSEVEVVPFQEVWGRSYCRALERLVDVVSEYPSEVEHMFSPSCVSLLRCTGCCGDENLHCVPVETANVTMQLLKIRSGDRPSYVELTFSQHVRCECR

SEQ ID NO: 36057 - protein, 1464 aa, Homo sapiens
VPGILTIFLPTMIKCLSVEVQAKLRSGLAISSLGQCVEELALNSIDAEAKCVAVRVNMETFQVQVIDNGFGMGSDDVEKVGNRYFTSKCHSVQDLENPRFYGFRGEALANIADMASAVEISSKKNRTMKTFVKLFQSGKALKACEADVTRASAGTTVTVYNLFYQLPVRRKCMDPRLEFEKVRQRIEALSLMHPSISFSLRNDVSGSMVLQLPKTKDVCSRFCQIYGLGKSQKLREISFKYKEFELSGYISSEAHYNKNMQFLFVNKRLVLRTKLHKLIDFLLRKESIICKPKNGPTSRQMNSSLRHRSTPELYGIYVINVQCQFCEYDVCMEPAKTLIEFQNWDTLLFCIQEGVKMFLKQEKLFVELSGEDIKEFSEDNGFSLFDATLQKRVTSDERSNFQEACNNILDSYEMFNLQSKAVKRKTTAENVNTQSSRDSEATRKNTNDAFLYIYESGGPGHSKMTEPSLQNKDSSCSESKMLEQETIVASEAGENEKHKKSFLEHSSLENPCGTSLEMFLSPFQTPCHFEESGQDLEIWKESTTVNGMAANILKNNRIQNQPKRFKDATEVGCQPLPFATTLWGVHSAQTEKEKKKESSNCGRRNVFSYGRVKLCSTGFITHVVQNEKTKSTETEHSFKNYVRPGPTRAQETFGNRTRHSVETPDIKDLASTLSKESGQLPNKKNCRTNISYGLENEPTATYTMFSAFQEGSKKSQTDCILSDTSPSFPWYRHVSNDSRKTDKLIGFSKPIVRKKLSLSSQLGSLEKFKRQYGKVENPLDTEVEESNGVTTNLSLQVEPDILLKDKNRLENSDVCKITTMEHSDSDSSCQPASHILNSEKFPFSKDEDCLEQQMPSLRESPMTLKELSLFNRKPLDLEKSSESLASKLSRLKGSERETQTMGMMSRFNELPNSDSSRKDSKLCSVLTQDFCMLFNNKHEKTENGVIPTSDSATQDNSFNKNSKTHSNSNTTENCVISETPLVLPYNNSKVTGKDSDVLIRASEQQIGSLDSPSGMLMNPVEDATGDQNGICFQSEESKARACSETEESNTCCSDWQRHFDVALGRMVYVNKMTGLSTFIAPTEDIQAACTKDLTTVAVDVVLENGSQYRCQPFRSDLVLPFLPRARAERTVMRQDNRDTVDDTVSSESLQSLFSEWDNPVFARYPEVAVDVSSGQAESLAVKIHNILYPYRFTKGMIHSMQVLQQVDNKFIACLMSTKTEENGEAGGNLLVLVDQHAAHERIRLEQLIIDSYEKQQAQGSGRKKLLSSTLIPPLEITVTEEQRRLLWCYHKNLEDLGLEFVFPDTSDSLVLVGKVPLCFVEREANELRRGRSTVTKSIVEEFIREQLELLQTTGGIQGTLPLTVQKVLASQACHGAIKFNDGLSLQESCRLIEALSSCQLPFQCAHGRPSMLPLADIDHLEQEKQIKPNLTKLRKMAQAWRLFGKAECDTRQSLQQSMPPCEPP

SEQ ID NO: 36058 - protein, 1440 aa, Homo sapiens
VPGILTIFLPTMIKCLSVEVQAKLRSGLAISSLGQCVEELALNSIDAEAKCVAVRVNMETFQVQVIDNGFGMGSDDVEKVGNRYFTSKCHSVQDLENPRFYGFRGEALANIADMASAVEISSKKNRTMKTFVKLFQSGKALKACEADVTRASAGTTVTVYNLFYQLPVRRKCMDPRLEFEKVRQRIEALSLMHPSISFSLRNDVSGSMVLQLPKTKDVCSRFCQIYGLGKSQKLREISFKYKEFELSGYISSEAHYNKNMQFLFVNKRLVLRTKLHKLIDFLLRKESIICKPKNGPTSRQMNSSLRHRSTPELYGIYVINVQCQFCEYDVCMEPAKTLIEFQNWDTLLFCIQEGVKMFLKQEKLFVELSGEDIKEFSEDNGFSLFDATLQKRVTSDERSNFQEACNNILDSYEMFNLQSKAVKRKTTAENVNTQSSRDSEATRKNTNDAFLYIYESGGPGHSKMTEPSLQNKDSSCSESKMLEQETIVASEAGENEKHKKSFLEHSSLENPCGTSLEMFLSPFQTPCHFEESGQDLEIWKESTTVNGMAANILKNNRIQNQPKRFKDATEVGCQPLPFATTLWGVHSAQTEKEKKKESSNCGRRNVFSYGRVKLCSTGFITHVVQNEKTKSTETEHSFKNYVRPGPTRAQETFGNRTRHSVETPDIKDLASTLSKESGQLPNKKNCRTNISYGLENEPTATYTMFSAFQEGSKKSQTDCILSDTSPSFPWYRHVSNDSRKTDKLIGFSKPIVRKKLSLSSQLGSLEKFKRQYGKVENPLDTEVEESNGVTTNLSLQVEPDILLKDKNRLENSDVCKITTMEHSDSDSSCQPASHILNSEKFPFSKDEDCLEQQMPSLRESPMTLKELSLFNRKPLDLEKSSESLASKLSRLKGSERETQTMGMMSRFNELPNSDSSRKDSKLCSVLTQDFCMLFNNKHEKTENGVIPTSDSATQDNSFNKNSKTHSNSNTTENCVISETPLVLPYNNSKVTGKDSDVLIRASEQQIGSLDSPSGMLMNPVEDATGDQNGICFQSEESKARACSETEESNTCCSDWQRHFDVALGRMVYVNKMTGLSTFIAPTEDIQAACTKDLTTVAVDVVLENGSQYRCQPFRSDLVLPFLPRARAERTVMRQDNRDTVDDTVSSESLQSLFSEWDNPVFARYPEVAVDVSSGQAESLAVKIHNILYPYRFTKGMIHSMQVLQQVDNKFIACLMSTKTEENGEADSYEKQQAQGSGRKKLLSSTLIPPLEITVTEEQRRLLWCYHKNLEDLGLEFVFPDTSDSLVLVGKVPLCFVEREANELRRGRSTVTKSIVEEFIREQLELLQTTGGIQGTLPLTVQKVLASQACHGAIKFNDGLSLQESCRLIEALSSCQLPFQCAHGRPSMLPLADIDHLEQEKQIKPNLTKLRKMAQAWRLFGKAECDTRQSLQQSMPPCEPP

SEQ ID NO: 36059 - protein, 189 aa, Homo sapiens
LQLGPALPLGSRGGAGEAFLELLQRRTCTFLRTTLPDLGVCPCLAKGGGPGCASACFRRRMPASARLAGAGLLLAFLRALGCAGRAPGLSMAEGNTLISVDYEIFGKVQGVFFRKHTQAEGKKLGLVGWVQNTDRGTVQGQLQGPISKVRHMQEWLETRGSPKSHIDKANFNNEKVILKLDYSDFQIVK

SEQ ID NO: 36060 - protein, 257 aa, Homo sapiens
LSNGKSVLLHSKAVYFCAVYLSVFQSSSPGGGGGGGGGEEEDSQQESETPDPSGGFRGTMEADRGMEGLISPTEAMGNSNGASSSCPGWLRKELENAEFIPMPDSPSPLSAAFSESEKDTLPYEELQGLKVASEAPLEHKPQVEASSPRLNPAVTCAGKGTPLTPPACACSSLQVEVERLQGLVLKCLAEQQKLQQENLQIFTQLQKLNKKLEGGQQVGMHSKGTQTAKEEMEMDPKPDLDSDSWCLLGTDSCRPSL

SEQ ID NO: 36061 - protein, 479 aa, Homo sapiens
MIFILMCVSGRLGLDSEEDYYTPQKVDVPKALIIVAVQCGCDGTFLLTQSGKVLACGLNEFNKLGLNQCMSGIINHEAYHEVPYTTSFTLAKQLSFYKIRTIAPGKTHTAAIDERGRLLTFGCNKCGQLGVGNYKKRLGINLLGGPLGGKQVIRVSCGDEFTIAATDDNHIFAWGNGGNGRLAMTPTERPHGSDICTSWPRPIFGSLHHVPDLSCRGWHTILIVEKVLNSKTIRSNSSGLSIGTVFQSSSPGGGGGGGGGEEEDSQQESETPDPSGGFRGTMEADRGMEGLISPTEAMGNSNGASSSCPGWLRKELENAEFIPMPDSPSPLSAAFSESEKDTLPYEELQGLKVASEAPLEHKPQVEASSPRLNPAVTCAGKGTPLTPPACACSSLQVEVERLQGLVLKCLAEQQKLQQENLQIFTQLQKLNKKLEGGQQVGMHSKGTQTAKEEMEMDPKPDLDSDSWCLLGTDSCRPSL

SEQ ID NO: 36062 - protein, 425 aa, Homo sapiens
MIFILMCVSGRLGLDSEEDYYTPQKVDVPKALIIVAVQCGCDGTFLLTQSGKVLACGLNEFNKLGLNQCMSGIINHEAYHEVPYTTSFTLAKQLSFYKIRTIAPGKTHTAAIDERGRLLTFGCNKCGQLGVGNYKKRLGINLLGGPLGGKQVIRVSCGDEFTIAATDDNHIFAWGNGGNGRLAMTPTERPHGSDICTSWPRPIFGSLHHVPDLSCRGWHTILIVVFQSSSPGGGGGGGGGEEEDSQQESETPDPSGGFRGTMEADRGMEGLISPTEAMGNSNGASSSCPGWLRKELENAEFIPMPDSPSPLSAAFSESEKDTLPYEELQGLKVASEAPLEHKPQVEASSPRLNPAVTCAGKGTPLTPPACACSSLQVEVERLQGLVLKCLAEQQKLQQENLQIFTQLQKLNKKLEGGQQVRALKE

SEQ ID NO: 36063 - protein, 24 aa, Homo sapiens
LVISFHDFISLKMVMDVTPHKSEL

SEQ ID NO: 36064 - protein, 115 aa, Homo sapiens
MIPLISFSGTGRIPDQLVILDMKHGVEAKNYEEIAKVEKLKPLEVELRRLEDLSESIVNDFAYMKKREEEMRDTNESTNTRVLYFSIFSMFCLIGLATWQVFYLRRFFKAKKLIE

SEQ ID NO: 36065 - protein, 73 aa, Homo sapiens
LLLLFLLGPRLVLAISFHLPINSRKCLREEIHKDLLVTGAYEISDQSGGAGGLRSHLKVRHWATWGREGRRQA

SEQ ID NO: 36066 - protein, 45 aa, Homo sapiens
LNAGAFYALSTLLNRMVIWHYPESVPSKLLDPVNLLGKVSEAPVC

SEQ ID NO: 36067 - protein, 39 aa, Homo sapiens
MAQVDSGLELSWGSLFAAAAAAATAVLGARSPGKKPSHV

SEQ ID NO: 36068 - protein, 11 aa, Homo sapiens
MAEAEDKPRCW

SEQ ID NO: 36069 - protein, 83 aa, Homo sapiens
LGHLVAEVPAKAALFYAWKGGRQGRPFFPRAKMGRRAQQESAQAENHLNGKNSSLTLTGETSSAKLPRCRQGGWAGDSVKASK

SEQ ID NO: 36070 - protein, 46 aa, Homo sapiens
LLYQSRSRDLFIGWEYCVLSHKETQTGDCQLVPEERSNELSATEST

SEQ ID NO: 36071 - protein, 111 aa, Homo sapiens
LKMAASAARGAAALRRSINQPVAFVRRIPWTAASSQLKEHFAQFGHVRRCILPFDKETGFHRGLGWVQFSSEEGLRNALQQENHIIDGVKVQVHTRRPKLPQTSDDEKKDF

SEQ ID NO: 36072 - protein, 46 aa, Homo sapiens
LLIPFLLFPSLLLCWELRFVPALENFSSSGGTDTAMCCCSAGLLAP

SEQ ID NO: 36073 - protein, 43 aa, Homo sapiens
LHHRQIARRERQRVRKKRSQSLLGKGESETGRKRSTESVCKTE

SEQ ID NO: 36074 - protein, 11 aa, Homo sapiens
LLLYILLCVMA

SEQ ID NO: 36075 - protein, 74 aa, Homo sapiens
LFSWGCPLLFVLCVEMANSANTNTVPKLYRSVIEDVINDVRDIFLDDGVDEQVLMELKTILNKTVAAQKMFILW

SEQ ID NO: 36076 - protein, 818 aa, Homo sapiens
VVAESVVAEAKATALGVGTGPERRMRVRIGLTLLLCAVLLSLASASSDEEGSQDESLDSKTTLTSDESVKDHTTAGRVVAGQIFLDSEESELESSIQEEEDSLKSQEGESVTEDISFLESPNPENKDYEEPKKVRKPALTAIEGTAHGEPCHFPFLFLDKEYDECTSDGREDGRLWCATTYDYKADEKWGFCETEEEAAKRRQMQEAEMMYQTGMKILNGSNKKSQKREAYRYLQKAASMNHTKALERVSYALLFGDYLPQNIQAAREMFEKLTEEGSPKGQTALGFLYASGLGVNSSQAKALVYYTFGALGGNLIAHMVLGYRYWAGIGVLQSCESALTHYRLVANHVASDISLTGGSVVQRIRLPDEVENPGMNSGMLEEDLIQYYQFLAEKGDVQAQVGLGQLHLHGGRGVEQNHQRAFDYFNLAANAGNSHAMAFLGKMYSEGSDIVPQSNETALHYFKKAADMGNPVGQSGLGMAYLYGRGVQVNYDLALKYFQKAAEQGWVDGQLQLGSMYYNGIGVKRDYKQALKYFNLASQGGHILAFYNLAQMHASGTGVMRSCHTAVELFKNVCERGRWSERLMTAYNSYKDGDYNAAVIQYLLLAEQGYEVAQSNAAFILDQREASIVGENETYPRALLHWNRAASQGYTVARIKLGDYHFYGFGTDVDYETAFIHYRLASEQQHSAQAMFNLGYMHEKGLGIKQDIHLAKRFYDMAAEASPDAQVPVFLALCKLGVVYFLQYIRETNIRDMFTQLDMDQLLGPEWDLYLMTIIALLLGTVIAYRQRQHQDMPAPRPPGPRPAPPQQEGPPEQQPPQ

SEQ ID NO: 36077 - protein, 325 aa, Homo sapiens
VVAESVVAEAKATALGVGTGPERRMRVRIGLTLLLCAVLLSLASASSDEEGSQDESLDSKTTLTSDESVKDHTTAGRVVAGQIFLDSEESELESSIQEEEDSLKSQEGESVTEDISFLESPNPENKDYEEPKKVRKPALTAIEGTAHGEPCHFPFLFLDKEYDECTSDGREDGRLWCATTYDYKADEKWGFCETEEEAAKRRQMQEAEMMYQTGMKILNGSNKKSQKREAYRYLQKAASMNHTKALERVSYALLFGDYLPQNIQAAREMFEKLTEEGSPKGQTALGFLYASGLGVNSSQAKALVYYTFGALGGNLIAHMVLVSRL

SEQ ID NO: 36078 - protein, 9 aa, Homo sapiens
MVLFFLKLW

SEQ ID NO: 36079 - protein, 13 aa, Homo sapiens
LQVEIVLFFLKLW

SEQ ID NO: 36080 - protein, 15 aa, Homo sapiens
MLYALKSIFLFSFLR

SEQ ID NO: 36081 - protein, 391 aa, Homo sapiens
MTAAAGSAGRAAVPLLLCALLAPGGAYVLDDSDGLGREFDGIGAVSGGGATSRLLVNYPEPYRSQILDYLFKPNFGASLHILKVEIGGDGQTTDGTEPSHMHYALDENYFRGYEWWLMKEAKKRNPNITLIGLPWSFPGWLGKGFDWPYVNLQLTAYYVVTWIVGAKRYHDLDIDYIGIWNERSYNANYIKILRKMLNYQGLQRVKIIASDNLWESISASMLLDAELFKVVDVIGAHYPGTHSAKDAKLTGKKLWSSEDFSTLNSDMGAGCWGRILNQNYINGYMTSTIAWNLVASYYEQLPYGRCGLMTAQEPWSGHYVVESPVWVSAHTTQFTQPGWYYLKTVGHLEKGGSYVALTDGLGNLTIIIETMVNFCCCYWINSLLYYWKNKI

SEQ ID NO: 36082 - protein, 60 aa, Homo sapiens
MTAAAGSAGRAAVPLLLCALLAPGGAYVLDDSDGLGREFDGIGAVSGGGDWCLKVSLKGR

SEQ ID NO: 36083 - protein, 563 aa, Homo sapiens
LRTLLLFGFFSFLPLLGNEAMKFPIETPRKQVNWDPKVAVPAAAPVCQPKSATNGQPPAPAPTPTPRLSISSRATVVARMEGTSQGGLQTVMKWKTVVAIFVVVVVYLVTGGLVFRALEQPFESSQKNTIALEKAEFLRDHVCVSPQELETLIQHALDADNAGVSPIGNSSNNSSHWDLGSAFFFAGTVITTIGYGNIAPSTEGGKIFCILYAIFGIPLFGFLLAGIGDQLGTIFGKSIARVEKVFRKKQVSQTKIRVISTILFILAGCIVFVTIPAVIFKYIEGWTALESIYFVVVTLTTVGFGDFVAGGNAGINYREWYKPLVWFWILVGLAYFAAVLSMIGDWLRVLSKKTKEEVGEIKAHAAEWKANVTAEFRETRRRLSVEIHDKLQRAATIRSMERRRLGLDQRAHSLDMLSPEKRSVFAALDTGRFKASSQESINNRPNNLRLKGPEQLNKHGQGASEDNIINKFGSTSRLTKRKNKDLKKTLPEDVQKIYKTFRNYSLDEEKKEEETEKMCNSDNSSTAMLTDCIQQHAELENGMIPTDTKDREPENNSLLEDRN

SEQ ID NO: 36084 - protein, 125 aa, Homo sapiens
MPLPFGLKLKRTRRYTVSSKSCLVARIQLLNNEFVEFTLSVESTGQESLEAVAQRLELREVTYFSLWYYNKQNQRRWVDLEKPLKKQLDKYALEPTVYFGVVFYVPSVSQLQQEITSFQERCENM

SEQ ID NO: 36085 - protein, 42 aa, Homo sapiens
MPPRLECSGAIVAHRSLEHLGSSDPPASTSRVAGTTEIACWG

SEQ ID NO: 36086 - protein, 2060 aa, Homo sapiens
LGIHLTAGGARGPQHVPRGEGFPPACGLRRRRPPKRDAPDGRGLEDAAGGKSRQPAGGLSLPGRRRLPSPPRARAGAAGGRPDMAARSAPSCHLRLEWVYGYRGHQCRNNLYYTAAKEIVYFVAGVGVVYSPREHRQKFYRGHSDDIISLALHPERVLVATGQVGKEPYICIWDSYTVQTISVLKDVHTHGIACLAFDLDGQRLVSVGLDSKNAVCVWDWKRGKMLSMAPGHTDRIFDISWDLYQPNKLVSCGVKHIKFWSLCGNALTPKRGVFGKTGDLQTILCLACARDELTYSGALNGDIYVWKGINLIRTIQGAHAAGIFSMNACEEGFATGGRDGCIRLWDLTFKPITVIDLRETDQGYKGLSVRSVCWRGDHILVGTQDSEIFEIVVQERNKPFLIMQGHCEGELWALAVHPTKPLAVTGSDDRSVRIWSLVDHALIARCNMEEPIRCAAVNADGIHLALGMKDGSFTVLRVRDMTEVVHIKDRKEAIHELKYSPDGTYLAVGCNDSSVDIYGVAQRYKKVGECLGSLSFITHLDWSSDSRYLQTNDGNGKRLFYRMPGGKEVTSTEEIKGVHWASWTCVSGLEVNGIWPKYSDINDINSVDGNYIGQVLVTADDYGIIKLFRYPCLRKGAKFRKYIGHSAHVTNVRWSHDYQWVISIGGADHSVFQWKFIPERKLKDAVHIAPQESLADSHSDESDSDLSDVPELDSEIEQETQLTYRRQVYKEDLPQLKEQCKEKQKSATSKRRERAPGNSIRLHFVHGYRGYDCRSNLFYTQIGEIVYHVAAVGVIYNRQQNTQRFYLGHDDDILCLTIHPLKDYVATGQVGRDPSIHIWDTETIKPLSILKGHHQYGVSAVDFSADGKRLASVGIDDSHTVVLWDWKKGEKLSIARGSKDKIFVVKMNPYVPDKLITAGIKHMKFWRKAGGGLIGRKGYIGTLGKNDTMMCAVYGWTEEMAFSGTSTGDVCIWRDIFLVKTVKAHDGPVFSMHALEKGFVTGGKDGIVALWDDSFERCLKTYAIKRAALAPGSKGLLLEDNPSIRAISLGHGHILVGTKNGEILEVDKSGPITLLVQGHMEGEVWGLATHPYLPICATVSDDKTLRIWDLSPSHCMLAVRKLKKGGRCCCFSPDGKALAVGLNDGSFLMANADTLEDLVSFHHRKDMISDIRFSPGSGKYLAVASHDSFIDIYNVMSSKRVGICKGATSYITHIDWDIRGKLLQVNTGAKEQLFFEAPRGKKQTIPSVEVEKIAWASWTSVLGLCCEGIWPVIGEVTDVTASCLTSDKMVLATGDDLGFVKLFRYPTKGKFGKFKRYVAHSTHVTNVRWTYDDSMLVTLGGTDMSLMVWTNEMEGYREKRPCDSEESDIDSEEDGGYDSDVTRENEISYTIRALSTNIRPMLGIKPHLQQKEPSIDERQGVVRGSRPPVSRAPPQPEKLQTNNVGKKKRPIEDLVLELIFGYRGRDCRNNVHYLNDGDDIIYHTASVGILHNVATGSQSFYQEHNDDILCLTVNQHPKFINIVATGQVGDSADMSATAPSIHIWDAMNKQTLSILRCYHSKGVCSVSFSATGKLLLSVGLDPEHTITIWRWQEGAKIASRAGHNQRIFVAEFRPDSDTQFVSVGVKHVKFWTLAGRALLSKKGLLSTLEDARMQTMLAIAFGANNLTFTGTISGDVCVWKDHILCRIVARAHNGPVFAMYTTLRDGLIVTGGKERPSKEGGAVKLWDQELRRCRAFRLETGQATDCVRSVCRGKGKILVGTRNAEIIEVGEKNAACNILVNGHVDGPIWGLATHPSRDFFLSAAEDGTVRLWDIADKKMLNKVNLGHAARTVCYSPEGDMVAIGMKNGEFIILLVSSLKIWGKKRDRRCAIHDIRFSPDSRYLAVGSSENSVDFYDLTLGPTLNRISYCKDIPSFVIQMDFSADSSYLQVSSGCYKRHVYEVPSGKHLMDHAAIDRITWATWTSILGDEVLGIWSRHAEKADVNCACVSHSGISLVTGDDFGMVKLFDFPCPEKFAKHKRFLGHSPHVTNIRFTSGDRHVVSAGGDDCSLFVWKCVHTPH

SEQ ID NO: 36087 - protein, 68 aa, Homo sapiens
MPCRNRKQGPAIATFSTLTNLELRPPRLRELNLETRQRHAAQKLLLLPLPKKFSLMAGAGGGGTKRNL

SEQ ID NO: 36088 - protein, 143 aa, Homo sapiens
VGVAAVFKACDEDHKGYLSREDFKTAVVMLFGYKPSKIEVDSVMSSINPNTSGILLEGFLNIVRKKKEAQRYRNEVRHIFTAFDTYYRGFLTLEDFKKAFRQVAPKLPERTVLEVFREVDRDSDGHVSFRDFEYALNYGQKEA

SEQ ID NO: 36089 - protein, 72 aa, Homo sapiens
LGCWGSVVVVAMFFSEARARSRTWEASPSEHRKWVEVFKACDEDHKGYLSREDFKTAVVMLFGYKPSKKWIL

SEQ ID NO: 36090 - protein, 115 aa, Homo sapiens
LAGRSGGGTSGSGSSSGQGKMGQSQSGGHGPGGGKKDDKDKKKKYEPPVPTRVGKKKKKTKGPDAASKLPLVTPHTQCRLKLLKLERIKDYLLMEEEFIRNQEQMKPLEEKQEVS

SEQ ID NO: 36091 - protein, 460 aa, Homo sapiens
LAGRSGGGTSGSGSSSGQGKMGQSQSGGHGPGGGKKDDKDKKKKYEPPVPTRVGKKKKKTKGPDAASKLPLVTPHTQCRLKLLKLERIKDYLLMEEEFIRNQEQMKPLEEKQEEERSKVDDLRGTPMSVGTLEEIIDDNHAIVSTSVGSEHYVSILSFVDKDLLEPGCSVLLNHKVHAVIGVLMDDTDPLVTVMKVEKAPQETYADIGGLDNQIQEIKESVELPLTHPEYYEEMGIKPPKGVILYGPPGTGKTLLAKAVANQTSATFLRVVGSELIQKYLGDGPKLVRELFRVAEEHAPSIVFIDEIDAIGTKRYDSNSGGEREIQRTMLELLNQLDGFDSRGDVKVIMATNRIETLDPALIRPGRIDRKIEFPLPDEKTKKRIFQIHTSRMTLADDVTLDDLIMAKDDLSGADIKAICTEAGLMALRERRMKVTNEDFKKSKENVLYKKQEGTPEGLYL

SEQ ID NO: 36092 - protein, 180 aa, Homo sapiens
VPLLVVRRRRRRRRRHSAQRALAAAAAAAASEADQLTEEQIAEFKEAFSLFDKDGDGTITTKELGTVMRSLGQNPTEAELQDMINEVDADGNGTIDFPEFLTMMARKMKDTDSEEEIREAFRVFDKDGNGYISAAELRHVMTNLGEKLTDEEVDEMIREADIDGDGQVNYEEFVQMMTAK

SEQ ID NO: 36093 - protein, 106 aa, Homo sapiens
MADQLTEEQIAEFKEAFSLFDKDGDGTITTKELGTVMRSLGQNPTEAELQDMINEVDADGKSFKTMNEGHCCVIQVQTCYRIVFQVPRAKQMCKDPFCGCPRAIDN

SEQ ID NO: 36094 - protein, 211 aa, Homo sapiens
VWPWLVPAAFAPCGPPPSAAVRAGVSLGAPGGTSRGRRWARANWGGGGGRRGRRELARGLVSIRDAKFLLREEAAAPRARRLGEQKRVGGAGGLGLSPGARGPGVVTLLAEEGRRPDARSGAAFPPTPAPGHAPCPVPRPAPLPVRREMPSTFLLSLQPLDCQMRLCASLGVFSTAPSSSACRADITDCVSGLAGGEMVPRRVLVHLCPQG

SEQ ID NO: 36095 - protein, 60 aa, Homo sapiens
MKWMLMDGNGYISAAELRHVMTNLGEKLTDEEVDEMIREADIDGDGQVNYEEFVQMMTAK

SEQ ID NO: 36096 - protein, 20 aa, Homo sapiens
LLMINTLFGLASFSCMQLDD

SEQ ID NO: 36097 - protein, 12 aa, Homo sapiens
LFSIVLLITCLM

SEQ ID NO: 36098 - protein, 36 aa, Homo sapiens
VEIPWLVGLSHMALLMGQMEKERQVTCPEPLCQKGT

SEQ ID NO: 36099 - protein, 217 aa, Homo sapiens
VDAAPSRCYLRDQTTVPCVTHAGFCCPLVVTMRPIPKDKLEGLVRACCSLGGEQGQPVHMGDPELLGIKELSKPAYGDAMVCPPGEVPVFWPSPLTSLGAVSSCETPLAFASIPGCTVMTDLKDAKAPPGCLTPERIPEVHHISQDPLHYSIASVSASQKIRELESMIGIDPEMGSPCVEPLGSNNPPSSVSQSVEITGMSHRSWCSGEPGDWAPAL

SEQ ID NO: 36100 - protein, 54 aa, Homo sapiens
MQTGPISATLVMTRPIKGPREIQLDLEMITVNTVINFRGSSVIRLRIYVSQYPF

SEQ ID NO: 36101 - protein, 465 aa, Homo sapiens
MFVWDSHRSFKPMRSGNCRQRYMILTVTILALCLPSPGNAQAQCTNGFDLDRQSGQCLDIDECRTIPEACRGDMMCVNQNGGYLCIPRTNPVYRGPYSNPYSTPYSGPYPAAAPPLSAPNYPTISRPLICRFGYQMDESNQCVDVDECATDSHQCNPTQICINTEGGYTCSCTDGYWLLEGQCLDIDECRYGYCQQLCANVPGSYSCTCNPGFTLNEDGRSCQDVNECATENPCVQTCVNTYGSFICRCDPGYELEEDGVHCSDMDECSFSEFLCQHECVNQPGTYFCSCPPGYILLDDNRSCQDINECEHRNHTCNLQQTCYNLQGGFKCIDPIRCEEPYLRISDNRCMCPAENPGCRDQPFTILYRDMDVVSGRSVPADIFQMQATTRYPGAYYIFQIKSGNEGREFYMRQTGPISATLVMTRPIKGPREIQLDLEMITVNTVINFRGSSVIRLRIYVSQYPF

SEQ ID NO: 36102 - protein, 491 aa, Homo sapiens
LDMPGIKRILTVTILALCLPSPGNAQAQCTNGFDLDRQSGQCLDGVSLSSPRLECNGAISAHCNLCLPGSSDSSASASQVAGITDIDECRTIPEACRGDMMCVNQNGGYLCIPRTNPVYRGPYSNPYSTPYSGPYPAAAPPLSAPNYPTISRPLICRFGYQMDESNQCVDVDECATDSHQCNPTQICINTEGGYTCSCTDGYWLLEGQCLDIDECRYGYCQQLCANVPGSYSCTCNPGFTLNEDGRSCQDVNECATENPCVQTCVNTYGSFICRCDPGYELEEDGVHCSDMDECSFSEFLCQHECVNQPGTYFCSCPPGYILLDDNRSCQDINECEHRNHTCNLQQTCYNLQGGFKCIDPIRCEEPYLRISDNRCMCPAENPGCRDQPFTILYRDMDVVSGRSVPADIFQMQATTRYPGAYYIFQIKSGNEGREFYMRQTGPISATLVMTRPIKGPREIQLDLEMITVNTVINFRGSSVIRLRIYVSQYPF

SEQ ID NO: 36103 - protein, 46 aa, Homo sapiens
LDMPGIKRILTVTILALCLPSPGNAQAQCTNGFDLDRQSGQCLASL

SEQ ID NO: 36104 - protein, 35 aa, Homo sapiens
LDMPGIKRILTVTILALCLPSPGNAQERWTPVCQP

SEQ ID NO: 36105 - protein, 37 aa, Homo sapiens
LDMPGIKRILTVTILALCLPSPGNAQQQERWTPVCQP

SEQ ID NO: 36106 - protein, 2024 aa, Homo sapiens
LRTQLCVIVSCLAKAGVQGYLVGSPGGAKRFLFSERTGSFSKLAAMSSWLGGLGSGLGQSLGQVGGSLASLTGQISNFTKDMLMEGTEEVEAELPDSRTKEIEAIHAILRSENERLKKLCTDLEEKHEASEIQIKQQSTSYRNQLQQKEVEISHLKARQIALQDQLLKLQSAAQSVPSGAGVPATTASSSFAYGISHHPSAFHDDDMDFGDIISSQQEINRLSNEVSRLESEVGHWRHIAQTSKAQGTDNSDQSEICKLQNIIKELKQNRSQEIDDHQHEMSVLQNAHQQKLTEISRRHREELSDYEERIEELENLLQQGGSGVIETDLSKIYEMQKTIQVLQIEKVESTKKMEQLEDKIKDINKKLSSAENDRDILRREQEQLNVEKRQIMEECENLKLECSKLQPSAVKQSDTMTEKERILAQSASVEEVFRLQQALSDAENEIMRLSSLNQDNSLAEDNLKLKMRIEVLEKEKSLLSQEKEELQMSLLKLNNEYEVIKSTATRDISLDSELHDLRLNLEAKEQELNQSISEKETLIAEIEELDRQNQEATKHMILIKDQLSKQQNEGDSIISKLKQDLNDEKKRVHQLEDDKMDITKELDVQKEKLIQSEVALNDLHLTKQKLEDKVENLVDQLNKSQESNVSIQKENLELKEHIRQNEEELSRIRNELMQSLNQDSNSNFKDTLLKEREAEVRNLKQNLSELEQLNENLKKVAFDVKMENEKLVLACEDVRHQLEECLAGNNQLSLEKNTIVETLKMEKGEIEAELCWAKKRLLEEANKYEKTIEELSNARNLNTSALQLEHEHLIKLNQKKDMEIAELKKNIEQMDTDHKETKDVLSSSLEEQKQLTQLINKKEIFIEKLKERSSKLQEELDKYSQALRKNEILRQTIEEKDRSLGSMKEENNHLQEELERLREEQSRTAPVADPKTLDSVTELASEVSQLNTIKEHLEEEIKHHQKIIEDQNQSKMQLLQSLQEQKKEMDEFRYQHEQMNATHTQLFLEKDEEIKSLQKTIEQIKTQLHEERQDIQTDNSDIFQETKVQSLNIENGSEKHDLSKAETERLVKGIKERELEIKLLNEKNISLTKQIDQLSKDEVGKLTQIIQQKDLEIQALHARISSTSHTQDVVYLQQQLQAYAMEREKVFAVLNEKTRENSHLKTEYHKMMDIVAAKEAALIKLQDENKKLSTRFESSGQDMFRETIQNLSRIIREKDIEIDALSQKCQTLLAVLQTSSTGNEAGGVNSNQFEELLQERDKLKQQVKKMEEWKQQVMTTVQNMQHESAQLQEELHQLQAQVLVDSDNNSKLQVDYTGLIQSYEQNETKLKNFGQELAQVQHSIGQLCNTKDLLLGKLDIISPQLSSASLLTPQSAECLRASKSEVLSESSELLQQELEELRKSLQEKDATIRTLQENNHRLSDSIAATSELERKEHEQTDSEIKQLKEKQDVLQKLLKEKDLLIKAKSDQLLSSNENFTNKVNENELLRQAVTNLKERILILEMDIGKLKGENEKIVETYRGKETEYQALQETNMKFSMMLREKEFECHSMKEKALAFEQLLKEKEQGKTGELNQLLNAVKSMQEKTVVFQQERDQVMLALKQKQMENTALQNEVQRLRDKEFRSNQELERLRNHLLESEDSYTREALAAEDREAKLRKKVTVLEEKLVSSSNAMENASHQASVQVESLQEQLNVVSKQRDETALQLSVSQEQVKQYALSLANLQMVLEHFQQEEKAMYSAELEKQKQLIAEWKKNAENLEGKVISLQECLDEANAALDSASRLTEQLDVKEEQIEELKRQNELRQEMLDDVQKKLMSLANSSEGKVDKVLMRNLFIGHFHTPKNQRHEVLRLMGSILGVRREEMEQLFHDDQGGVTRWMTGWLGGGSKSVPNTPLRPNQQSVVNSSFSELFVKFLETESHPSIPPPKLSVHDMKPLDSPGRRKRDTNAPESFKDTAESRSGRRTDVNPFLAPRSAAVPLINPAGLGPGGPGHLLLKPISDVLPTFTPLPALPDNSAGVVLKDLLKQ

SEQ ID NO: 36107 - protein, 125 aa, Homo sapiens
LRTQLCVIVSCLAKAGVQGYLVGSPGGAKRFLFSERTGSFSKLAAMSSWLGGLGSGLGQSLGQVGGSLASLTGQISNFTKDMLMEGTEEVEAELPDSRTKEIEAIHAILRSELPLCTHLLSAFYI

SEQ ID NO: 36108 - protein, 146 aa, Homo sapiens
LRTQLCVIVSCLAKAGVQGYLVGSPGGAKRFLFSERTGSFSKLAAMSSWLGGLGSGLGQSLGQVGGSLASLTGQISNFTKDMLMEGTEEVEGNSWSEGREGFSKTLGTSVWSLLPSVRRRGQVAKECCSSLFSSHTSSCLFSTDFL

SEQ ID NO: 36109 - protein, 278 aa, Homo sapiens
VKIIARFYSSLLEIWMTVVFSLFRNERSFICNYKEHWFTVRKLGKQWFNLNSLLTGPELISDTYLALFLAQLQQEGYSIFVVKGDLPDCEADQLLQMIRVQQMHRPKLIGEELAQLKEQRVHKTDLERVLEANDGSGMLDEDEEDLQRALALSRQEIDMEDEEADLRRAIQLSMQGSSRNISQDMTQTSGTNLTSEELRKRREAYFEKQQQKQQQQQQQQQQGDLSGQSSHPCERPATSSGALGSDLGDAMSEEDMLQAAVTMSLETVRNDLKTEGKK

SEQ ID NO: 36110 - protein, 120 aa, Homo sapiens
VKIIARFYSSLLEIWMTVVFSLFRNERSFICNYKEHWFTVRKLGKQWFNLNSLLTGPELISDTYLALFLAQLQQEGYSIFVVKGDLPDCEADQLLQMIRVQQMHRPKLIGEELAQLKEQR

SEQ ID NO: 36111 - protein, 24 aa, Homo sapiens
MGFSSGGGWDFRAGAFGKGFLRLS

SEQ ID NO: 36112 - protein, 108 aa, Homo sapiens
LLVLRVPSPSPQASPRLARPAHAGPSPPDCAQPPSPGPLPLYQSLPHAAPQSPRALAALRGWTVLPARTMGCPGGLAPPFLSVLPSVPSIAPGVQGTHLEGGREGMNE

SEQ ID NO: 36113 - protein, 135 aa, Homo sapiens
MVWKVAVFLSVALGIGAVPIDDPEDGGKHWVVIVAGSNGWYNYRHQADACHAYQIIHRNGIPDEQIVVMMYDDIAYSEDNPTPGIVINRPNGTDVYQGVPKDYTGEDVTPQNFLAVLRGDAEAVKGIGSGKVLKR

SEQ ID NO: 36114 - protein, 49 aa, Homo sapiens [sequence omitted]

SEQ ID NO: 36115 - protein, 389 aa, Homo sapiens
VRGRSPPPFSAGSARGPGRGGSGGGGGGTARPSSDPRSASPPPGGGAHSLAARAGRQTRPVGDFLRTQAPRPRRKMQTFLKGKRVGYWLSEKKIKKLNFQAFAELCRKRGMEVVQLNLSRPIEEQGPLDVIIHKLTDVILEADQNDSQSLELVHRFQEYIDAHPETIVLDPLPAIRTLLDRSKSYELIRKIEAYMEDDRICSPPFMELTSLCGDDTMRLLEKNGLTFPFICKTRVAHGTNSHEMAIVFNQEGLNAIQPPCVVQNFINHNAVLYKVFVVGESYTVVQRPSLKNFSAGTSDRESIFFNSHNVSKPESSSVLTELDKIEGVFERPSDEVIRELSRALRQALGVSLFGIDIIINNQTGQHAVIDINAFPGDCQVCFIEGWKTD

SEQ ID NO: 36116 - protein, 39 aa, Homo sapiens
LVSCLMICYFTPRCVCFATELLPSRTSSAGITEGSLPVT

SEQ ID NO: 36117 - protein, 296 aa, Homo sapiens
LLGHSGGLTFGLRSGRVYSPPPPRPRGPRHRTSGGARPRLPRHSRTGSLLAGAGPGLAALVTMSETSFNLISEKCDILSILRDHPENRIYRRKIEELSKRFTAIRKTKGDGNCFYRALGYSYLESLLGKSREIFKFKERVLQTPNDLLAAGFEEHKFRNFFNAFYSVVELVEKDGSVSSLLKVFNDQSASDHIVQFLRLLTSAFIRNRADFFRHFIDEEMDIKDFCTHEVEPMATECDHIQITALSQALSIALQVEYVDEMDTALNHHVFPEAATPSVYLLYKTSHYNILYAADKH

SEQ ID NO: 36118 - protein, 124 aa, Homo sapiens
LRSGRVYSPPPPRPRGPRHRTSGGARPRLPRHSRTGSLLAGAGPGLAALVTMSETSFNLISEKCDILSILRDHPENRIYRRKIEELSKRFTAIRKTKGDGNCFYRALGYSYLESLLGKSREIFK

SEQ ID NO: 36119 - protein, 25 aa, Homo sapiens
MTFLGLWMTIFQRTSLLLPKLFKEA

SEQ ID NO: 36120 - protein, 212 aa, Homo sapiens
LGISIFTTILLGTWTQPFDLASTREENFYVDETTVVKVPMMLQSSTISYLHDSELPCQLVQMNYVGNGTVFFILPDKGKMNTVIAALSRDTINRWSAGLTSSQVDLYIPKVTISGVYDLGDVLEEMGIADLFTNQANFSRITQDAQLKSSKVVHKAVLQLNEEGVDTAGSTGVTLNLTSKPIILRFNQPFIIMIFDHFTWSSLFLARVMNPV

SEQ ID NO: 36121 - protein, 412 aa, Homo sapiens
LAWLYWTMPLLLYTCLLWLPTSGLWTVQAMDPNAAYVNMSNHHRGLASANVDFAFSLYKHLVALSPKKNIFISPVSISMALAMLSLGTCGHTRAQLLQGLGFNLTERSETEIHQGFQHLHQLFAKSDTSLEMTMGNALFLDGSLELLESFSADIKHYYESEVLAMNFQDWATASRQINSYVKNKTQGKIVDLFSGLDSPAILVLVNYIFFKGTWTQPFDLASTREENFYVDETTVVKVPMMLQSSTISYLHDSELPCQLVQMNYVGNGTVFFILPDKGKMNTVIAALSRDTINRWSAGLTSSQVDLYIPKVTISGVYDLGDVLEEMGIADLFTNQANFSRITQDAQLKSSKVVHKAVLQLNEEGVDTAGSTGVTLNLTSKPIILRFNQPFIIMIFDHFTWSSLFLARVMNPV

SEQ ID NO: 36122 - protein, 285 aa, Homo sapiens
LAWLYWTMPLLLYTCLLWLPTSGLWTVQAMDPNAAYVNMSNHHRGLASANVDFAFSLYKHLVALSPKKNIFISPVSISMALAMLSLGTCGHTRAQLLQGLGFNLTERSETEIHQGFQHLHQLFAKSDTSLEMTMGNALFLDGSLELLESFSADIKHYYESEVLAMNFQDWATASRQINSYVKNKTQGKIVDLFSGLDSPAILVLVNYIFFKGIPTHPHLKAHPLWPGITAAKIQGTLLGKVFDSVKHIHIWESPSSPQSCWAHGHSPLTWQAPGRRTSMWTRQLW

SEQ ID NO: 36123 - protein, 480 aa, Homo sapiens
VVLSQRLSDSRHPLHLGHRTLWFLSQQPPPLPLWIHCLNTDEDRALSPQLQAPPLTWDSESTMPSSVSWGILLLAGLCCLVPVSLAEDPQGDAAQKTDTSHHDQDHPTFNKITPNLAEFAFSLYRQLAHQSNSTNIFFSPVSIATAFAMLSLGTKADTHDEILEGLNFNLTEIPEAQIHEGFQELLRTLNQPDSQLQLTTGNGLFLSEGLKLVDKFLEDVKKLYHSEAFTVNFGDTEEAKKQINDYVEKGTQGKIVDLVKELDRDTVFALVNYIFFKGKWERPFEVKDTEEEDFHVDQVTTVKVPMMKRLGMFNIQHCKKLSSWVLLMKYLGNATAIFFLPDEGKLQHLENELTHDIITKFLENEDRRSASLHLPKLSITGTYDLKSVLGQLGITKVFSNGADLSGVTEEAPLKLSKAVHKAVLTIDEKGTEAAGAMFLEAIPMSIPPEVKFNKPFVFLMIEQNTKSPLFMGKVVNPTQK

SEQ ID NO: 36124 - protein, 429 aa, Homo sapiens
LLLLLTQFHRTMPSSVSWGILLLAGLCCLVPVSLAEDPQGDAAQKTDTSHHDQDHPTFNKITPNLAEFAFSLYRQLAHQSNSTNIFFSPVSIATAFAMLSLGTKADTHDEILEGLNFNLTEIPEAQIHEGFQELLRTLNQPDSQLQLTTGNGLFLSEGLKLVDKFLEDVKKLYHSEAFTVNFGDTEEAKKQINDYVEKGTQGKIVDLVKELDRDTVFALVNYIFFKGKWERPFEVKDTEEEDFHVDQVTTVKVPMMKRLGMFNIQHCKKLSSWVLLMKYLGNATAIFFLPDEGKLQHLENELTHDIITKFLENEDRRSASLHLPKLSITGTYDLKSVLGQLGITKVFSNGADLSGVTEEAPLKLSKAVHKAVLTIDEKGTEAAGAMFLEAIPMSIPPEVKFNKPFVFLMIEQNTKSPLFMGKVVNPTQK

SEQ ID NO: 36125 - protein, 510 aa, Homo sapiens
LNQEGGGGRASEEGLAAAAARNSRLEGRQPPASLQATLLCLPEETELEESLRRAGKQPPPLPLWIHCLNTDEDRALSPQLQAPPLTWDSESTMPSSVSWGILLLAGLCCLVPVSLAEDPQGDAAQKTDTSHHDQDHPTFNKITPNLAEFAFSLYRQLAHQSNSTNIFFSPVSIATAFAMLSLGTKADTHDEILEGLNFNLTEIPEAQIHEGFQELLRTLNQPDSQLQLTTGNGLFLSEGLKLVDKFLEDVKKLYHSEAFTVNFGDTEEAKKQINDYVEKGTQGKIVDLVKELDRDTVFALVNYIFFKGKWERPFEVKDTEEEDFHVDQVTTVKVPMMKRLGMFNIQHCKKLSSWVLLMKYLGNATAIFFLPDEGKLQHLENELTHDIITKFLENEDRRSASLHLPKLSITGTYDLKSVLGQLGITKVFSNGADLSGVTEEAPLKLSKAVHKAVLTIDEKGTEAAGAMFLEAIPMSIPPEVKFNKPFVFLMIEQNTKSPLFMGKVVNPTQK

SEQ ID NO: 36126 - protein, 520 aa, Homo sapiens
LPPRSNPQSPELNQEGGGGRASEEGLAAAAARNSRLEGRQPPASLQATLLCLPEETELEESLRRAGKPPPLPLWIHCLNTDEDRALSPQLQAPPLTWDSESTMPSSVSWGILLLAGLCCLVPVSLAEDPQGDAAQKTDTSHHDQDHPTFNKITPNLAEFAFSLYRQLAHQSNSTNIFFSPVSIATAFAMLSLGTKADTHDEILEGLNFNLTEIPEAQIHEGFQELLRTLNQPDSQLQLTTGNGLFLSEGLKLVDKFLEDVKKLYHSEAFTVNFGDTEEAKKQINDYVEKGTQGKIVDLVKELDRDTVFALVNYIFFKGKWERPFEVKDTEEEDFHVDQVTTVKVPMMKRLGMFNIQHCKKLSSWVLLMKYLGNATAIFFLPDEGKLQHLENELTHDIITKFLENEDRRSASLHLPKLSITGTYDLKSVLGQLGITKVFSNGADLSGVTEEAPLKLSKAVHKAVLTIDEKGTEAAGAMFLEAIPMSIPPEVKFNKPFVFLMIEQNTKSPLFMGKVVNPTQK

SEQ ID NO: 36127 - protein, 37 aa, Homo sapiens
MTPFAASPVAPLDPLLKYGRGQGPVSSASGTTTDLGQ

SEQ ID NO: 36128 - protein, 294 aa, Homo sapiens
LGKDLTLKMGSALFVKKELQLQANFLGNVKRLYEAEVFSTDFSNPSIAQARINSHVKKKTQGKVVDIIQGLDLLTAMVLVNHIFFKAKWEKPFHPEYTRKNFPFLVGEQVTVHVPMMHQKEQFAFGVDTELNCFVLQMDYKGDAVAFFVLPSKGKMRQLEQALSARTLRKWSHSLQKRWIEVFIPRFSISASYNLETILPKMGIQNVFDKNADFSGIAKRDSLQVSKATHKAVLDVSEEGTEATAATTTKFIVRSKDGPSYFTVSFNRTFLMMITNKATDGILFLGKVENPTKS

SEQ ID NO: 36129 - protein, 448 aa, Homo sapiens
MKIHYSRQTALESTSYIQLPEAELRMERMLPLLALGLLAAGFCPAVLCHPNSPLDEENLTQENQDRGTHVDLGLASANVDFAFSLYKQLVLKAPDKNVIFSPLSISTALAFLSLGAHNTTLTEILKGLKFNLTETSEAEIHQSFQHLLRTLNQSSDELQLSMGNAMFVKEQLSLLDRFTEDAKRLYGSEAFATDFQDSAAAKKLINDYVKNGTRGKITDLIKDLDSQTMMVLVNYIFFKAKWEMPFDPQDTHQSRFYLSKKKWVMVPMMSLHHLTIPYFRDEELSCTVVELKYTGNASALFILPDQDKMEEVEAMLLPETLKRWRDSLEFREIGELYLPKFSISRDYNLNDILLQLGIEEAFTSKADLSGITGARNLAVSQVVHKAVLDVFEEGTEASAATAVKITLLSALVETRTIVRFNRPFLMIIVPTDTQNIFFMSKVTNPKQA

SEQ ID NO: 36130 - protein, 231 aa, Homo sapiens
LESTSYIQLPEAELRMERMLPLLALGLLAAGFCPAVLCHPNSPLDEENLTQENQDRGTHVDLGLASANVDFAFSLYKQLVLKAPDKNVIFSPLSISTALAFLSLGAHNTTLTEILKGLKFNLTETSEAEIHQSFQHLLRTLNQSSDELQLSMGNAMFVKEQLSLLDRFTEDAKRLYGSEAFATDFQDSAAAKKLINDYVKNGTRGKITDLIKDLDSQTMMVLVNYIFFKER

SEQ ID NO: 36131 - protein, 254 aa, Homo sapiens
LPSYFSKPKQGPSYEGLWALPLLRKQGRAGRPLHSHLLQLLAPPSAKWEMPFDPQDTHQSRFYLSKKKWVMVPMMSLHHLTIPYFRDEELSCTVVELKYTGNASALFILPDQDKMEEVEAMLLPETLKRWRDSLEFREIGELYLPKFSISRDYNLNDILLQLGIEEAFTSKADLSGITGARNLAVSQVVHKAVLDVFEEGTEASAATAVKITLLSALVETRTIVRFNRPFLMIIVPTDTQNIFFMSKVTNPKQA

SEQ ID NO: 36132 - protein, 47 aa, Homo sapiens
LPKFSISRDYNLNDILLQLGIEEAFTSKADLSGITGARNLAVSQVSL

SEQ ID NO: 36133 - protein, 35 aa, Homo sapiens
LLQKRRGFTMLAMMVSISDLVIRPPWPPKVLGLRA

SEQ ID NO: 36134 - protein, 96 aa, Homo sapiens
MSRETWCPKLGPIVRNEKQIQSSVGVQRRQSKPHQAHCLLCSPLYLPVLDNIQLFTSLVIDFLPSTQFYSLLYPQCLGRCLERDSLIPGKSEEQAT

SEQ ID NO: 36135 - protein, 141 aa, Homo sapiens
MEPRVTQRKRPLDGCMGKITGITSDILKYDHKCFKLSLPAKFPEVCGSDEVFPDPDLLHVLPVAGSLQQSIDQCCLQLESLCRPGLLCAHPTLLFKLHSSMKNRPFFSLIYTYVKKTQQVRKRDRKPRGQVAAGPNPTSVM

SEQ ID NO: 36136 - protein, 31 aa, Homo sapiens
LLLSLARASSRAKTMKWTMIYEALSEQMSCK

SEQ ID NO: 36137 - protein, 91 aa, Homo sapiens
LFRVGLVESKIRILVGSLEKNEFITLAHVNPQSFPAPKENPDKEEFRTMWVIGLVFKKTENSENLSVDLTYDIQSFTDTAFNRRCQIDSSQ

SEQ ID NO: 36138 - protein, 76 aa, Homo sapiens [sequence omitted]

SEQ ID NO: 36139 - protein, 10 aa, Homo sapiens
MAAVGKERRR

SEQ ID NO: 36140 - protein, 20 aa, Homo sapiens
MANRRYPLAESLFPDSASLR

SEQ ID NO: 36141 - protein, 160 aa, Homo sapiens
LSLQWEPEIIAVAVMYLAGRLCKFEIQEWTSKPMYRRWWEQFVQDVPVDVLEDICHQILDLYSQGKQQMPHHTPHQLQQPPSLQPTPQVPQVQQSQPSQSSEPSQPQQKDPQQPAQQQQPAQQPKKPSPQPSSPRQVKRAVVSGLKQALGRAGFPGGGNT

SEQ ID NO: 36142 - protein, 64 aa, Homo sapiens
VVLTPRGRGQPAFRVASSVPLQSDCVHLVQLMSESPALGYFILVRTLTSHIGSINSFGKELISF

SEQ ID NO: 36143 - protein, 67 aa, Homo sapiens
LSPARAPTGPFSPRMKPAGSVNDMALDAFDLDRMKQEILEEVVRELHKVKEEIIDAIRQELSGISTT

SEQ ID NO: 36144 - protein, 13 aa, Homo sapiens
LCVFLFCVCLTAR

SEQ ID NO: 36145 - protein, 233 aa, Homo sapiens
MLVSLKMSYKAAAGEDYKADCPPGNPAPTSNHGPDATEAEEDFVDPWTVQTSSAKGIDYDKLIVRFGSSKIDKELINRIERATGQRPHHFLRRGIFFSHRDMNQVLDAYENKKPFYLYTGRGPSSEAMHVGHLIPFIFTKWLQDVFNVPLVIQMTDDEKYLWKDLTLDQAYSYAVENAKDIIACGFDINKTFIFSDLDYMGNLKYGLSHSMMASQIFILSCARKSCLAVSCQG

SEQ ID NO: 36146 - protein, 181 aa, Homo sapiens
MPNSEPASLLELFNSIATQGELVRSLKAGNASKDEIDSAVKMLVSLKMSYKAAAGEDYKADCPPGNPAPTSNHGPDATEAEEDFVDPWTVQTSSAKGIDYDKLIVRFGSSKIDKELINRIERATGQRPHHFLRRGIFFSHRDMNQVLDAYENKKPFYLYTGRGPSSEAMHVGHLIPFIFTK

SEQ ID NO: 36147 - protein, 7 aa, Homo sapiens
MEAGFLP

SEQ ID NO: 36148 - protein, 41 aa, Homo sapiens
LYTTVQSRETKKLKMKEREEAWVKIENLAKANPQVLKKRIT

SEQ ID NO: 36149 - protein, 18 aa, Homo sapiens
LFILYQTDFKSTTLKINR

SEQ ID NO: 36150 - protein, 4654 aa, Homo sapiens
LEGPERDTMSEPGGGGGEDGSAGLEVSAVQNVADVSVLQKHLRKLVPLLLEDGGEAPAALEAALEEKSALEQMRKFLSDPQVHTVLVERSTLKEDVGDEGEEEKEFISYNINIDIHYGVKSNSLAFIKRTPVIDADKPVSSQLRVLTLSEDSPYETLHSFISNAVAPFFKSYIRESGKADRDGDKMAPSVEKKIAELEMGLLHLQQNIEIPEISLPIHPMITNVAKQCYERGEKPKVTDFGDKVEDPTFLNQLQSGVNRWIREIQKVTKLDRDPASGTALQEISFWLNLERALYRIQEKRESPEVLLTLDILKHGKRFHATVSFDTDTGLKQALETVNDYNPLMKDFPLNDLLSATELDKIRQALVAIFTHLRKIRNTKYPIQRALRLVEAISRDLSSQLLKVLGTRKLMHVAYEEFEKVMVACFEVFQTWDDEYEKLQVLLRDIVKRKREENLKMVWRINPAHRKLQARLDQMRKFRRQHEQLRAVIVRVLRPQVTAVAQQNQGEVPEPQDMKVAEVLFDAADANAIEEVNLAYENVKEVDGLDVSKEGTEAWEAAMKRYDERIDRVETRITARLRDQLGTAKNANEMFRIFSRFNALFVRPHIRGAIREYQTQLIQRVKDDIESLHDKFKVQYPQSQACKMSHVRDLPPVSGSIIWAKQIDRQLTAYMKRVEDVLGKGWENHVEGQKLKQDGDSFRMKLNTQEIFDDWARKVQQRNLGVSGRIFTIESTRVRGRTGNVLKLKVNFLPEIITLSKEVRNLKWLGFRVPLAIVNKAHQANQLYPFAISLIESVRTYERTCEKVEERNTISLLVAGLKKEVQALIAEGIALVWESYKLDPYVQRLAETVFNFQEKVDDLLIIEEKIDLEVRSLETCMYDHKTFSEILNRVQKAVDDLNLHSYSNLPIWVNKLDMEIERILGVRLQAGLRAWTQVLLGQAEDKAEVDMDTDAPQVSHKPGGEPKIKNVVHELRITNQVIYLNPPIEECRYKLYQEMFAWKMVVLSLPRIQSQRYQVGVHYELTEEEKFYRNALTRMPDGPVALEESYSAVMGIVSEVEQYVKVWLQYQCLWDMQAENIYNRLGEDLNKWQALLVQIRKARGTFDNAETKKEFGPVVIDYGKVQSKVNLKYDSWHKEVLSKFGQMLGSNMTEFHSQISKSRQELEQHSVDTASTSDAVTFITYVQSLKRKIKQFEKQVELYRNGQRLLEKQRFQFPPSWLYIDNIEGEWGAFNDIMRRKDSAIQQQVANLQMKIVQEDRAVESRTTDLLTDWEKTKPVTGNLRPEEALQALTIYEGKFGRLKDDREKCAKAKEALELTDTGLLSGSEERVQVALEELQDLKGVWSELSKVWEQIDQMKEQPWVSVQPRKLRQNLDALLNQLKSFPARLRQYASYEFVQRLLKGYMKINMLVIELKSEALKDRHWKQLMKRLHVNWVVSELTLGQIWDVDLQKNEAIVKDVLLVAQGEMALEEFLKQIREVWNTYELDLVNYQNKCRLIRGWDDLFNKVKEHINSVSAMKLSPYYKVFEEDALSWEDKLNRIMALFDVWIDVQRRWVYLEGIFTGSADIKHLLPVETQRFQSISTEFLALMKKVSKSPLVMDVLNIQGVQRSLERLADLLGKIQKALGEYLERERSSFPRFYFVGDEDLLEIIGNSKNVAKLQKHFKKMFAGVSSIILNEDNSVVLGISSREGEEVMFKTPVSITEHPKINEWLTLVEKEMRVTLAKLLAESVTEVEIFGKATSIDPNTYITWIDKYQAQLVVLSAQIAWSENVETALSSMGGGGDAAPLHSVLSNVEVTLNVLADSVLMEQPPLRRRKLEHLITELVHQRDVTRSLIKSKIDNAKSFEWLSQMRFYFDPKQTDVLQQLSIQMANAKFNYGFEYLGVQDKLVQTPLTDRCYLTMTQALEARLGGSPFGPAGTGKTESVKALGHQLGRFVLVFNCDETFDFQAMGRIFVGLCQVGAWGCFDEFNRLEERMLSAVSQQVQCIQEALREHSNPNYDKTSAPITCELLNKQVKVSPDMAIFITMNPGYAGRSNLPDNLKKLFRSLAMTKPDRQLIAQVMLYSQGFRTAEVLANKIVPFFKLCDEQLSSQSHYDFGLRALKSVLVSAGNVKRERIQKIKREKEERGEAVDEGEIAENLPEQEILIQSVCETMVPKLVAEDIPLLFSLLSDVFPGVQYHRGEMTALREELKKVCQEMYLTYGDGEEVGGMWVEKVLQLYQITQINHGLMMVGPSGSGKSMAWRVLLKALERLEGVEGVAHIIDPKAISKDHLYGTLDPNTREWTDGLFTHVLRKIIDSVRGELQKRQWIVFDGDVDPEWVENLNSVLDDNKLLTLPNGERLSLPPNVRIMFEVQDLKYATLATVSRCGMVWFSEDVLSTDMIFNNFLARLRSIPLDEGEDEAQRRRKGKEDEGEEAASPMLQIQRDAATIMQPYFTSNGLVTKALEHAFQLEHIMDLTRLRCLGSLFSMLHQACRNVAQYNANHPDFPMQIEQLERYIQRYLVYAILWSLSGDSRLKMRAELGEYIRRITTVPLPTAPNIPIIDYEVSISGEWSPWQAKVPQIEVETHKVAAPDVVVPTLDTVRHEALLYTWLAEHKPLVLCGPPGSGKTMTLFSALRALPDMEVVGLNFSSATTPELLLKTFDHYCEYRRTPNGVVLAPVQLGKWLVLFCDEINLPDMDKYGTQRVISFIRQMVEHGGFYRTSDQTWVKLERIQFVGACNPPTDPGRKPLSHRFLRHVPVVYVDYPGPASLTQIYGTFNRAMLRLIPSLRTYAEPLTAAMVEFYTMSQERFTQDTQPHYIYSPREMTRWVRGIFEALRPLETLPVEGLIRIWAHEALRLFQDRLVEDEERRWTDENIDTVALKHFPNIDREKAMSRPILYSNWLSKDYIPVDQEELRDYVKARLKVFYEEELDVPLVLFNEVLDHVLRIDRIFRQPQGHLLLIGVSGAGKTTLSRFVAWMNGLSVYQIKVHRKYTGEDFDEDLRTVLRRSGCKNEKIAFIMDESNVLDSGFLERMNTLLANGEVPGLFEGDEYATLMTQCKEGAQKEGLMLDSHEELYKWFTSQVIRNLHVVFTMNPSSEGLKDRAATSPALFNRCVLNWFGDWSTEALYQVGKEFTSKMDLEKPNYIVPDYMPVVYDKLPQPPSHREAIVNSCVFVHQTLHQANARLAKRGGRTMAITPRHYLDFINHYANLFHEKRSELEEQQMHLNVGLRKIKETVDQVEELRRDLRIKSQELEVKNAAANDKLKKMVKDQQEAEKKKVMSQEIQEQLHKQQEVIADKQMSVKEDLDKVEPAVIEAQNAVKSIKKQHLVEVRSMANPPAAVKLALESICLLLGESTTDWKQIRSIIMRENFIPTIVNFSAEEISDAIREKMKKNYMSNPSYNYEIVNRASLACGPMVKWAIAQLNYADMLKRVEPLRNELQKLEDDAKDNQQKANEVEQMIRDLEASIARYKEEYAVLISEAQAIKADLAAVEAKVNRSTALLKSLSAERERWEKTSETFKNQMSTIAGDCLLSAAFIAYAGYFDQQMRQNLFTTWSHHLQQANIQFRTDIARTEYLSNADERLRWQASSLPADDLCTENAIMLKRFNRYPLIIDPSGQATEFIMNEYKDRKITRTSFLDDAFRKNLESALRFGNPLLVQDVESYDPVLNPVLNREVRRTGGRVLITLGDQDIDLSPSFVIFLSTRDPTVEFPPDLCSRVTFVNFTVTRSSLQSQCLNEVLKAERPDVDEKRSDLLKLQGEFQLRLRQLEKSLLQALNEVKGRILDDDTIITTLENLKREAAEVTRKVEETDIVMQEVETVSQQYLPLSTACSSIYFTMESLKQIHFLYQYSLQFFLDIYHNVLYENPNLKGVTDHTQRLSIITKDLFQVAFNRVARGMLHQDHITFAMLLARIKLKGTVGEPTYDAEFQHFLRGNEIVLSAGSTPRIQGLTVEQAEAVVRLSCLPAFKDLIAKVQADEQFGIWLDSSSPEQTVPYLWSEETPATPIGQAIHRLLLIQAFRPDRLLAMAHMFVSTNLGESFMSIMEQPLDLTHIVGTEVKPNTPVLMCSVPGYDASGHVEDLAAEQNTQITSIAIGSAEGFNQADKAINTAVKSGRWVMLKNVHLAPGWLMQLEKKLHSLQPHACFRLFLTMEINPKVPVNLLRAGRIFVFEPPPGVKANMLRTFSSIPVSRICKSPNERARLYFLLAWFHAIIQERLRYAPLGWSKKYEFGESDLRSACDTVDTWLDDTAKGRQNISPDKIPWSALKTLMAQSIYGGRVDNEFDQRLLNTFLERLFTTRSFDSEFKLACKVDGHKDIQMPDGIRREEFVQWVELLPDTQTPSWLGLPNNAERVLLTTQGVDMISKMLKMQMLEDEDDLAYAETEKKTRTDSTSDGRPAWMRTLHTTASNWLHLIPQTLSHLKRTVENIKDPLFRFFEREVKMGAKLLQDVRQDLADVVQVCEGKKKQTNYLRTLINELVKGILPRSWSHYTVPAGMTVIQWVSDFSERIKQLQNISLAAASGGAKELKNIHVCLGGLFVPEAYITATRQYVAQANSWSLEELCLEVNVTTSQGATLDACSFGVTGLKLQGATCNNNKLSLSNAISTALPLTQLRWVKQTNTEKKASVVTLPVYLNFTRADLIFTVDFEIATKEDPRSFYERGVAVLCTE

SEQ ID NO: 36151 - protein, 112 aa, Homo sapiens
LRLFQDRLVEDEERRWTDENIDTVALKHFPNIDREKAMSRPILYSNWLSKDYIPVDQEELRDYVKARLKVFYEEELDVPLVLFNEVLDHVLRIDRSIGSTQGKTLMKIYGQC

SEQ ID NO: 36152 - protein, 413 aa, Homo sapiens
MGRGTKVILHLKEDQTEYLEERRIKEIVKKHSQFIGYPITLFVEKERDKEVSDDEAEEKEDKEEEKEKEEKESEDKPEIEDVGSDEEEEKKDGDKKKKKKIKEKYIDQEELNKTKPIWTRNPDDITNEEYGEFYKSLTNDWEDHLAVKHFSVEGQLEFRALLFVPRRAPFDLFENRKKKNNIKLYVRRVFIMDNCEELIPEYLNFIRGVVDSEDLPLNISREMLQQSKILKVIRKNLVKKCLELFTELAEDKENYKKFYEQFSKNIKLGIHEDSQNRKKLSELLRYYTSASGDEMVSLKDYCTRMKENQKHIYYITGETKDQVANSAFVERLRKHGLEVIYMIEPIDEYCVQQLKEFEGKTLVSVTKEGLELPEDEEEKKKQEEKKTKFENLCKIMKDILEKKVEKVCEYSIS

SEQ ID NO: 36153 - protein, 136 aa, Homo sapiens
LMTNIPCEQAQRGDVCMNFCVCPDDHMQVPGSMPKHRADIAPQNGPGGRRQEDAMLAQVTHPASDRSQVTVSAWLQMSTSSHQQRLCTFSVEKCQLCPSVPSPSHLPCGILAWCSPVSPAGRVTPVSQFWAGTPTV

SEQ ID NO: 36154 - protein, 57 aa, Homo sapiens
LRVVPRSLGVPGLLCGTLYVSLCPSCADVITQTPCTLFSYQSTGQRSDQCIGLVRLR

SEQ ID NO: 36155 - protein, 51 aa, Homo sapiens [sequence omitted]

SEQ ID NO: 36156 - protein, 15 aa, Homo sapiens
MKDPGLGLKVAQLRR

SEQ ID NO: 36157 - protein, 107 aa, Homo sapiens [sequence omitted]

SEQ ID NO: 36158 - protein, 40 aa, Homo sapiens
LLIYSMFLFEKLVVDTFGSHLYSYKNKGLILVVLQMFGSE

SEQ ID NO: 36159 - protein, 77 aa, Homo sapiens
LRCRGAAAAAAASRAEAEAASSLEREKQSGAGASSAARSMVGAHSPRRPVLRSTSFTSSSASSFSGAAGGAVWRPAS

SEQ ID NO: 36160 - protein, 265 aa, Homo sapiens
LDARRSGRVGPSDVPRGGARGRAGPRCGLEGRAREPSVLSAPLAALSSLDGDLAGRYYALKSMTEAEQQQLIDDHFLFDKPVSPLLLASGMARDWPDARGIWHNDNKTFLVWVNEEDHLRVISMQKGGNMKEVFTRFCTGLTQIETLFKSKDYEFMWNPHLGYILTCPSNLGTGLRAGVHIKLPNLGKHEKFSEVLKRLRLQKRGTGGVDTAAVGGVFDVSNADRLGFSEVELVQMVVDGVKLLIEMEQRLEQGQAIDDLMPAQK

SEQ ID NO: 36161 - protein, 420 aa, Homo sapiens
LCPLRAAGARSGRCSPASLRELPTDGAPPPPPGRPPAAAMPFSNSHNALKLRFPAEDEFPDLSAHNNHMAKVLTPELYAELRAKSTPSGFTLDDVIQTGVDNPGHPYIMTVGCVAGDEESYEVFKDLFDPIIEDRHGGYKPSDEHKTDLNPDNLQGGDDLDPNYVLSSRVRTGRSIRGFCLPPHCSRGERRAIEKLAVEALSSLDGDLAGRYYALKSMTEAEQQQLIDDHFLFDKPVSPLLLASGMARDWPDARGIWHNDNKTFLVWVNEEDHLRVISMQKGGNMKEVFTRFCTGLTQIETLFKSKDYEFMWNPHLGYILTCPSNLGTGLRAGVHIKLPNLGKHEKFSEVLKRLRLQKRGTGGVDTAAVGGVFDVSNADRLGFSEVELVQMVVDGVKLLIEMEQRLEQGQAIDDLMPAQK

SEQ ID NO: 36162 - protein, 309 aa, Homo sapiens
VWSPGSRSVAGPWPLPDISTMSFVAYEELIKEGDTAILSLGHGAMVAVRVQRGAQTQTRHGVLRHSVDLIGRPFGSKVTCGRGGWVYVLHPTPELWTLNLPHRTQILYSTDIALITMMLELRPGSVVCESGTGSGSVSHAIIRTIAPTGHLHTVEFHQQRAEKAREEFQEHRVGRWVTVRTQDVCRSGFGVSHVADAVFLDIPSPWEAVGHAWDALKVEGGRFCSFSPCIEQVQRTCQALAARGFSELSTLEVLPQVYNVRTVSLPPPDLGTGTDGPAGSDTSPFRSGTPMKEAVGHTGYLTFATKTPG

SEQ ID NO: 36163 - protein, 72 aa, Homo sapiens
LVSRFCPPRKSCHDWIGPPDKYSNLRPVHFYIPENESPLEQKLRKLRQETQEWNQQFWANQNLTFSKVRKQH

SEQ ID NO: 36164 - protein, 158 aa, Homo sapiens
MHAEEREECKGKQKDGTSFGEYGGWYKACKVDSPTVTTTLKNLGALYRRQGKFEAAETLEEAAMRSRKQGLDNVHKQRVAEVLNDPENMEKRRSRESLNVDVVKYESGPDGGEEVSMSVEWNGVSTVHSGHVLREAPPSGACQAFLLSHVLDLLLFSN

SEQ ID NO: 36165 - protein, 224 aa, Homo sapiens
LLCQATAMSRVGWTWQPLPLHRVEFPYLPLVRGLLPNVPSFLLRLFYFITSPSQDDVYKLSTDSSQHCCPSCRDGSQPLLPASWLQDGLHWPPVSGPCSLQGPAIGPSSKPSQCLQGSQQPGSGQGSEVTCLSWVPSRPWPGGAPVPLVRAVFPSGARGNQHSYLTRAAAWRAGRILLRAVVSWGSWSGAHSPEEVLATRLGLLFPTPSSWARLTDGVQAPSYI

SEQ ID NO: 36166 - protein, 80 aa, Homo sapiens
VEKKQALFSRLLLCSQGATFLVTFGNSEKPETMTCRLSNNQRYLFLDGDSHYEIEIVHISTVQILTEGFPPGGKCQHVLS

SEQ ID NO: 36167 - protein, 77 aa, Homo sapiens
LYFFFFFVETVFRHVAQGGLELLGSSDLPTFSLLKCWDHRCEPPCLAAQHSRAVPPSSGAARMSHSSEGHTAPCFHS

SEQ ID NO: 36168 - protein, 105 aa, Homo sapiens
VKRGTKNILLDATHRKPRAGLALTLGTLDTELVMSHLALRAGAASRRPDVESTQLSPSYRHTGTSAPSQQTPRLMKLALDFHFNWKIWPRWRTPSLSKRWHGPPT

SEQ ID NO: 36169 - protein, 469 aa, Homo sapiens
LAGPAQRKSQASMSGTRASNDRPPGAGGVKRGRLQQEAAATGSRVTVVLGAQWGDEGKGKVVDLLATDADIISRCQGGNNAGHTVVVDGKEYDFHLLPSGIINTKAVSFIGNGVVIHLPGLFEEAEKNEKKGLKDWEKRLIISDRAHLVFDFHQAVDGLQEVQRQAQEGKNIGTTKKGIGPTYSSKAARTGLRICDLLSDFDEFSSRFKNLAHQHQSMFPTLEIDIEGQLKRLKGFAERIRPMVRDGVYFMYEALHGPPKKILVEGANAALLDIDFGTYPFVTSSNCTVGGVCTGLGIPPQNIGDVYGVVKAYTTRVGIGAFPTEQINEIGGLLQTRGHEWGVTTGRKRRCGWLDLMILRYAHMVNGFTALALTKLDILDVLGEVKVGVSYKLNGKRIPYFPANQEMLQKVEVEYETLPGWKADTTGARRWEDLPPQAQNYIRFVENHVGVAVKWVGVGKSRESMIQLF

SEQ ID NO: 36170 - protein, 84 aa, Homo sapiens
LVIGGLWAPLISCVLPPANQEMLQKVEVEYETLPGWKADTTGARRWEDLPPQAQNYIRFVENHVGVAVKWVGVGKSRESMIQLF

SEQ ID NO: 36171 - protein, 130 aa, Homo sapiens [sequence omitted]

SEQ ID NO: 36172 - protein, 142 aa, Homo sapiens
LQPHLTSCREEWTTAIQTVADGLKKQEEEEMDFRSGSPSDNSGAEEMEVSLAKPKHRVVRPVPTSACAWGCLGLWRAGWVMGSQLGPGDTQHSTASPPRPVFHVGRSCFPGGSSSPCQRKTGVAEPCQAWAMLPHPSLNPML

SEQ ID NO: 36173 - protein, 628 aa, Homo sapiens
LRQVCRCGCGEPGAGKTPTLGGGFHVNLGKESRAQTLQNGRRHIHHLGNQLQLNQHCLDTAFNFFKMAVSRHLTRGRKMAHVIAACLYLVCRTEGTPHMLLDLSDLLQVNVYVLGKTFLLLARELCINAPAIDPCLYIPRFAHLLEFGEKNHEVSMTALRLLQRMKRDWMHTGRRPSGLCGAALLVAARMHDFRRTVKEVISVVKVCESTLRKRLTEFEDTPTSQLTIDEFMKIDLEEECDPPSYTAGQRKLRMKQLEQVLSKKLEEVEGEISSYQDAIEIELENSRPKAKGGLASLAKDGSTEDTASSLCGEEDTEDEELEAAASHLNKDLYRELLGGAPGSSEAAGSPEWGGRPPALGSLLDPLPTAASLGISDSIRECISSQSSDPKDASGDGELDLSGIDDLEIDRYILNESEARVKAELWMRENAEYLREQREKEARIAKEKELGIYKEHKPKKSCKRREPIQASTAREAIEKMLEQKKISSKINYSVLRGLSSAGGGSPHREDAQPEHSASARKLSRRRTPASRSGADPVTSVGKRLRPLVSTQPAKKVATGEALLPSSPTLGAEPARPQAVLVESGPVSYHADEEADEEEPDEEDGEPCVSALQMMGSNDYGCDGDEDDGY

SEQ ID NO: 36174 - protein, 650 aa, Homo sapiens
LRQVCRCGCGEPGAGKTPTLGGGFHVNLGKESRAQTLQNGRRHIHHLGNQLQLNQHCLDTAFNFFKMAVSRHLTRGRKMAHVIAACLYLVCRTEGTPHMLLDLSDLLQVNVYVLGKTFLLLARELCINAPAIDPCLYIPRFAHLLEFGEKNHEVSMTALRLLQRMKRDWMHTGRRPSGLCGAALLVAARMHDFRRTVKEVISVVKVCESTLRKRLTEFEDTPTSQLTIDEFMKIDLEEECDPPSYTAGQRKLRMKQLEQVLSKKLEEVEGEISSYQDAIEIELENSRPKAKGGLASLAKDGSTEDTASSLCGEEDTEDEELEAAASHLNKDLYRELLGGAPGSSEAAGSPEWGGRPPALGSLLDPLPTAASLGISDSIRECISSQSSDPKDASGDGELDLSGIDDLEIDRRDLSMPRCAKAKSQPHFPVLAQYILNESEARVKAELWMRENAEYLREQREKEARIAKEKELGIYKEHKPKKSCKRREPIQASTAREAIEKMLEQKKISSKINYSVLRGLSSAGGGSPHREDAQPEHSASARKLSRRRTPASRSGADPVTSVGKRLRPLVSTQPAKKVATGEALLPSSPTLGAEPARPQAVLVESGPVSYHADEEADEEEPDEEDGEPCVSALQMMGSNDYGCDGDEDDGY

SEQ ID NO: 36175 - protein, 67 aa, Homo sapiens
LGLILGGAWHGALALLMRRPDFRGRVTWPGPHSWCMPSSRADEAPEAWLSGGFLPEDTHATSWTARL

SEQ ID NO: 36176 - protein, 719 aa, Homo sapiens
MAANMYRVGDYVYFENSSSNPYLIRRIEELNKTANGNVEAKVVCFYRRRDISSTLIALADKHATLSVCYKAGPGADNGEEGEIEEEMENPEMVDLPEKLKHQLRHRELFLSRQLESLPATHIRGKCSVTLLNETESLKSYLEREDFFFYSLVYDPQQKTLLADKGEIRVGNRYQADITDLLKEGEEDGRDQSRLETQVWEAHNPLTDKQIDQFLVVARSVGTFARALDCSSSVRQPSLHMSAAAASRDITLFHAMDTLHKNIYDISKAISALVPQGGPVLCRDEMEEWSASEANLFEEALEKYGKDFTDIQQDFLPWKSLTSIIEYYYMWKTTDRYVQQKRLKAAEAESKLKQVYIPNYNKPNPNQISVNNVKAGVVNGTGAPGQSPGAGRACESCYTTQSYQWYSWGPPNMQCRLCASCWTYWKKYGGLKMPTRLDGERPGPNRSNMSPHGLPARSSGSPKFAMKTRQAFYLHTTKLTRIARRLCREILRPWHAARHPYLPINSAAIKAECTARLPEASQSPLVLKQAVRKPLEAVLRYLETHPRPPKPDPVKSVSSVLSSLTPAKVAPVINNGSPTILGKRSYEQHNGVDGNMKKRLLMPSRGTYLGLANHGQARHMGPSRNLLLNGKSYPTKVRLIRGGSLPPVKRRRMNWIDAPDDVFYMATEETRKIRKLLSSSETKRAARRPYKPIALRQSQALPPRPPPPAPVNDEPIVIED

SEQ ID NO: 36177 - protein, 280 aa, Homo sapiens
MASKCPKCDKTVYFAEKVSSLGKDWHKFCLKCERCSKTLTPGGHAEHDGKPFCHKPCYATLFGPKGVNIGGAGSYIYEKPLAEGPQVTGPIEVPAARAEERKASGPPKGPSRASSVTTFTGEPNTCPRCSKKVYFAEKVTSLGKDWHRPCLRCERCGKTLTPGGHAEVRGVQRGLGAGQGRGVGGMRVRGAPRGDGGWCFWELRCPLPHGEPACTFWKPPGDGSGESVDSSLSTHLLPQHDGQPYCHKPCYGILFGPKGVNTGAVGSYIYDRDPEGKVQP

SEQ ID NO: 36178 - protein, 240 aa, Homo sapiens
LAHVPELARAQCWQPWAAAATADSHRDFLAAAGTRLPTVQPAPACPAEKVSSLGKDWHKFCLKCERCSKTLTPGGHAEHDGKPFCHKPCYATLFGPKGVNIGGAGSYIYEKPLAEGPQVTGPIEVPAARAEERKASGPPKGPSRASSVTTFTGEPNTCPRCSKKVYFAEKVTSLGKDWHRPCLRCERCGKTLTPGGHAEHDGQPYCHKPCYGILFGPKGVNTGAVGSYIYDRDPEGKVQP

SEQ ID NO: 36179 - protein, 22 aa, Homo sapiens
LLTFSTFSAGFGRGGAESHTFK

SEQ ID NO: 36180 - protein, 104 aa, Homo sapiens
LDLEDPLFGGSSHRCPLPGPAVQSGAEVKKPGASVKVSCKASGYTFTSYAMHWVRQAPGQRLEWMGWTTLAMVTQNIHRVPGQSHHYQGHIREHSLHGAEQPEI

SEQ ID NO: 36181 - protein, 116 aa, Homo sapiens
LLIKTSRAQTLQLWEKSPSPRIPRSFHSVISTEHRGLTMEFGLSWVFLVAIIKGVQCQVQLVESGGGLVKPGGSLRLSCAASGFTFSDYYMSWIRQAPGKGLEWVSYISSSTTQTL

SEQ ID NO: 36182 - protein, 56 aa, Homo sapiens
MGWTCKILFLVAAATGAHSQVQLVQSGAEVKKPGASVKVSCKASGYTFTYCYLHWV

SEQ ID NO: 36183 - protein, 85 aa, Homo sapiens
LVAAATDVHSQVQLLQPGAEVKKPASSVKVSCQASRYTFTKYFTQWVRQGPGQGHSGWDASTLTMITHTTHRSSGAESPLPVTGP

SEQ ID NO: 36184 - protein, 29 aa, Homo sapiens
LRLSCAASGFSFSSYGMSWVRQAPGKGLD

SEQ ID NO: 36185 - protein, 47 aa, Homo sapiens
LVISTEHRGLTMELGLCWVFLVAILEGVQCEVQLVESGGGLVQPGGP

SEQ ID NO: 36186 - protein, 23 aa, Homo sapiens
LSWVFLVAILKGVQCEVQLVESG

SEQ ID NO: 36187 - protein, 15 aa, Homo sapiens
LRLSCVASGFTFSSY

SEQ ID NO: 36188 - protein, 79 aa, Homo sapiens
LLSTMDILCSTLLLLTVPSWVLSQVTLKESGPALVKPTQTLTLTCTFSGFSLSTSGMRVSWIRQPPGKALEWLAPTAHL

SEQ ID NO: 36189 - protein, 56 aa, Homo sapiens
MDWTWSILFLVAAATGAHSQVQLVQSGAEVKKPRASVKVSCKASGYTFTSYYMHWV

SEQ ID NO: 36190 - protein, 24 aa, Homo sapiens
MDWTWRILFLVAAATGAHSQVQLV

SEQ ID NO: 36191 - protein, 9 aa, Homo sapiens
MGSFWLVVT

SEQ ID NO: 36192 - protein, 529 aa, Homo sapiens
MQGLFYRPQGSSKERRTSSKERRAPSKDRMIFAATFCAPKAVSAARAHLPAAWKNLPATPETFAPSSSVFPATSQFQPASLNAFKGPSAASETPKSLPYALQDPFACVEALPAVPWVPQPNMNASKASQAVPTFLMATAAAPQATATTQEASKTSVEPPRRSGKATRKKKHLEAQEDSRGHTLAFHDWQGPRPWENLNLSDWEVQSPIQVSGDWEHPNTPRGLSGWEGPSTSRILSGWEGPSASWALSAWEGPSTSRALGLSESPGSSLPVVVSEVASVSPGSSATQDNSKVEAQPLSPLDERANALVQFLLVKDQAKVPVQRSEMVKVILREYKDECLDIINRANNKLECAFGYQLKEIDTKNHAYIIINKLGYHTGNLVASYLDRPKFGLLMVVLSLIFMKGNCVREDLIFNFLFKLGLDVRETNGLFGNTKKLITEVFVRQKYLEYRRIPYTEPAEYEFLWGPRAFLETSKMLVLRFLAKLHKKDPQSWPFHYLEALAECEWEDTDEDEPDTGDSAHGPTSRPPPR

SEQ ID NO: 36193 - protein, 12 aa, Homo sapiens
LRHQEVVKAILE

SEQ ID NO: 36194 - protein, 38 aa, Homo sapiens
LPNLFYLFIYLFGKTKSLSVTQAGVHWPSQSSLQLFTL

SEQ ID NO: 36195 - protein, 34 aa, Homo sapiens
LGLSMCTLYIYILKIIARLPSKMWLTTLSSNGNE

SEQ ID NO: 36196 - protein, 425 aa, Homo sapiens
VTSLAGSLQPSASPYFTTLSDFGACKKPGMLLDYTLTMYFQQYWRDKRLAYSGIPLNLTLDNRVADQLWVPDTYFLNDKKSFVHGVTVKNRMIRLHPDGTVLYGLRITTTAACMMDLRRYPLDEQNCTLEIESYGYTTDDIEFYWRGGDKAVTGVERIELPQFSIVEHRLVSRNVVFATGAYPRLSLSFRLKRNIGYFILQTYMPSILITILSWVSFWINYDASAARVALGITTVLTMTTINTHLRETLPKIPYVKAIDMYLMGCFVFVFLALLEYAFVNYIFFGRGPQRQKKLAEKTAKAKNDRSKSESNRVDAHGNILLTSLEVHNEMNEVSGGIGDTRNSAISFDNSGIQYRKQSMPREGHGRFLGDRSLPHKKTHLRRRSSQLKIKIPDLTDVNAIDRWSRIVFPFTFSLFNLVYWLYYVN

SEQ ID NO: 36197 - protein, 480 aa, Homo sapiens
VPGRGGGMWGLAGGRLFGIFSAPVLVAVVCCAQSVNDPGNMSFVKETVDKLLKGYDIRLRPDFGGPPVCVGMNIDIASIDMVSEVNMDYTLTMYFQQYWRDKRLAYSGIPLNLTLDNRVADQLWVPDTYFLNDKKSFVHGVTVKNRMIRLHPDGTVLYGLRITTTAACMMDLRRYPLDEQNCTLEIESYGYTTDDIEFYWRGGDKAVTGVERIELPQFSIVEHRLVSRNVVFATGAYPRLSLSFRLKRNIGYFILQTYMPSILITILSWVSFWINYDASAARVALGITTVLTMTTINTHLRETLPKIPYVKAIDMYLMGCFVFVFLALLEYAFVNYIFFGRGPQRQKKLAEKTAKAKNDRSKSESNRVDAHGNILLTSLEVHNEMNEVSGGIGDTRNSAISFDNSGIQYRKQSMPREGHGRFLGDRSLPHKKTHLRRRSSQLKIKIPDLTDVNAIDRWSRIVFPFTFSLFNLVYWLYYVN

SEQ ID NO: 36198 - protein, 550 aa, Homo sapiens
VRRPLPPAAGPVLAVSQVQSEMQQLRRLWVLAAQPFCHLPERCRLFFEIGGISLAMPQCLLWICLAVWEARGDLPFIAENDAVLTVNWNAVKEHRTFYAIYETSVNDPGNMSFVKETVDKLLKGYDIRLRPDFGGPPVCVGMNIDIASIDMVSEVNMDYTLTMYFQQYWRDKRLAYSGIPLNLTLDNRVADQLWVPDTYFLNDKKSFVHGVTVKNRMIRLHPDGTVLYGLRITTTAACMMDLRRYPLDEQNCTLEIESYGYTTDDIEFYWRGGDKAVTGVERIELPQFSIVEHRLVSRNVVFATGAYPRLSLSFRLKRNIGYFILQTYMPSILITILSWVSFWINYDASAARVALGITTVLTMTTINTHLRETLPKIPYVKAIDMYLMGCFVFVFLALLEYAFVNYIFFGRGPQRQKKLAEKTAKAKNDRSKSESNRVDAHGNILLTSLEVHNEMNEVSGGIGDTRNSAISFDNSGIQYRKQSMPREGHGRFLGDRSLPHKKTHLRRRSSQLKIKIPDLTDVNAIDRWSRIVFPFTFSLFNLVYWLYYVN

SEQ ID NO: 36199 - protein, 94 aa, Homo sapiens
VPGRGGGMWGLAGGRLFGIFSAPVLVAVVCCAQSVNDPGNMSFVKETVDKLLKGYDIRLRPDFGGPPVCVGMNIDIASIDMVSEVNMAMQELHS

SEQ ID NO: 36200 - protein, 124 aa, Homo sapiens
MCSGLLELLLPIWLSWTLGTRGSEPRSVNDPGNMSFVKETVDKLLKGYDIRLRPDFGGPPVCVGMNIDIASIDMVSEVNMRFWLQERGTKTVVCAFQGCLCGFSKAASWTGRPGPGTASLCPRC

SEQ ID NO: 36201 - protein, 105 aa, Homo sapiens
LRPELHGTMAPKLLLLLCLFSGLHARSRKVEEDEYEDSSSNQKWVLAPKSQDTDVTLILNKLLREYDKKLRPDIGIKPTVIDVDIYVNSIGPVSSINMVRSSFIF

SEQ ID NO: 36202 - protein, 4868 aa, Homo sapiens
LSQRLLGGCVRAPARRGGRALRVRPETWEEAGEKMPSESFCLAAQARLDSKWLKTDIQLAFTRDGLCGLWNEMVKDGEIVYTGTESTQNGELPPRKDDSVEPSGTKKEDLNDKEKKDEEETPAPIYRAKSILDSWVWGKQPDVNELKECLSVLVKEQQALAVQSATTTLSALRLKQRLVILERYFIALNRTVFQENVKVKWKSSGISLPPVDKKSSRPAGKGVEGLARVGSRAALSFAFAFLRRAWRSGEDADLCSELLQESLDALRALPEASLFDESTVSSVWLEVVERATRFLRSVVTGDVHGTPATKGPGSIPLQDQHLALAILLELAVQRGTLSQMLSAILLLLQLWDSGAQETDNERSAQGTSAPLLPLLQRFQSIICRKDAPHSEGDMHLLSGPLSPNESFLRYLTLPQDNELAIDLRQTAVVVMAHLDRLATPCMPPLCSSPTSHKGSLQEVIGWGLIGWKYYANVIGPIQCEGLANLGVTQIACAEKRFLILSRNGRVYTQAYNSDTLAPQLVQGLASRNIVKIAAHSDGHHYLALAATGEVYSWGCGDGGRLGHGDTVPLEEPKVISAFSGKQAGKHVVHIACGSTYSAAITAEGELYTWGRGNYGRLGHGSSEDEAIPMLVAGLKGLKVIDVACGSGDAQTLAVTENGQVWSWGDGDYGKLGRGGSDGCKTPKLIEKLQDLDVVKVRCGSQFSIALTKDGQVYSWGKGDNQRLGHGTEEHVRYPKLLEGLQGKKVIDVAAGSTHCLALTEDSEVHSWGSNDQCQHFDTLRVTKPEPAALPGLDTKHIVGIACGPAQSFAWSSCSEWSIGLRVPFVVDICSMTFEQLDLLLRQVSEGMDGSADWPPPQEKECVAVATLNLLRLQLHAAISHQVDPEFLGLGLGSILLNSLKQTVVTLASSAGVLSTVQSAAQAVLQSGWSVLLPTAEERARALSALLPCAVSGNEVNISPGRRFMIDLLVGSLMADGGLESALHAAITAEIQDIEAKKEAQKEKEIDEQEANASTFHRSRTPLDKDLINTGICESSGKQCLPLVQLIQQLLRNIASQTVARLKDVARRISSCLDFEQHSRERSASLDLLLRFQRLLISKLYPGESIGQTSDISSPELMGVGSLLKKYTALLCTHIGDILPVAASIASTSWRHFAEVAYIVEGDFTGVLLPELVVSIVLLLSKNAGLMQEAGAVPLLGGLLEHLDRFNHLAPGKERDDHEELAWPGIMESFFTGQNCRNNEEVTLIRKADLENHNKDGGFWTVIDGKVYDIKDFQTQSLTGNSILAQFAGEDPVVALEAALQFEDTRESMHAFCVGQYLEPDQEIVTIPDLGSLSSPLIDTERNLGLLLGLHASYLAMSTPLSPVEIECAKWLQSSIFSGGLQTSQIHYSYNEEKDEDHCSSPGGTPASKSRLCSHRRALGDHSQAFLQAIADNNIQDHNVKDFLCQIERYCRQCHLTTPIMFPPEHPVEEVGRLLLCCLLKHEDLGHVALSLVHAGALGIEQVKHRTLPKSVVDVCRVVYQAKCSLIKTHQEQGRSYKEVCAPVIERLRFLFNELRPAVCNDLSIMSKFKLLSSLPRWRRIAQKIIRERRKKRVPKKPESTDDEEKIGNEESDLEEACILPHSPINVDKRPIAIKSPKDKWQPLLSTVTGVHKYKWLKQNVQGLYPQSPLLSTIAEFALKEEPVDVEKMRKCLLKQLERAEVRLEGIDTILKLASKNFLLPSVQYAMFCGWQRLIPEGIDIGEPLTDCLKDVDLIPPFNRMLLEVTFGKLYAWAVQNIRNVLMDASAKFKELGIQPVPLQTITNENPSGPSLGTIPQARFLLVMLSMLTLQHGANNLDLLLNSGMLALTQTALRLIGPSCDNVEEDMNASAQGASATVLEETRKETAPVQLPVSGPELAAMMKIGTRVMRGVDWKWGDQDGPPPGLGRVIGELGEDGWIRVQWDTGSTNSYRMGKEGKYDLKLAELPAAAQPSAEDSDTEDDSEAEQTERNIHPTAMMFTSTINLLQTLCLSAGVHAEIMQSEATKTLCGLLRMLVESGTTDKTSSPNRLVYREQHRSWCTLGFVRSIALTPQVCGALSSPQWITLLMKVVEGHAPFTATSLQRQILAVHLLQAVLPSWDKTERARDMKCLVEKLFDFLGSLLTTCSSDVPLLRESTLRRRRVRPQASLTATHSSTLAEEVVALLRTLHSLTQWNGLINKYINSQLRSITHSFVGRPSEGAQLEDYFPDSENPEVGGLMAVLAVIGGIDGRLRLGGQVMHDEFGEGTVTRITPKGKITVQFSDMRTCRVCPLNQLKPLPAVAFNVNNLPFTEPMLSVWAQLVNLAGSKLEKHKIKKSTKQAFAGQVDLDLLRCQQLKLYILKAGRALLSHQDKLRQILSQPAVQETGTVHTDDGAVVSPDLGDMSPEGPQPPMILLQQLLASATQPSPVKAIFDKQELEAAALAVCQCLAVESTHPSSPGFEDCSSSEATTPVAVQHIRPARVKRRKQSPVPALPIVVQLMEMGFSRRNIEFALKSLTGASGNASSLPGVEALVGWLLDHSDIQVTELSDADTVSDEYSDEEVVEDVDDAAYSMSTGAVVTESQTYKKRADFLSNDDYAVYVRENIQVGMMVRCCRAYEEVCEGDVGKVIKLDRDGLHDLNVQCDWQQKGGTYWVRYIHVELIGYPPPSSSSHIKIGDKVRVKASVTTPKYKWGSVTHQSVGVVKAFSANGKDIIVDFPQQSHWTGLLSEMELVPSIHPGVTCDGCQMFPINGSRFKCRNCDDFDFCETCFKTKKHNTRHTFGRINEPGQSAVFCGRSGKQLKRCHSSQPGMLLDSWSRMVKSLNVSSSVNQASRLIDGSEPCWQSSGSQGKHWIRLEIFPDVLVHRLKMIVDPADSSYMPSLVVVSGGNSLNNLIELKTININPSDTTVPLLNDCTEYHRYIEIAIKQCRSSGIDCKIHGLILLGRIRAEEEDLAAVPFLASDNEEEEDEKGNSGSLIRKKAAGLESAATIRTKVFVWGLNDKDQLGGLKGSKIKVPSFSETLSALNVVQVAGGSKSLFAVTVEGKVYACGEATNGRLGLGISSGTVPIPRQITALSSYVVKKVAVHSGGRHATALTVDGKVFSWGEGDDGKLGHFSRMNCDKPRLIEALKTKRIRDIACGSSHSAALTSSGELYTWGLGEYGRLGHGDNTTQLKPKMVKVLLGHRVIQVACGSRDAQTLALTDEGLVFSWGDGDFGKLGRGGSEGCNIPQNIERLNGQGVCQIECGAQFSLALTKSGVVWTWGKGDYFRLGHGSDVHVRKPQVVEGLRGKKIVHVAVGALHCLAVTDSGQVYAWGDNDHGQQGNGTTTVNRKPTLVQGLEGQKITRVACGSSHSVAWTTVDVATPSVHEPVLFQTARDPLGASYLGVPSDADSSAASNKISGASNSKPNRPSLAKILLSLDGNLAKQQALSHILTALQIMYARDAVVGALMPAAMIAPVECPSFSSAAPSDASAMASPMNGEECMLAVDIEDRLSPNPWQEKREIVSSEDAVTPSAVTPSAPSASARPFIPVTDDLGAASIIAETMTKTKEDVESQNKAAGPEPQALDEFTSLLIADDTRVVVDLLKLSVCSRAGDRGRDVLSAVLSGMGTAYPQVADMLLELCVTELEDVATDSQSGRLSSQPVVVESSHPYTDDTSTSGTVKIPGAEGLRVEFDRQCSTERRHDPLTVMDGVNRIVSVRSGREWSDWSSELRIPGDELKWKFISDGSVNGWGWRFTVYPIMPAAGPKELLSDRCVLSCPSMDLVTCLLDFRLNLASNRSIVPRLAASLAACAQLSALAASHRMWALQRLRKLLTTEFGQSININRLLGENDGETRALSFTGSALAALVKGLPEALQRQFEYEDPIVRGGKQLLHSPFFKVLVALACDLELDTLPCCAETHKWAWFRRYCMASRVAVALDKRTPLPRLFLDEVAKKIRELMADSENMDVLHESHDIFKREQDEQLVQWMNRRPDDWTLSAGGSGTIYGWGHNHRGQLGGIEGAKVKVPTPCEALATLRPVQLIGGEQTLFAVTADGKLYATGYGAGGRLGIGGTESVSTPTLLESIQHVFIKKVAVNSGGKHCLALSSEGEVYSWGEAEDGKLGHGNRSPCDRPRVIESLRGIEVVDVAAGGAHSACVTAAGDLYTWGKGRYGRLGHSDSEDQLKPKLVEALQGHRVVDIACGSGDAQTLCLTDDDTVWSWGDGDYGKLGRGGSDGCKVPMKIDSLTGLGVVKVECGSQFSVALTKSGAVYTWGKGDYHRLGHGSDDHVRRPRQVQGLQGKKVIAIATGSLHCVCCTEDGEVYTWGDNDEGQLGDGTTNAIQRPRLVAALQGKKVNRVACGSAHTLAWSTSKPASAGKLPAQVPMEYNHLQEIPIIALRNRLLLLHHLSELFCPCIPMFDLEGSLDETGLGPSVGFDTLRGILISQGKEAAFRKVVQATMVRDRQHGPVVELNRIQVKRSRSKGGLAGPDGTKSVFGQMCAKMSSFGPDSLLLPHRVWKVKFVGESVDDCGGGYSESIAEICEELQNGLTPLLIVTPNGRDESGANRDCYLLSPAARAPVHSSMFRFLGVLLGIAIRTGSPLSLNLAEPVWKQLAGMSLTIADLSEVDKDFIPGLMYIRDNEATSEEFEAMSLPFTVPSASGQDIQLSSKHTHITLDNRAEYVRLAINYRLHEFDEQVAAVREGMARVVPVPLLSLFTGYELETMVCGSPDIPLHLLKSVATYKGIEPSASLIQWFWEVMESFSNTERSLFLRFVWGRTRLPRTIADFRGRDFVIQVLDKYNPPDHFLPESYTCFFLLKLPRYSCKQVLEEKLKYAIHFCKSIDTDDYARIALTGEPAADDSSDDSDNEDVDSFASDSTQDYLTGH

SEQ ID NO: 36203 - protein, 504 aa, Homo sapiens
LRALPKSPRTLLSAQAAALAVCQCLAVESTHPSSPGFEDCSSSEATTPVAVQHIRPARVKRRKQSPVPALPIVVQLMEMGFSRRNIEFALKSLTGASGNASSLPGVEALVGWLLDHSDIQVTELSDADTVSDEYSDEEVVEDVDDAAYSMSTGAVVTESQTYKKRADFLSNDDYAVYVRENIQVGMMVRCCRAYEEVCEGDVGKVIKLDRDGLHDLNVQCDWQQKGGTYWVRYIHVELIGYPPPSSSSHIKIGDKVRVKASVTTPKYKWGSVTHQSVGVVKAFSANGKDIIVDFPQQSHWTGLLSEMELVPSIHPGVTCDGCQMFPINGSRFKCRNCDDFDFCETCFKTKKHNTRHTFGRINEPGQSAVFCGRSGKQLKRCHSSQPGMLLDSWSRMVKSLNVSSSVNQASRLIDGSEPCWQSSGSQGKHWIRLEIFPDVLVHRLKMIVDPADSSYMPSLVVVSGGNSLNNLIELKTININPSDTTVPLLNDCTEVSSYASVPFG

SEQ ID NO: 36204 - protein, 728 aa, Homo sapiens
MAHRKLESVGSGMLDHRVRPGPVPHSQEPESEDMELPLEGYVPEGLELAALRPESPAPEEQECHNHSPDGDSSSDYVNNTSEEEDYDEGLPEEEEGITYYIRYCPEDDSYLEGMDCNGEEYLAHSAHPVDTDECQEAVEEWTDSAGPHPHGHEAEGSQDYPDGQLPIPEDEPSVLEAHDQEEDGHYCASKEGYQDYYPEEANGNTGASPYRLRRGDGDLEDQEEDIDQIVAEIKMSLSMTSITSASEASPEHGPEPGPEDSVEACPPIKASCSPSRHEARPKSLNLLPEAKHPGDPQRGFKPKTRTPEERLKWPHEQVCNGLEQPRKQQRSDLNGPVDNNNIPETKKVASFPSFVAVPGPCEPEDLIDGIIFAANYLGSTQLLSERNPSKNIRMMQAQEAVSRVKNSEGDAQTLTEVDLFISTQRIKVLNADTQETMMDHALRTISYIADIGNIVVLMARRRMPRSASQDCIETTPGAQEGKKQYKMICHVFESEDAQLIAQSIGQAFSVAYQEFLRANGINPEDLSQKEYSDIINTQEMYNDDLIHFSNSENCKELQLEKHKGEILGVVVVESGWGSILPTVILANMMNGGPAARSGKLSIGDQIMSINGTSLVGLPLATCQGIIKGLKNQTQVKLNIVSCPPVTTVLIKRPDLKYQLGFSVQNGIVSSPSCSGPPPPLQGPGRGSSSRPMGQAMSGSLVGPGLWLQLPTARPPGAGTFHGSLGGPG

SEQ ID NO: 36205 - protein, 1753 aa, Homo sapiens
LERDKMSARAAAAKSTAMEETAIWEQHTVTLHRAPGFGFGIAISGGRDNPHFQSGETSIVISDVLKGGPAEGQLQENDRVAMVNGVSMDNVEHAFAVQQLRKSGKNAKITIRRKKKVQIPVSRPDPEPVSDNEEDSYDEEIHDPRSGRSGVVNRRSEKIWPRDRSASRERSLSPRSDRRSVASSQPAKPTKVTLVKSRKNEEYGLRLASHIFVKEISQDSLAARDGNIQEGDVVLKINGTVTENMSLTDAKTLIERSKGKLKMVVQRDERATLLNVPDLSDSIHSANASERDDISEIQSLASDHSGRSHDRPPRRSRSRSPDQRSEPSDHSRHSPQQPSNGSLRSRDEERISKPGAVSTPVKHADDHTPKTVEEVTVERNEKQTPSLPEPKPVYAQVGQPDVDLPVSPSDGVLPNSTHEDGILRPSMKLVKFRKGDSVGLRLAGGNDVGIFVAGVLEDSPAAKEGLEEGDQILRVNNVDFTNIIREEAVLFLLDLPKGEEVTILAQKKKDVYRRIVESDVGDSFYIRTHFEYEKESPYGLSFNKGEVFRVVDTLYNGKLGSWLAIRIGKNHKEVERGIIPNKNRAEQLASVQYTLPKTAGGDRADFWRFRGLRSSKRNLRKSREDLSAQPVQTKFPAYERVVLREAGFLRPVTIFGPIADVAREKLAREEPDIYQIAKSEPRDAGTDQRSSGIIRLHTIKQIIDQDKHALLDVTPNAVDRLNYAQWYPIVVFLNPDSKQGVKTMRMRLCPESRKSARKLYERSHKLRKNNHHLFTTTINLNSMNDGWYGALKEAIQQQQNQLVWVSEGKADGATSDDLDLHDDRLSYLSAPGSEYSMYSTDSRHTSDYEDTDTEGGAYTDQELDETLNDEVGTPPESAITRSSEPVREDSSGMHHENQTYPPYSPQAQPQPIHRIDSPGFKPASQQKAEASSPVPYLSPETNPASSTSAVNHNVNLTNVRLEEPTPAPSTSYSPQADSLRTPSTEAAHIMLRDQEPSLSSHVDPTKVYRKDPYPEEMMRQNHVLKQPAVSHPGHRPDKEPNLTYEPQLPYVEKQASRDLEQPTYRYESSSYTDQFSRNYEHRLRYEDRVPMYEEQWSYYDDKQPYPSRPPFDNQHSQDLDSRQHPEESSERGYFPRFEEPAPLSYDSRPRYEQAPRASALRHEEQPAPGYDTHGRLRPEAQPHPSAGPKPAESKQYFEQYSRSYEQVPPQGFTSRAGHFEPLHGAAAVPPLIPSSQHKPEALPSNTKPLPPPPTQTEEEEDPAMKPQSVLTRVKMFENKRSASLETKKDVNDTGSFKPPEVASKPSGAPIIGPKPTSQNQFSEHDKTLYRIPEPQKPQLKPPEDIVRSNHYDPEEDEEYYRKQLSYFDRRSFENKPPAHIAASHLSEPAKPAHSQNQSNFSSYSSKGKPPEADGVDRSFGEKRYEPIQATPPPPPLPSQYAQPSQPVTSASLHIHSKGAHGEGNSVSLDFQNSLVSKPDPPPSQNKPATFRPPNREDTAQAAFYPQKSFPDKAPVNGTEQTQKTVTPAYNRFTPKPYTSSARPFERKFESPKFNHNLLPSETAHKPDLSSKTPTSPKTLVKSHSLAQPPEFDSGVETFSIHAEKPKYQINNISTVPKAIPVSPSAVEEDEDEDGHTVVATARGIFNSNGGVLSSIETGVSIIIPQGAIPEGVEQEIYFKVCRDNSILPPLDKEKGETLLSPLVMCGPHGLKFLKPVELRLPHCDPKTWQNKCLPGDPNYLVGANCVSVLIDHF

SEQ ID NO: 36206 - protein, 1693 aa, Homo sapiens
LERDKMSARAAAAKSTAMEETAIWEQHTVTLHRAPGFGFGIAISGGRDNPHFQSGETSIVISDVLKGGPAEGQLQENDRVAMVNGVSMDNVEHAFAVQQLRKSGKNAKITIRRKKKVQIPVSRPDPEPVSDNEEDSYDEEIHDPRSGRSGVVNRRSEKIWPRDRSASRERSLSPRSDRRSVASSQPAKPTKVTLVKSRKNEEYGLRLASHIFVKEISQDSLAARDGNIQEGDVVLKINGTVTENMSLTDAKTLIERSKGKLKMVVQRDERATLLNVPDLSDSIHSANASERDDISEIQSLASDHSGRSHDRPPRRSRSRSPDQRSEPSDHSRHSPQQPSNGSLRSRDEERISKPGAVSTPVKHADDHTPKTVEEVTVERNEKQTPSLPEPKPVYAQVGQPDVDLPVSPSDGVLPNSTHEDGILRPSMKLVKFRKGDSVGLRLAGGNDVGIFVAGVLEDSPAAKEGLEEGDQILRVNNVDFTNIIREEAVLFLLDLPKGEEVTILAQKKKDVYRRIVESDVGDSFYIRTHFEYEKESPYGLSFNKGEVFRVVDTLYNGKLGSWLAIRIGKNHKEVERGIIPNKNRAEQLASVQYTLPKTAGGDRADFWRFRGLRSSKRNLRKSREDLSAQPVQTKFPAYERVVLREAGFLRPVTIFGPIADVAREKLAREEPDIYQIAKSEPRDAGTDQRSSGIIRLHTIKQIIDQDKHALLDVTPNAVDRLNYAQWYPIVVFLNPDSKQGVKTMRMRLCPESRKSARKLYERSHKLRKNNHHLFTTTINLNSMNDGWYGALKEAIQQQQNQLVWVSEGKADGATSDDLDLHDDRLSYLSAPGSEYSMYSTDSRHTSDYEDTDTEGGAYTDQELDETLNDEVGTPPESAITRSSEPVREDSSGMHHENQTYPPYSPQAQPQPIHRIDSPGFKPASQQVYRKDPYPEEMMRQNHVLKQPAVSHPGHRPDKEPNLTYEPQLPYVEKQASRDLEQPTYRYESSSYTDQFSRNYEHRLRYEDRVPMYEEQWSYYDDKQPYPSRPPFDNQHSQDLDSRQHPEESSERGYFPRFEEPAPLSYDSRPRYEQAPRASALRHEEQPAPGYDTHGRLRPEAQPHPSAGPKPAESKQYFEQYSRSYEQVPPQGFTSRAGHFEPLHGAAAVPPLIPSSQHKPEALPSNTKPLPPPPTQTEEEEDPAMKPQSVLTRVKMFENKRSASLETKKDVNDTGSFKPPEVASKPSGAPIIGPKPTSQNQFSEHDKTLYRIPEPQKPQLKPPEDIVRSNHYDPEEDEEYYRKQLSYFDRRSFENKPPAHIAASHLSEPAKPAHSQNQSNFSSYSSKGKPPEADGVDRSFGEKRYEPIQATPPPPPLPSQYAQPSQPVTSASLHIHSKGAHGEGNSVSLDFQNSLVSKPDPPPSQNKPATFRPPNREDTAQAAFYPQKSFPDKAPVNGTEQTQKTVTPAYNRFTPKPYTSSARPFERKFESPKFNHNLLPSETAHKPDLSSKTPTSPKTLVKSHSLAQPPEFDSGVETFSIHAEKPKYQINNISTVPKAIPVSPSAVEEDEDEDGHTVVATARGIFNSNGGVLSSIETGVSIIIPQGAIPEGVEQEIYFKVCRDNSILPPLDKEKGETLLSPLVMCGPHGLKFLKPVELRLPHCASMTPDGWSFALKSSDSSSGDPKTWQNKCLPGDPNYLVGANCVSVLIDHF

SEQ ID NO: 36207 - protein, 388 aa, Homo sapiens
LERDKMSARAAAAKSTAMEETAIWEQHTVTLHRAPGFGFGIAISGGRDNPHFQSGETSIVISDVLKGGPAEGQLQENDRVAMVNGVSMDNVEHAFAVQQLRKSGKNAKITIRRKKKVQIPVSRPDPEPVSDNEEDSYDEEIHDPRSGRSGVVNRRSEKIWPRDRSASRERSLSPRSDRRSVASSQPAKPTKVTLVKSRKNEEYGLRLASHIFVKEISQDSLAARDGNIQEGDVVLKINGTVTENMSLTDAKTLIERSKGKLKMVVQRDERATLLNVPDLSDSIHSANASERDDISEIQSLASDHSGRSHDRPPRRSRSRSPDQRSEPSDHSRHSPQQPSNGRVTRTFENLKKIMILLSRKMCMCTYTQQLHTISGDSQGSIGHHLTHG

SEQ ID NO: 36208 - protein, 88 aa, Homo sapiens [sequence omitted]

SEQ ID NO: 36209 - protein, 407 aa, Homo sapiens
VCRILNYLVYLSFPFSLSIFLCCNHFLSILLTEEEGRDLSCCVASLVQVMLDPYFRTITGFQSLIQKEWVMAGYQFLDRCNHLKRSEKESPLFLLFLDATWQLLEQYPAAFEFSETYLAVLYDSTRISLFGTFLFNSPHQRVKQSTEFAISKNIQLGDEKGLKFPSVWDWSLQFTAKDRTLFHNPFYIGKSTPCIQNGSVKSFKRTKKSYSSTLRGMPSALKNGIISDQELLPRRNSLILKPKPDPAQQTDSQNSDTEQYFREWFSKPANLHGVILPRVSGTHIKLWKLCYFRWVPEAQISLGGSITAFHKLSLLADEVDVLSRMLRQQRSGPLEACYGELGQSRMYFNASGPHHTDTSGTPEFLSSSFPFSPVGNLCRRSILGTPLSKFLSGAKIWLSTETLANED

SEQ ID NO: 36210 - protein, 14 aa, Homo sapiens
MRGEAAAATWRGGP

SEQ ID NO: 36211 - protein, 119 aa, Homo sapiens
LVLLLSQTRKPLFTSAILGERLSAPQMPTGSYSHTGKQTDTALSLKSPGVLSCRMLHRNGQRCPGWEHGPGGALPASCCTPTHDTRVQDRLTPNPDFIPRPHTEAGAGFAMVQPPGTNI

SEQ ID NO: 36212 - protein, 82 aa, Homo sapiens [sequence omitted]

SEQ ID NO: 36213 - protein, 214 aa, Homo sapiens
LTMVSRMVSTMLSGLLFWLASGWTPAFAYSPRTPDRVSEADIQRLLHGVMEQLGIARPRVEYPAHQAMNLVGPQSIEGGAHEGLQHLGPFGNIPNIVAELTGDNIPKDFSEDQGYPDPPNPCPVGKTADDGCLENTPDTAEFSREFQLHQHLFDPEHDYPGLGKWNKKLLYEKMKGGERRKRRSVNPYLQGQRLDNVVAKKSVPHFSDEDKDPE

SEQ ID NO: 36214 - protein, 213 aa, Homo sapiens
LTMVSRMVSTMLSGLLFWLASGWTPAFAYSPRTPDRVSEADIQRLLHGVMEQLGIARPRVEYPAHQAMNLVGPQSIEGGAHEGLQHLGPFGNIPNIVAELTGDNIPKDFSEDQGYPDPPNPCPVGKTDDGCLENTPDTAEFSREFQLHQHLFDPEHDYPGLGKWNKKLLYEKMKGGERRKRRSVNPYLQGQRLDNVVAKKSVPHFSDEDKDPE

SEQ ID NO: 36215 - protein, 195 aa, Homo sapiens
LTMVSRMVSTMLSGLLFWLASGWTPAFAYSPRTPDRVSEADIQRLLHGVMEQLGIARPRVEYPAHQAMNLVGPQSIEGGAHEGLQHLGPFGNIPNIVAELTGDNIPKDFSEDQGYPDPPNPCPVGKTDDGCLENTPDTAEFSREFQLHQHLFDPEHDYPGLGKWSVNPYLQGQRLDNVVAKKSVPHFSDEDKDPE

SEQ ID NO: 36216 - protein, 196 aa, Homo sapiens
LTMVSRMVSTMLSGLLFWLASGWTPAFAYSPRTPDRVSEADIQRLLHGVMEQLGIARPRVEYPAHQAMNLVGPQSIEGGAHEGLQHLGPFGNIPNIVAELTGDNIPKDFSEDQGYPDPPNPCPVGKTADDGCLENTPDTAEFSREFQLHQHLFDPEHDYPGLGKWSVNPYLQGQRLDNVVAKKSVPHFSDEDKDPE

SEQ ID NO: 36217 - protein, 240 aa, Homo sapiens
MPGTRCAFRGPGDPVHGRRVTLGPADPAPSPGGSGRGRTQRHASKAQAPRTRRTDSMSRTAYTVGALLLLLGTLLPAAEGKKKGSQGAIPPPDKAQHNDSEQTQSPQQPGSRNRGRGQGRGTAMPGEEVLESSQEALHVTERKYLKRDWCKTQPLKQTIHEEGCNSRTIINRFCYGQCNSFYIPRHIRKEEGSFQSCSFCKPKKFTTMMVTLNCPELQPPTKKKRVTRVKQCRCISIDLD

SEQ ID NO: 36218 - protein, 185 aa, Homo sapiens
VHGRRVTLGPADPAPSPGGSGRGRTQRHASKAQAPRTRRTDSMSRTAYTVGALLLLLGTLLPAAEGKKKGSQGAIPPPDKALHVTERKYLKRDWCKTQPLKQTIHEEGCNSRTIINRFCYGQCNSFYIPRHIRKEEGSFQSCSFCKPKKFTTMMVTLNCPELQPPTKKKRVTRVKQCRCISIDLD

SEQ ID NO: 36219 - protein, 75 aa, Homo sapiens
LWGFFPVLLLLLLSGDVQSSEVPGAAAEGSGGSGVGIGDRFKIEGRAVVPGVKPQDWISAARVLVDGEEHVGFLN

SEQ ID NO: 36220 - protein, 55 aa, Homo sapiens
LPLHPPLLTLLSVVWVIFPVMHVHLSHQTQVDCRHQKHRVALHTPPPSQTCGVFT

SEQ ID NO: 36221 - protein, 574 aa, Homo sapiens
LRRLLPAPRPPAPGGARARAPPPPLLQQQLLCRVVAGARAGVPSLPPSPAMSQGSPGDWAPLDPTPGPPASPNPFVHELHLSRLQRVKFCLLGALLAPIRVLLAFIVLFLLWPFAWLQVAGLSEEQLQEPITGWRKTVCHNGVLGLSRLLFFLLGFLRIRVRGQRASRLQAPVLVAAPHSTFFDPIVLLPCDLPKVVSRAENLSVPVIGALLRFNQAILVSRHDPASRRRVVEEVRRRATSGGKWPQVLFFPEGTCSNKKALLKFKPGAFIAGVPVQPVLIRYPNSLDTTSWAWRGPGVLKVLWLTASQPCSIVDVEFLPVYHPSPEESRDPTLYANNVQRVMAQALGIPATECEFVGSLPVIVVGRLKVALEPQLWELGKVLRKAGLSAGYVDAGAEPGRSRMISQEEFARQLQLSDPQTVAGAFGYFQQDTKGLVDFRDVALALAALDGGRSLEELTRLAFELFAEEQAEGPNRLLYKDGFSTILHLLLGSPHPAATALHAELCQAGSSQGLSLCQFQNFSLHDPLYGKLFSTYLRPPHTSRGTSQTPNASSPGNPTALANGTVQAPKQKGD

SEQ ID NO: 36222 - protein, 298 aa, Homo sapiens
LHKTPASPVVHSRGLIDDVVEADLVEALQEFGPISYAVVMPKKRQALVEFEDVLGACNAVSYAADNQIYIAGHPAFVNYSTSQKISLPGDSDDSRSVNSVLLFTILNPIYSITTDVLYTICNPCGPVQRIIIFRKNGVQAMVEFDSVQSAQRAKASLNGAGIYSGCCTLKMEYAKPTRLNVFKNDQDTWDYTNPNLSGQGDPGSNPNKRQRQPPLLGDHPAEYGGPHGGYHSHYHDEGHGPPRPHYEGRRMGPPVGGHCRGPSRYGPPVWAPPTPSPTTRVWPSRRQPCARGLRLASI

SEQ ID NO: 36223 - protein, 51 aa, Homo sapiens
MAASILKNSKIIHRLLSLPCLCVCASVCACVCACLGARVPALCERAGGECV

SEQ ID NO: 36224 - protein, 1217 aa, Homo sapiens
LSLSRSNLYSGRTGIPRAPPALAALATAPGRRAPVHTGSLLGTNSSTMGLAWGLGVLFLMHVCGTNRIPESGGDNSVFDIFELTGAARKGSGRRLVKGPDPSSPAFRIEDANLIPPVPDDKFQDLVDAVRAEKGFLLLASLRQMKKTRGTLLALERKDHSGQVFSVVSNGKAGTLDLSLTVQGKQHVVSVEEALLATGQWKSITLFVQEDRAQLYIDCEKMENAELDVPIQSVFTRDLASIARLRIAKGGVNDNFQGVLQNVRFVFGTTPEDILRNKGCSSSTSVLLTLDNNVVNGSSPAIRTNYIGHKTKDLQAICGISCDELSSMVLELRGLRTIVTTLQDSIRKVTEENKELANELRRPPLCYHNGVQYRNNEEWTVDSCTECHCQNSVTICKKVSCPIMPCSNATVPDGECCPRCWPSDSADDGWSPWSEWTSCSTSCGNGIQQRGRSCDSLNNRCEGSSVQTRTCHIQECDKRFKQDGGWSHWSPWSSCSVTCGDGVITRIRLCNSPSPQMNGKPCEGEARETKACKKDACPINGGWGPWSPWDICSVTCGGGVQKRSRLCNNPTPQFGGKDCVGDVTENQICNKQDCPIDGCLSNPCFAGVKCTSYPDGSWKCGACPPGYSGNGIQCTDVDECKEVPDACFNHNGEHRCENTDPGYNCLPCPPRFTGSQPFGQGVEHATANKQVCKPRNPCTDGTHDCNKNAKCNYLGHYSDPMYRCECKPGYAGNGIICGEDTDLDGWPNENLVCVANATYHCKKDNCPNLPNSGQEDYDKDGIGDACDDDDDNDKIPDDRDNCPFHYNPAQYDYDRDDVGDRCDNCPYNHNPDQADTDNNGEGDACAADIDGDGILNERDNCQYVYNVDQRDTDMDGVGDQCDNCPLEHNPDQLDSDSDRIGDTCDNNQDIDEDGHQNNLDNCPYVPNANQADHDKDGKGDACDHDDDNDGIPDDKDNCRLVPNPDQKDSDGDGRGDACKDDFDHDSVPDIDDICPENVDISETDFRRFQMIPLDPKGTSQNDPNWVVRHQGKELVQTVNCDPGLAVGYDEFNAVDFSGTFFINTERDDDYAGFVFGYQSSSRFYVVMWKQVTQSYWDTNPTRAQGYSGLSVKVVNSTTGPGEHLRNALWHTGNTPGQVRTLWHDPRHIGWKDFTAYRWRLSHRPKTGFIRVVMYEGKKIMADSGPIYDKTYAGGRLGLFVFSQEMVFFSDLKYECRDP

SEQ ID NO: 36225 - protein, 25 aa, Homo sapiens
MGLRKPPGSLLLGFLLFCACISVDS

SEQ ID NO: 36226 - protein, 17 aa, Homo sapiens
LPVELVFLFLYNVCTLN

SEQ ID NO: 36227 - protein, 78 aa, Homo sapiens
MVLLESEQFLTELTRLFQKCRTSGSVYITLKKYDGRTKPIPKKGTVEGFEPADNKCLLRATDGKKKISTVGENPMPPF

SEQ ID NO: 36228 - protein, 70 aa, Homo sapiens
MVLLESEQFLTELTRLFQKCRTSGSVYITLKKCKQREGSRAMLPGFPVSGSHRSLSAADRRLPLPFPTLY

SEQ ID NO: 36229 - protein, 78 aa, Homo sapiens
LPLGERQHPCGVPLSDLGLKQHCCFPPCSKSSILTILYQHGPFTKTEITLLLSVGNTEMNKTRPLSWESREATCQLTS

SEQ ID NO: 36230 - protein, 224 aa, Homo sapiens
LLILLLLLLTTLRVKLCDRPRSENVIKKKGGSRRAQGRGEMEPSQCVEELEDDVFQPEDGEPVTQPGSLLSADLFAQSLLDCPLSRLQLFPLTHCCGPGLRPTSQEDKATQTLSPASPSQGVMLPCGVTEEPQRLFYGNAGYRLPLPASFPAVLPIGEQPPEGQWQHQAEVQIARKLQCIADQFHRLHVQQHQQNQNRVWWQILLFLHNLALNGEENRNGAGPR

SEQ ID NO: 36231 - protein, 51 aa, Homo sapiens [sequence omitted]

SEQ ID NO: 36232 - protein, 121 aa, Homo sapiens
LESPNPTPSLFLLLPLTLSVFSLQGSWEPWSRPVGEPPEAGWDYAQWKQEREQIDLARLARHRDAQGDWRRPWDLDKAKSTLQDCSQLRGEGPARAGSRRGPRSHQKLQPPPLLPDGKGGI

SEQ ID NO: 36233 - protein, 48 aa, Homo sapiens
LEQFQIFRLPPRIFVLILSVGWISNICTCEKKKGGKPYTMINKFPSLP

SEQ ID NO: 36234 - protein, 13 aa, Homo sapiens
LIKVRRLWTALSL

SEQ ID NO: 36235 - protein, 14 aa, Homo sapiens
LRIPALGRTVQQSG

SEQ ID NO: 36236 - protein, 11 aa, Homo sapiens
LGLPMGKWGSG

SEQ ID NO: 36237 - protein, 87 aa, Homo sapiens
VWGQQLVGTGFNASFLCFCLSFGETLALGLGASQDPGWQRLPSEVPCPGWAPTVTQRTGLGRRPAAPHWGDLLGGRHQFANEATHLI

SEQ ID NO: 36238 - protein, 46 aa, Homo sapiens
LVPQDFPKLISFHHGRHGLGKIKSLNPRPHRYQVADHTAKPSDPDI

SEQ ID NO: 36239 - protein, 507 aa, Homo sapiens
VDLLPGQSAFGGRGGRPGVCSQGAGFVVCSVVRLRCSMSRLGALGGARAGLGLLLGTAAGLGFLCLLYSQRWKRTQRHGRSQSLPNSLDYTQTSDPGRHVMLLRAVPGGAGDASVLPSLPREGQEKVLDRLDFVLTSLVALRREVEELRSSLRGLAGEIVGEVRCHMEENQRVARRRRFPFVRERSDSTGSSSVYFTASSGATFTDAESEGGYTTANAESDNERDSDKESEDGEDEVSCETVKMGRKDSLDLEEEAASGASSALEAGGSSGLEDVLPLLQQADELHRGDEQGKREGFQLLLNNKLVYGSRQDFLWRLARAYSDMCELTEEVSEKKSYALDGKEEAEAALEKGDESADCHLWYAVLCGQLAEHESIQRRIQSGFSFKEHVDKAIALQPENPMAHFLLGRWCYQVSHLSWLEKKTATALLESPLSATVEDALQSFLKAEELQPGFSKAGRVYISKCYRELGKNSEARWWMKLALELPDVTKEDLAIQKDLEELEVILRD

SEQ ID NO: 36240 - protein, 66 aa, Homo sapiens
LRWLRWGPLLCPLLPVGAGGMFCARAQGLPGSLTCIPLFHREGHDAFELKEHQTSAYSPPRAGQEH

SEQ ID NO: 36241 - protein, 12 aa, Homo sapiens
MPSLFSLNVLFL

SEQ ID NO: 36242 - protein, 198 aa, Homo sapiens
LKAYGTIVKMKRDDLKATFTARNREAKQLTQLERTRQRNPSDRHVISQAETELQRTAMDASRTSRHLEETINNFERQKMKDIKTIFSEFITIEMLFHGKALEVYTAAYRNIQNIDEDEDLEVFRNSLYAPDYSSCLDTVRANSKSPLQRSLSAKCVSGTRQVSTCRLRKDQQAEDDEDEELDVTEEENFLNYTFPFSS

SEQ ID NO: 36243 - protein, 161 aa, Homo sapiens
VETLPSPFLTPSPSFPPSFPPVAVSSGAAAPGGAPGTAMGSRASTLLRDEELEEIKKETGFSHSQITRLYSRFTSLDKGENGTLSREDFQRIPELAINPLGDRIINAFFPEGEDQVNFRGFMRTLAHFRPIEDNEKSKDVNGPEPLNSRSNKLHLEEERYI

SEQ ID NO: 36244 - protein, 166 aa, Homo sapiens
VETLPSPFLTPSPSFPPSFPPVAVSSGAAAPGGAPGTAMGSRASTLLRDEELEEIKKETGFSHSQITRLYSRFTSLDKGENGTLSREDFQRIPELAINPLGDRIINAFFPEGEDQVNFRGFMRTLAHFRPIEDNEKSKDVNGPEPLNSRSNKLHCATHDGRSKYLR

SEQ ID NO: 36245 - protein, 184 aa, Homo sapiens
LTPSPSFPPSFPPVAVSSGAAAPGGAPGTAMGSRASTLLRDEELEEIKKETGFSHSQITRLYSRFTSLDKGENGTLSREDFQRIPELAINPLGDRIINAFFPEGEDQVNFRGFMRTLAHFRPIEDNEKSKDVNGPEPLNSRSNKLHFAFRLYDLDKDEKISRDELLQVLEKVDVEQKMSIRFLH

SEQ ID NO: 36246 - protein, 23 aa, Homo sapiens
VNQAIAILMYVSMSVFSHTSALG

SEQ ID NO: 36247 - protein, 29 aa, Homo sapiens
VLLYSSQKQNSELRTWQVSNCGLIVPNTV

SEQ ID NO: 36248 - protein, 15 aa, Homo sapiens
MVELGYLLKLLGGPC

SEQ ID NO: 36249 - protein, 202 aa, Homo sapiens
VGPVPVACLLFLGAYYQAWSQQPSSCPEDWLQDMQRLSEELLLPLLSQPTLGSLWDSLRHCSLLCNPLSCVPALEAPPSLVSLGCSGGCPRLSLAGSASPFPFLTALLSLLNTLAQIHKGLCGQVSVGCLIRGQARGQDGRNQKESGRVGWARWLTPVIPAVWEAEVGRSPEVGSSRPAWPTWRNPISTKNTKLARHDGTCL

SEQ ID NO: 36250 - protein, 266 aa, Homo sapiens
MAEAALEAVRSELREFPAAARELCVPLAVPYLDKPPTPLHFYRDWVCPNRPCIIRNALQHWPALQKWSLPYFRATVGSTEVSVAVTPDGYADAVRGDRFMMPAERRLPLSFVLDVLEGRAQHPGVLYVQKQCSNLPSELPQLLPDLESHVPWASEALGKMPDAVNFWLGEAAAVTSLHKDHYENLYCVVSGEKHFLFHPPSDRPFIPYELYTPATYQLTEEGTFKVVDEEAMEKVSVLFLGSREGEGQKPGSEEQAQKIWGGGTLL

SEQ ID NO: 36251 - protein, 189 aa, Homo sapiens
MFSWMGRQAGGRERAGGADAVQTVTGGLRSLYLRKVLPLEEAYRFHEFHSPALEDADFENKPMILLVGQYSTGKTTFIRYLLEQDFPGMRIGPEPTTDSFIAVMYGETEGSTPGNALVVDPKKPFRKLSRFGNAFLNRFMCSQLPNQVLKSISVIDSPGILSGEKQRISRGQCLSLPLPTKCWLRPSLL

SEQ ID NO: 36252 - protein, 441 aa, Homo sapiens
MAAAAWLQVLPVILLLLGAHPSPLSFFSAGPATVAAADRSKWHIPIPSGKNYFSFGKILFRNTTIFLKFDGEPCDLSLNITWYLKSADCYNEIYNFKAEEVELYLEKLKEKRGLSGKYQTSSKLFQNCSELFKTQTFSGDFMHRLPLLGEKQEAKENGTNLTFIGDKTAMHEPLQTWQDAPYIFIVHIGISSSKESSKENSLSNLFTMTVEVKGPYEYLTLEDYPLMIFFMVMCIVYVLFGVLWLAWSACYWRDLLRIQFWIGAVIFLGMLEKAVFYAEFQNIRYKGESVQGALILAELLSAVKRSLARTLVIIVSLGYGIVKPRLGVTLHKVVVAGALYLLFSGMEGVLRVTGAQTDLASLAFIPLAFLDTALCWWIFISLTQTMKLLKLRRNIVKLSLYRHFTNTLILAVAASIVFIIWTTMKFRIVTCQSVSYKHIYE

SEQ ID NO: 36253 - protein, 21 aa, Homo sapiens
LLSLFIRLVFIPLFFSSYLKE

SEQ ID NO: 36254 - protein, 16 aa, Homo sapiens
VLGCPSCRRRGVASPA

SEQ ID NO: 36255 - protein, 294 aa, Homo sapiens
VFFRFFLVALGSGPRSQGSAGVESWGRSPSREADRVDWAVTAALPSRRDLSRGARMGNSALRAHVETAQKTGVFQLKDRGLTEFPADLQKLTSNLRTIDLSNNKIESLPPLLIGKFTLLKSLSLNNNKLTVLPDEICNLKKLETLSLNNNHLRELPSTFGQLSALKTLSLSGNQLGALPPQLCSLRHLDVMDLSKNQIRSIPDSVGELQVIELNLNQNQISQISVKISCCPRLKILRLEENCLELSMLPQSILSDSQICLLAVEGNLFEIKKLRELEGYDKYMERFTATKKKFA

SEQ ID NO: 36256 - protein, 273 aa, Homo sapiens
LRVLGLHLRSLTAAERWEASPGLPDLPDLSRGARMGNSALRAHVETAQKTGVFQLKDRGLTEFPADLQKLTSNLRTIDLSNNKIESLPPLLIGKFTLLKSLSLNNNKLTVLPDEICNLKKLETLSLNNNHLRELPSTFGQLSALKTLSLSGNQLGALPPQLCSLRHLDVMDLSKNQIRSIPDSVGELQVIELNLNQNQISQISVKISCCPRLKILRLEENCLELSMLPQSILSDSQICLLAVEGNLFEIKKLRELEGYDKYMERFTATKKKFA

SEQ ID NO: 36257 - protein, 24 aa, Homo sapiens
LRVLGLHLRSLTAAERWEGPEPRR

SEQ ID NO: 36258 - protein, 4708 aa, Homo sapiens
LDLGCGRRMANVQVAVRVRPLSKRETKEGGRIIVEVDGKVAKIRNLKVDNRPDGFGDSREKVMAFGFDYCYWSVNPEDPQYASQDVVFQDLGMEVLSGVAKGYNICLFAYGQTGSGKTYTMLGTPASVGLTPRICEGLFVREKDCASLPSSCRIKVSFLEIYNERVRDLLKQSGQKKSYTLRVREHPEMGPYVQGLSQHVVTNYKQVIQLLEEGIANRITAATHVHEASSRSHAIFTIHYTQAILENNLPSEMASKINLVDLAGSERADPSYCKDRIAEGANINKSLVTLGIVISTLAQNSQVFSSCQSLNSSVSNGGDSGILSSPSGTSSGGAPSRRQSYIPYRDSVLTWLLKDSLGGNSKTIMVATVSPAHTSYSETMSTLRYASSAKNIINKPRVNEDANLKLIRELREEIERLKALLLSFELRNFSSLSDENLKELVLQNELKIDQLTKDWTQKWNDWQALMEHYSVDINRRRAGVVIDSSLPHLMALEDDVLSTGVVLYHLKEGTTKIGRIDSDQEQDIVLQGQWIERDHCTITSACGVVVLRPARGARCTVNGREVTASCRLTQGAVITLGKAQKFRFNHPAEAAVLRQRRQVGEAAAGRGSLEWLDLDGDLAASRLGLSPLLWKERRALEEQCDEDHQTPRDGETSHRAQIQQQQSYVEDLRHQILAEEIRAAKELEFDQAWISQQIKENQQCLLREETWLASLQQQQQEDQVAEKELEASVALDAWLQTDPEIQPSPFVQSQKRVVHLQLLRRHTLRAAERNVRRKKVSFQLERIIKKQRLLEAQKRLEKLTTLCWLQDDSTQEPPYQVLSPDATVPRPPCRSKLTSCSSLSPQRLCSKHMPQLHSIFLSWDPSTTLPPRPDPTHQTSEKTSSEEHLPQAASYPARTGCLRKNGLHSSGHGQPCTARAALARKGASAPDACLTMSPNSVGIQEMEMGVKQPHQMVSQGLASLRKSANKLKPRHEPKIFTSTTQTRGAKGLADPSHTQAGWRKEGNLGTHKAAKGASCNSLYPHGPRQTAGHGKAVKTFWTEYKPPSPSRASKRHQRVLATRVRNITKKSSHLPLGSPLKRQQNTRDPDTMVPLTDFSPVMDHSREKDNDLSDTDSNYSLDSLSCVYAKALIEPLKPEERKWDFPEPENSESDDSQLSEDSLAEKRYQSPKNRLGGNRPTNNRGQPRTRTRASVRGFTAASDSDLLAQTHRSFSLDSLIDAEEELGEDQQEEPFPGSADEIPTETFWHLEDSSLPVMDQEAICRLGPINYRTAARLDAVLPMSSSFYLDPQFQPHCELQPHCELQPHCELQPHCEQAESQVEPSYSEQADSLQGMQLSRESPLMSMDSWFSCDSKINPSSPPGIVGSLCPSPDMQEFHSCKGERPGYWPNTEELKPSDAETVLPYSSKLHQGSTELLCSARDEHTASAADTSRLSLWGIQRLIQPGADGTFQGRCIPDMTQQGSSEASHNSSVSNVLAASATTLTHVGSTHERDWSALQQKYLLELSCPVLEAIGAPKPAYPYLEEDSGSLAQASSKGGDTLLPVGPRVSSNLNLNNFPVHLSRIRRLRAEKEQDSLNAKLEGVSDFFSTSEKEASYDETYSADLESLSASRSTNAQVFATENAIPDSMTEACEVKQNNLEECLQSCRKPGLMTSSDEDFFQKNACHSNVTTATKADHWSQGWAPLRKNSAVQPGQLSPDSHYPLEEEKTDCQESSKEAVRRHINVSFALPSGPELYLHSAPWNPLSSSLQPPLLETFYVTKSRDALTETALEIPACREVRVPSPPPREAWGFGHNHQALQGAYLKNNLPVLLQNQNSKIASSQQVTAEIPVDLNTREVIRESGKCPGNITEESHDSVYSSVTQNRHFLPSTSTKVCEFENQVVILNKKHSFPALEGGEVTAQSCCGASSDSTESGKSLLFRESEAREEEELDQNTVLRQTINVSLEKDMPGESAVSLKSRSVDRRVSSPVMVAQGGGPTPKWEGKNETGLLEKGLRPKDSSEEFKLPGTKPAYERFQLVACPQERNPSECKSQEMLNPNREPSGKKQNKRVNNTDEMARLIRSVMQLENGILEIESKQNKQVHASHTPGTDKELVFQDQKEQEKTDHAFRPDSSGNPLPSKDQPSSPRQTDDTVFRDSEAGAMEVNSIGNHPQVQKITPNPFRSREGVRESEPVREHTHPAGSDRPARDICDSLGKHTTCREFTNTSLHPQRMKALARALPLQPRLERSSKNNGQFVKASASLKGQPWGLGSLEELETVKGFQESQVAEHVSSSNQEEPKAQGKVEEMPMQRGGSLQEENKVTQKFPSLSQLCRDTFFRQETVSPLLSRTEFCTAPLHQDLSNTLPLNSPRWPRRCLHVPVALGISSLDCVLDLTMLKIHNSPLVTGVEHQDQSTETRSHSPEGNVRGRSSEAHTAWCGSVRSMAMGSHSQSGVPESIPLGTEDRISASTSPQDHGKDLRITLLGFSTSEDFASEAEVAVQKEIRVSSLNKVSSQPEKRVSFSLEEDSDQASKPRQKAEKETEDVGLTSGVSLAPVSLPRVPSPEPRLLEPSDHASMCLAILEEIRQAKAQRKQLHDFVARGTVLSYCETLLEPECSSRVAGRPQCKQIDQSSSDQTRNEGEAPGFHVASLSAEAGQIDLLPDERKVQATSLSADSFESLPNTETDREPWDPVQAFSHAAPAQDRKRRTGELRQFAGASEPFICHSSSSEIIEKKKDATRTPSSADPLAPDSPRSSAPVEEVRRVVSKKVVAALPSQAPYDDPRVTLHELSQSVPQETAEGIPPGSQDSSPEHQEPRTLDTTYGEVSDNLLVTAQGEKTAHFESQSVTCDVQNSTSASGPKQDHVQCPEASTGFEEGRASPKQDTILPGALTRVALEAPTQQCVQCKESVGSGLTEVCRAGSKHSRPIPLPDQRPSANPGGIGEEAPCRHPREALDGPVFSRNPEGSRTLSPSRGKESRTLPCRQPCSSQPVATHAYSSHSSTLLCFRDGDLGKEPFKAAPHTIHPPCVVPSRAYEMDETGEISRGPDVHLTHGLEPKDVNREFRLTESSTCEPSTVAAVLSRAQGCRSPSAPDVRTGSFSHSATDGSVGLIGVPEKKVAEKQASTELEAASFPAGMYSEPLRQFRDSSVGDQNAQVCQTNPEPPATTQGPHTLDLSEGSAESKLVVEPQHECLENTTRCFLEKPQFSTELRDHNRLDSQAKFVARLKHTCSPQEDSPWQEEEQHRDQASGGGEGFAQGVNPLPDEDGLDGCQILDAGREEVAVAKPPVSKILSQGFKDPATVSLRQNETPQPAAQRSGHLYTGREQPAPNHRGSLPVTTIFSGPKHSRSSPTPQFSVVGSSRSLQELNLSVEPPSPTDEDTQGPNRLWNPHLRGYSSGKSVARTSLQAEDSNQKASSRLDDGTTDHRHLKPATPPYPMPSTLSHMPTPDFTTSWMSGTLEQAQQGKREKLGVQVRPENWCSQMDKGMLHFGSSDISPYALPWRPEEPARISWKQYMSGSAVDVSCSQKPQGLTLSNVARCSSMDNGLEDQNSPFHSHLSTYANICDLSTTHSSTENAQGSNEAWEVFRGSSSIALGDPHIPTSPEGVAPTSGHDRRPQFRGPSGEADCLRSKPPLAKGSAAGPVDEIMLLYPSEAGCPVGQTRTNTFEQGTQTLGSRRHWSSTDISFAQPEASAVSAFDLASWTSMHNLSLHLSQLLHSTSELLGSLSQPDVARREQNTKRDIPDKAPQALMMDGSTQTTVDEGSQTDLTLPTLCLQTSEAEPQGANVILEGLGSDTSTVSQEEGDVPGVPQKREAEETAQKMAQLLYLQEESTPYKPQSPSIPSSHLRFQKAPVGQHLPSVSPSVSDAFLPPSSQPEESYCLVVSSPSPSSPHSPGLFPSTSEYPGDSRVQKKLGPTSALFVDRASSPILTLSASTQEPGLSPGSLTLSAPSTHPVEGHQKLDSSPDPVDAPRTPMDNYSQTTDELGGSQRGRSSLQRSNGRSFLELHSPHSPQQSPKLQFSFLGQHPQQLQPRTTIGVQSRLLPPPLRHRSQRLGNSFVPEKVASPEHCPLSGREPSQWQSRTENGGESSASPGEPQRTLDRPSSWGGLQHLSPCPVSELTDTAGLRGSALGLPQACQPEELLCFSCQMCMAPEHQHHSLRDLPVHNKFSNWCGVQKGSPGGLDMTEEELGASGDLSSEKQEQSPPQPPNDHSQDSEWSKREQIPLQVGAQNLSLSVELTEAKLHHGFGEADALLQVLQSGTGEALAADEPVTSTWKELYARQKKAIETLRRERAERLGNFCRTRSLSPQKQLSLLPNKDLFIWDLDLPSRRREYLQQLRKDVVETTRSPESVSRSAHTPSDIELMLQDYQQAHEEAKVEIARARDQLRERTEQEKLRIHQKIISQLLKEEDKLHTLANSSSLCTSSNGSLSSGMTSGYNSSPALSGQLQFPENMGHTNLPDSRDVWIGDERGGHSAVRKNSAYSHRASLGSCCCSPSSLSSLGTCFSSSYQDLAKHVVDTSMADVMAACSDNLHNLFSCQATAGWNYQGEEQAVQLYYKVFSPTRHGFLGAGVVSQPLSRVWAAVSDPTVWPLYYKPIQTARLHQRVTNSISLVYLVCNTTLCALKQPRDFCCVCVEAKEGHLSVMAAQSVYDTSMPRPSRKMVRGEILPSAWILQPITVEGKEVTRVIYLAQVELGAPGFPPQLLSSFIKRQPLVIARLASFLGR

SEQ ID NO: 36259 - protein, 132 aa, Homo sapiens
LLVRIICTTSSAARQLLAGMYLVCNTTLCALKQPRDFCCVCVEAKEGHLSVMAAQSVYDTSMPRPSRKMVRGEILPSAWILQPITVEGKEVTRVIYLAQVELGAPGFPPQLLSSFIKRQPLVIARLASFLGR

SEQ ID NO: 36260 - protein, 58 aa, Homo sapiens
LPLPSLVSPWRYLSGTEGRISNSSITLGSISPEFCCQILRVYGLVEIVKSHIVISCTA

SEQ ID NO: 36261 - protein, 1273 aa, Homo sapiens
LRPPRPRLNGNHPWELDACVAVLPYQCIAMSGGGEQLDILSVGILVKERWKVLRKIGGGGFGEIYDALDMLTRENVALKVESAQQPKQVLKMEVAVLKKLQGKDHVCRFIGCGRNDRFNYVVMQLQGRNLADLRRSQSRGTFTISTTLRLGRQILESIESIHSVGFLHRDIKPSNFAMGRFPSTCRKCYMLDFGLARQFTNSCGDVRPPRAVAGFRGTVRYASINAHRNREMGRHDDLWSLFYMLVEFVVGQLPWRKIKDKEQVGSIKERYDHRLMLKHLPPEFSIFLDHISSLDYFTKPDYQLLTSVFDNSIKTFGVIESDPFDWEKTGNDGSLTTTTTSTTPQLHTRLTPAAIGIANATPIPGDLLRENTDEVFPDEQLSDGENGIPVGVSPDKLPGSLGHPRPQEKDVWEEMDANKNKIKLGICKAATEEENSHGQANGLLNAPSLGSPIRVRSEITQPDRDIPLVRKLRSIHSFELEKRLTLEPKPDTDKFLETCLEKMQKDTSAGKESILPALLHKPCVPAVSRTDHIWHYDEEYLPDASKPASANTPEQADGGGSNGFIAVNLSSCKQEIDSKEWVIVDKEQDLQDFRTNEAVGHKTTGSPSDEEPEVLQVLEASPQDEKLQLGPWAENDHLKKETSGVVLALSAEGPPTAASEQYTDRLELQPGAASQFIAATPTSLMEAQAEGPLTAITIPRPSVASTQSTSGSFHCGQQPEKKDLQPMEPTVELYSPRENFSGLVVTEGEPPSGGSRTDLGLQIDHIGHDMLPNIRESNKSQDLGPKELPDHNRLVVREFENLPGETEEKSILLESDNEDEKLSRGQHCIEISSLPGDLVIVEKDHSATTEPLDVTKTQTFSVVPNQDKNNEIMKLLTVGTSEISSRDIDPHVEGQIGQVAEMQKNKISKDDDIMSEDLPGHQGDLSTFLHQEGKREKITPRNGELFHCVSENEHGAPTRKDMVRSSFVTRHSRIPVLAQEIDSTLESSSPVSAKEKLLQKKAYQPDLVKLLVEKRQFKSFLGDLSSASDKLLEEKLATVPAPFCEEEVLTPFSRLTVDSHLSRSAEDSFLSPIISQSRKSKIPRPVSWVNTDQVNSSTSSQFFPRPPPGKPPTRPGVEARLRRYKVLGSSNSDSDLFSRLAQILQNGSQKPRSTTQCKSPGSPHNPKTPPKSPVVPRRSPSASPRSSSLPRTSSSSPSRAGRPHHDQRSSSPHLGRSKSPPSHSGSSSSRRSCQQEHCKPSKNGLKGSGSLHHHSASTKTPQGKSKPASKLSR

SEQ ID NO: 36262 - protein, 518 aa, Homo sapiens
LSWTRALLQKPLRPPRPRLNGNHPWELDACVAVLPYQCIAMSGGGEQLDILSVGILVKERWKVLRKIGGGGFGEIYDALDMLTRENVALKVESAQQPKQVLKMEVAVLKKLQGKDHVCRFIGCGRNDRFNYVVMQLQGRNLADLRRSQSRGTFTISTTLRLGRQILESIESIHSVGFLHRDIKPSNFAMGRFPSTCRKCYMLDFGLARQFTNSCGDVRPPRAVAGFRGTVRYASINAHRNREMGRHDDLWSLFYMLVEFVVGQLPWRKIKDKEQVGSIKERYDHRLMLKHLPPEFSIFLDHISSLDYFTKPDYQLLTSVFDNSIKTFGVIESDPFDWEKTGNDGSLTTTTTSTTPQLHTRLTPAAIGIANATPIPGDLLRENTDEVFPDEQLSDGENGIPVGVSPDKLPGSLGHPRPQEKDVWEEMDANKNKIKLGICKAATEEENSHGQANGLLNAPSLGSPIRVRSEITQPDRDIPLVRKLRSIHSFELEKRLTLEPKPDTDKFLETWYKIVYFSF

SEQ ID NO: 36263 - protein, 483 aa, Homo sapiens
LSWTRALLQKPLRPPRPRLNGNHPWELDACVAVLPYQCIAMSGGGEQLDILSVGILVKERWKVLRKIGGGGFGEIYDALDMLTRENVALKVESAQQPKQVLKMEVAVLKKLQGKDHVCRFIGCGRNDRFNYVVMQLQGRNLADLRRSQSRGTFTISTTLRLGRQILESIESIHSVGFLHRDIKPPRAVAGFRGTVRYASINAHRNREMGRHDDLWSLFYMLVEFVVGQLPWRKIKDKEQVGSIKERYDHRLMLKHLPPEFSIFLDHISSLDYFTKPDYQLLTSVFDNSIKTFGVIESDPFDWEKTGNDGSLTTTTTSTTPQLHTRLTPAAIGIANATPIPGDLLRENTDEVFPDEQLSDGENGIPVGVSPDKLPGSLGHPRPQEKDVWEEMDANKNKIKLGICKAATEEENSHGQANGLLNAPSLGSPIRVRSEITQPDRDIPLVRKLRSIHSFELEKRLTLEPKPDTDKFLETWYKIVYFSF

SEQ ID NO: 36264 - protein, 57 aa, Homo sapiens
VAAEACVCGLRQATEMASATAPAAAVPTLASPLEQLRHLAEELRLLLPRVRGNPEVL

SEQ ID NO: 36265 - protein, 38 aa, Homo sapiens
LGLATGITLRKLVRGATLDIVDGMAQLMEVLSVTPTQR

SEQ ID NO: 36266 - protein, 228 aa, Homo sapiens
LGLATGITLRKLVRGATLDIVDGMAQLMEVLSVTPTQSPENNDLISYNSVWVACQQMPQIPRDNKAAALLMLTKNVDFVKDAHEEMEQAVEECDPYSGLLNDTEENNSDNHNHEDDVLGFPSNQDLYWSEDDQELIIPCLALVRASKACLKKIRMLVAENGKKDQVAQLDDIVDISDEISPSVDDLALSIYPPMCHLTVRINVSTGFEGIATEQMGRISLITSISCKL

SEQ ID NO: 36267 - protein, 538 aa, Homo sapiens
LPALKKVALTAQTGEQPSKINRTQATFPISSLGDRKWWSAVVEERDAQSWTISVTTPADAVIGHYSLLLQVSGRKQLLLGQFTLLFNPWNREDAVFLKNEAQRMEYLLNQNGLIYLGTADCIQAESWDFGQFEGDVIDLSLRLLSKDKQVEKWSQPVHVARVLGALLHFLKEQRVLPTPQTQATQEGALLNKRRGSVPILRQWLTGRGRPVYDGQAWVLAAVACTVLRCLGIPARVVTTFASAQGTGGRLLIDEYYNEEGLQNGEGQRGRIWIFQTSTECWMTRPALPQGYDGWQILHPSAPNGGGVLGSCDLVPVRAVKEGTLGLTPAVSDLFAAINASCVVWKCCEDGTLELTDSNTKYVGNNISTKGVGSDRCEDITQNYKYPEGSLQEKEVLERVEKEKMEREKDNGIRPPSLETASPLYLLLKAPSSLPLRGDAQISVTLVNHSEQEKAVQLAIGVQAVHYNGVLAAKLWRKKLHLTLSANLDARESRAVSTPHSLSQPPELPRCPHGGLCDLHPGKGAHSQREELQIPFSVA

SEQ ID NO: 36268 - protein, 105 aa, Homo sapiens
LKSGTAETEPVEQDSSQPSLPLVRADDPLRLDQELQQPQTQEKTSNSLTEDSKMANAKQLSSDAEAQKLGKPSAHASQSFCESSSEPATGERKNGSTAVAESVAR

SEQ ID NO: 36269 - protein, 20 aa, Homo sapiens
MRGFLLHPRARGPFATRVRS

SEQ ID NO: 36270 - protein, 61 aa, Homo sapiens
LLSPLGLREMGARGRGGRCLVVGTWAGLNGRGCPSPSSIPVRCLKPKLTGRGWGRGQIRIG

SEQ ID NO: 36271 - protein, 81 aa, Homo sapiens
VAGPGPGLGAGARAGSRDMAAYQQEGQMQLPRADAIRSRLIDTFSLIEHLQGLSQAVLRHTIRSYLILPARRNLCWEINTS

SEQ ID NO: 36272 - protein, 72 aa, Homo sapiens
MGPHNCLKLINVSFPSFPTIYFSPANKKLNPKKYEGGRELSDFISYLQREATNPPVIQEEKPKKKKKAQEDL

SEQ ID NO: 36273 - protein, 175 aa, Homo sapiens
MTGFLLPPASRASRTGAERRCGPGPAPPPPRAEAVSVAGSRREVGLMRRRGEIDMATEGDVELELETETSGPERPPEKPRKHDSGAADLERVTDYAEEKEIQSSNLETAMSVIGDRRSREQKAKQEREKELAKVTIKKEDLELIMTEMEISRAAAERSLREHMGNVVEALIALTN

SEQ ID NO: 36274 - protein, 91 aa, Homo sapiens
LPFACVPGASPTTLAFPPVVLTGPSTDGIPFALSLQRVPFVLPSPQFVRLLESWPKNPAAHRLPVVSCCQAFTFSSVIPHGMRVVLSSRFP

SEQ ID NO: 36275 - protein, 455 aa, Homo sapiens
LFGISQVSGITVAAINMSVPSALMKQPPIQSTAGAVPVRNEKGEISMEKVKVKRYVSGKRPDYAPMESSDEEDEEFQFIKKAKEQEAEPEEQEEDSSSDPRLRRLQNRISEDVEERLARHRKIVEPEVVGESDSEVEGDAWRMEREDSSEEEEEEIDDEEIERRRGMMRQRAQERKNEEMEVMEVEDEGRSGEESESESEYEEYTDSEDEMEPRLKPVFIRKKDRVTVQEREAEALKQKELEQEAKRMAEERRKYTLKIVEEETKKELEENKRSLAALDALNTDDENDEEEYEAWKVRELKRIKRDREDREALEKEKAEIERMRNLTEEERRAELRANGKVITNKAVKGKYKFLQKYYHRGAFFMDEDEEVYKRDFSAPTLEDHFNKTILPKVMQVKNFGRSGRTKYTHLVDQDTTSFDSAWGQESAQNTKFFKQKAAGVRDVFERPSAKKRKTT

SEQ ID NO: 36276 - protein, 39 aa, Homo sapiens
LSWIFFSFCFFKSEQSGHLKGPPLQQQQHQGWGKSVPLV

SEQ ID NO: 36277 - protein, 37 aa, Homo sapiens [sequence omitted]

SEQ ID NO: 36278 - protein, 108 aa, Homo sapiens
LGMESRGIHETTFNSIMKCDVDILKDPYANTVLSGGTTRYPGIADRMQKITTLAPSTMKIKITAPPKRKYSVWIGSSILAWLSTVQQMWISKQEYDESGTSIIHRRCF

SEQ ID NO: 36279 - protein, 22 aa, Homo sapiens
MLPMLLSFWSNTSLVVAMNCIC

SEQ ID NO: 36280 - protein, 9 aa, Homo sapiens
VAFAEVHFR

SEQ ID NO: 36281 - protein, 281 aa, Homo sapiens
VTHLRRANSSLALPLTHAHTRLEMAAAAAAAGDSDSWDADAFSVEDPVRKVGGGGTAGGDRWEGEDEDEDVKDNWDDDDDEKKEEAEVKPEVKISEKKKIAEKIKEKERQQKKRQEEIKKRLEEPEEPKVLTPEEQLADKLRLKKLQEESDLELAKETFGVNNAVYGIDAMNPSSRDDFTEFGKLLKDKITQYEKSLYYASFLEVLVRDVCISLEIDDLKKITNSLTVLCSEKQKQEKQSKAKKKKKGVVPGGGLKATMKDDLADYGGYDGGYVQDYEDFM

SEQ ID NO: 36282 - protein, 232 aa, Homo sapiens
VTHLRRANSSLALPLTHAHTRLEMAAAAAAAGDSDSWDADAFSVEDPVRKVGGGGTAGGDRWEGEDEDEDVKLEEPEEPKVLTPEEQLADKLRLKKLQEESDLELAKETFGVNNAVYGIDAMNPSSRDDFTEFGKLLKDKITQYEKSLYYASFLEVLVRDVCISLEIDDLKKITNSLTVLCSEKQKQEKQSKAKKKKKGVVPGGGLKATMKDDLADYGGYDGGYVQDYEDFM

SEQ ID NO: 36283 - protein, 15 aa, Homo sapiens
LFVGVRGLLVLQWLP

SEQ ID NO: 36284 - protein, 135 aa, Homo sapiens
LAGIPEADSIRAEMSRSVALAVLALLSLSGLEAIQRTPKIQVYSRHPAENGKSNFLNCYVSGFHPSDIEVDLLKNGERIEKVEHSDLSFSKDWSFYLLYYTEFTPTEKDEYACRVNHVTLSQPKIVKWGKSYILL

SEQ ID NO: 36285 - protein, 132 aa, Homo sapiens
LAGIPEADSIRAEMSRSVALAVLALLSLSGLEAIQRTPKIQVYSRHPAENGKSNFLNCYVSGFHPSDIEVDLLKNGERIEKVEHSDLSFSKDWSFYLLYYTEFTPTEKDEYACRVNHVTLSQPKIVKWDRDM

SEQ ID NO: 36286 - protein, 108 aa, Homo sapiens
LCSRYSLFLAWRLSSIQVYSRHPAENGKSNFLNCYVSGFHPSDIEVDLLKNGERIEKVEHSDLSFSKDWSFYLLYYTEFTPTEKDEYACRVNHVTLSQPKIVKWDRDM

SEQ ID NO: 36287 - protein, 42 aa, Homo sapiens
MELESDGHCFLGLPRFLPRARFSWAERERGGAGRSRNANSRE

SEQ ID NO: 36288 - protein, 278 aa, Homo sapiens
MAAAAKPKNLSLVVHGPGDLRLENYPIPEPGPNEVLLRMHSVGICGSDVHYWEYGRIGNFIVKKPMVLGHEASGTVEKVGSSVKHLKPGDRVAIESGAPRENDEFCKMGRYNLSPSIFFCATPPDDGNLCQFYKHNAAFCYKLPDNVTFEEGALIDPLSVGIHACRRGGVTLGHKVLVCGAGAIGVVTLLVAKAMGAAQVVVTDLSATRLSKAKEIGADLVLQISKESPQEIARKVEGLLGCKPEVTIECTGQRPPSRQASTPLALVGPSCLWGWALR

SEQ ID NO: 36289 - protein, 261 aa, Homo sapiens
MLVKRENYPIPEPGPNEVLLRMHSVGICGSDVHYWEYGRIGNFIVKKPMVLGHEASGTVEKVGSSVKHLKPGDRVAIESGAPRENDEFCKMGRYNLSPSIFFCATPPDDGNLCQFYKHNAAFCYKLPDNVTFEEGALIDPLSVGIHACRRGGVTLGHKVLVCGAGAIGVVTLLVAKAMGAAQVVVTDLSATRLSKAKEIGADLVLQISKESPQEIARKVEGLLGCKPEVTIECTGQRPPSRQASTPLALVGPSCLWGWALR

SEQ ID NO: 36290 - protein, 284 aa, Homo sapiens
LLPPSDMVPSLFSSPGDRVAIEPGAPRENDEFCKMGRYNLSPSIFFCATPPDDGNLCRFYKHNAAFCYKLPDNVTFEEGALIEPLSVGIHACRRGGVTLGHKVLVCGAGPIGMVTLLVAKAMGAAQVVVTDLSATRLSKAKEIGADLVLQISKESPQEIARKVEGQLGCKPEVTIECTGAEASIQAGIYATRSGGNLVLVGLGSEMTTVPLLHAAIREVDIKGVFRYCNTWPVAISMLASKSVNVKPLVTHRFPLEKALEAFETFKKGLGLKIMLKCDPSDQNP

SEQ ID NO: 36291 - protein, 452 aa, Homo sapiens
LKMVPLVAVVSGPRAQLFACLLRLGTQQVGPLQLHTGASHAARNHYEVLVLGGGSGGITMAARMKRKVGAENVAIVEPSERHFYQPIWTLVGAGAKQLSSSGRPTASVIPSGVEWIKARVTELNPDKNCIHTDDDEKISYRYLIIALGIQLDYEKIKGLPEGFAHPKIGSNYSVKTVEKTWKALQDFKEGNAIFTFPNTPVKCAGAPQKIMYLSEAYFRKTGKRSKANIIFNTSLGAIFGVKKYADALQEIIQERNLTVNYKKNLIEVRADKQEAVFENLDKPGETQVISYEMLHVTPPMSPPDVLKTSPVADAAGWVDVDKETLQHRRYPNVFGIGDCTNLPTSKTAAAVAAQSGILDRTISVIMKNQTPTKKYDGYTSCPLVTGYNRVILAEFDYKAEPLETFPFDQSKERLSMYLMKADLMPFLYWNMMLRGYWGGPAFLRKLFHLGMS

SEQ ID NO: 36292 - protein, 176 aa, Homo sapiens
MAARMKRKVGAENVAIVEPSERHFYQPIWTLVGAGAKQLSSSGRPTASVIPSGVEWIKARVTELNPDKNCIHTDDDEKISYRYLIIALGIQLDYEKIKGLPEGFAHPKIGSNYSVKTVEKTWKALQDFKEGNAIFTFPNTPVKCAGAPQKIMYLSEAYFRKVCFLSGDRDEQGGQC

SEQ ID NO: 36293 - protein, 483 aa, Homo sapiens
LTSPWPTMRVFLLCAYILLLMVSQLRAVSFPEDDEPLNTVDYHYSRQYPVFRGRPSGNESQHRLDFQLMLKIRDTLYIAGRDQVYTVNLNEMPKTEVIPNKKLTWRSRQQDRENCAMKGKHKDECHNFIKVFVPRNDEMVFVCGTNAFNPMCRYYRLSTLEYDGEEISGLARCPFDARQTNVALFADGKLYSATVADFLASDAVIYRSMGDGSALRTIKYDSKWIKEPHFLHAIEYGNYVYFFFREIAVEHNNLGKAVYSRVARICKNDMGGSQRVLEKHWTSFLKARLNCSVPGDSFFYFDVLQSITDIIQINGIPTVVGVFTTQLNSIPGSAVCAFSMDDIEKVFKGRFKEQKTPDSVWTAVPEDKVPKPRPGCCAKHGLAEAYKTSIDFPDETLSFIKSHPLMDSAVPPIADEPWFTKTRVRYRLTAISVDHSAGPYQNYTVIFVGSEAGMVLKVLAKTSPFSLNDSVLLEEIEAYNHAK

SEQ ID NO: 36294 - protein, 604 aa, Homo sapiens
LTSPWPTMRVFLLCAYILLLMVSQLRAVSFPEDDEPLNTVDYHYSRQYPVFRGRPSGNESQHRLDFQLMLKIRDTLYIAGRDQVYTVNLNEMPKTEVIPNKKLTWRSRQQDRENCAMKGKHKDECHNFIKVFVPRNDEMVFVCGTNAFNPMCRYYRLSTLEYDGEEISGLARCPFDARQTNVALFADGKLYSATVADFLASDAVIYRSMGDGSALRTIKYDSKWIKEPHFLHAIEYGNYVYFFFREIAVEHNNLGKAVYSRVARICKNDMGGSQRVLEKHWTSFLKARLNCSVPGDSFFYFDVLQSITDIIQINGIPTVVGVFTTQLNSIPGSAVCAFSMDDIEKVFKGRFKEQKTPDSVWTAVPEDKVPKPRPGCCAKHGLAEAYKTSIDFPDETLSFIKSHPLMDSAVPPIADEPWFTKTRVRYRLTAISVDHSAGPYQNYTVIFVGSEAGMVLKVLAKTSPFSLNDSVLLEEIEAYNHAKCSAENEEDKKVISLQLDKDHHALYVAFSSCIIRIPLSRCERYGSCKKSCIASRDPYCGWLSQGSCGRVTPGMLAEGYEQDTEFGNTAHLGDCHDMEVSSSSVTTMVYDGKSSLESPTRWST

SEQ ID NO: 36295 - protein, 1018 aa, Homo sapiens
LTSPWPTMRVFLLCAYILLLMVSQLRAVSFPEDDEPLNTVDYHYSRQYPVFRGRPSGNESQHRLDFQLMLKIRDTLYIAGRDQVYTVNLNEMPKTEVIPNKKLTWRSRQQDRENCAMKGKHKDECHNFIKVFVPRNDEMVFVCGTNAFNPMCRYYRLSTLEYDGEEISGLARCPFDARQTNVALFADGKLYSATVADFLASDAVIYRSMGDGSALRTIKYDSKWIKEPHFLHAIEYGNYVYFFFREIAVEHNNLGKAVYSRVARICKNDMGGSQRVLEKHWTSFLKARLNCSVPGDSFFYFDVLQSITDIIQINGIPTVVGVFTTQLNSIPGSAVCAFSMDDIEKVFKGRFKEQKTPDSVWTAVPEDKVPKPRPGCCAKHGLAEAYKTSIDFPDETLSFIKSHPLMDSAVPPIADEPWFTKTRVRYRLTAISVDHSAGPYQNYTVIFVGSEAGMVLKVLAKTSPFSLNDSVLLEEIEAYNHAKCSAENEEDKKVISLQLDKDHHALYVAFSSCIIRIPLSRCERYGSCKKSCIASRDPYCGWLSQGSCGRVTPGMLLLTEDFFAFHNHSAEGYEQDTEFGNTAHLGDCHGVRWEVQSGESNQMVHMNVLITCVFAAFVLGAFIAGVAVYCYRDMFVRKNRKIHKDAESAQSCTDSSGSFAKLNGLFDSPVKEYQQNIDSPKLYSNLLTSRKELPPNGDTKSMVMDHRGQPPELAALPTPESTPVLHQKTLQAMKSHSEKAHGHGASRKETPQFFPSSPPPHSPLSHGHIPSAIVLPNATHDYNTSFSNSNAHKAEKKLQNIDHPLTKSSSKRDHRRSVDSRNTLNDLLKHLNDPNSNPKAIMGDIQMAHQNLMLDPMGSMSEVPPKVPNREASLYSPPSTLPRNSPTKRVDVPTTPGVPMTSLERQRGYHKNSSQRHSISAMPKNLNSPNGVLLSRQPSMNRGGYMPTPTGAKVDYIQGTPVSVHLQPSLSRQSSYTSNGTLPRTGLKRTPSLKPDVPPKPSFVPQTPSVRPLNKYTY

SEQ ID NO: 36296 - protein, 1080 aa, Homo sapiens
LTSPWPTMRVFLLCAYILLLMVSQLRAVSFPEDDEPLNTVDYHYSRQYPVFRGRPSGNESQHRLDFQLMLKIRDTLYIAGRDQVYTVNLNEMPKTEVIPNKKLTWRSRQQDRENCAMKGKHKDECHNFIKVFVPRNDEMVFVCGTNAFNPMCRYYRLSTLEYDGEEISGLARCPFDARQTNVALFADGKLYSATVADFLASDAVIYRSMGDGSALRTIKYDSKWIKEPHFLHAIEYGNYVYFFFREIAVEHNNLGKAVYSRVARICKNDMGGSQRVLEKHWTSFLKARLNCSVPGDSFFYFDVLQSITDIIQINGIPTVVGVFTTQLNSIPGSAVCAFSMDDIEKVFKGRFKEQKTPDSVWTAVPEDKVPKPRPGCCAKHGLAEAYKTSIDFPDETLSFIKSHPLMDSAVPPIADEPWFTKTRVRYRLTAISVDHSAGPYQNYTVIFVGSEAGMVLKVLAKTSPFSLNDSVLLEEIEAYNHAKCSAENEEDKKVISLQLDKDHHALYVAFSSCIIRIPLSRCERYGSCKKSCIASRDPYCGWLSQGSCGRVTPGMLAEGYEQDTEFGNTAHLGDCHEILPTSTTPDYKIFGGPTSDMEVSSSSVTTMASIPEITPKVIDTWRPKLTSSRKFVVQDDPNTSDFTDPLSGIPKGVRWEVQSGESNQMVHMNVLITCVFAAFVLGAFIAGVAVYCYRDMFVRKNRKIHKDAESAQSCTDSSGSFAKLNGLFDSPVKEYQQNIDSPKLYSNLLTSRKELPPNGDTKSMVMDHRGQPPELAALPTPESTPVLHQKTLQAMKSHSEKAHGHGASRKETPQFFPSSPPPHSPLSHGHIPSAIVLPNATHDYNTSFSNSNAHKAEKKLQNIDHPLTKSSSKRDHRRSVDSRNTLNDLLKHLNDPNSNPKAIMGDIQMAHQNLMLDPMGSMSEVPPKVPNREASLYSPPSTLPRNSPTKRVDVPTTPGVPMTSLERQRGYHKNSSQRHSISAMPKNLNSPNGVLLSRQPSMNRGGYMPTPTGAKVDYIQGTPVSVHLQPSLSRQSSYTSNGTLPRTGLKRTPSLKPDVPPKPSFVPQTPSVRPLNKYTY

SEQ ID NO: 36297 - protein, 1024 aa, Homo sapiens
LTSPWPTMRVFLLCAYILLLMVSQLRAVSFPEDDEPLNTVDYHYSRQYPVFRGRPSGNESQHRLDFQLMLKIRDTLYIAGRDQVYTVNLNEMPKTEVIPNKKLTWRSRQQDRENCAMKGKHKDECHNFIKVFVPRNDEMVFVCGTNAFNPMCRYYRLSTLEYDGEEISGLARCPFDARQTNVALFADGKLYSATVADFLASDAVIYRSMGDGSALRTIKYDSKWIKEPHFLHAIEYGNYVYFFFREIAVEHNNLGKAVYSRVARICKNDMGGSQRVLEKHWTSFLKARLNCSVPGDSFFYFDVLQSITDIIQINGIPTVVGVFTTQLNSIPGSAVCAFSMDDIEKVFKGRFKEQKTPDSVWTAVPEDKVPKPRPGCCAKHGLAEAYKTSIDFPDETLSFIKSHPLMDSAVPPIADEPWFTKTRVRYRLTAISVDHSAGPYQNYTVIFVGSEAGMVLKVLAKTSPFSLNDSVLLEEIEAYNHAKCSAENEEDKKVISLQLDKDHHALYVAFSSCIIRIPLSRCERYGSCKKSCIASRDPYCGWLSQGSCGRVTPGMLAEGYEQDTEFGNTAHLGDCHEILPTSTTPDYKIFGGPTSGVRWEVQSGESNQMVHMNVLITCVFAAFVLGAFIAGVAVYCYRDMFVRKNRKIHKDAESAQSCTDSSGSFAKLNGLFDSPVKEYQQNIDSPKLYSNLLTSRKELPPNGDTKSMVMDHRGQPPELAALPTPESTPVLHQKTLQAMKSHSEKAHGHGASRKETPQFFPSSPPPHSPLSHGHIPSAIVLPNATHDYNTSFSNSNAHKAEKKLQNIDHPLTKSSSKRDHRRSVDSRNTLNDLLKHLNDPNSNPKAIMGDIQMAHQNLMLDPMGSMSEVPPKVPNREASLYSPPSTLPRNSPTKRVDVPTTPGVPMTSLERQRGYHKNSSQRHSISAMPKNLNSPNGVLLSRQPSMNRGGYMPTPTGAKVDYIQGTPVSVHLQPSLSRQSSYTSNGTLPRTGLKRTPSLKPDVPPKPSFVPQTPSVRPLNKYTY

SEQ ID NO: 36298 - protein, 1005 aa, Homo sapiens
LTSPWPTMRVFLLCAYILLLMVSQLRAVSFPEDDEPLNTVDYHYSRQYPVFRGRPSGNESQHRLDFQLMLKIRDTLYIAGRDQVYTVNLNEMPKTEVIPNKKLTWRSRQQDRENCAMKGKHKDECHNFIKVFVPRNDEMVFVCGTNAFNPMCRYYRLSTLEYDGEEISGLARCPFDARQTNVALFADGKLYSATVADFLASDAVIYRSMGDGSALRTIKYDSKWIKEPHFLHAIEYGNYVYFFFREIAVEHNNLGKAVYSRVARICKNDMGGSQRVLEKHWTSFLKARLNCSVPGDSFFYFDVLQSITDIIQINGIPTVVGVFTTQLNSIPGSAVCAFSMDDIEKVFKGRFKEQKTPDSVWTAVPEDKVPKPRPGCCAKHGLAEAYKTSIDFPDETLSFIKSHPLMDSAVPPIADEPWFTKTRVRYRLTAISVDHSAGPYQNYTVIFVGSEAGMVLKVLAKTSPFSLNDSVLLEEIEAYNHAKCSAENEEDKKVISLQLDKDHHALYVAFSSCIIRIPLSRCERYGSCKKSCIASRDPYCGWLSQGSCGRVTPGMLAEGYEQDTEFGNTAHLGDCHGVRWEVQSGESNQMVHMNVLITCVFAAFVLGAFIAGVAVYCYRDMFVRKNRKIHKDAESAQSCTDSSGSFAKLNGLFDSPVKEYQQNIDSPKLYSNLLTSRKELPPNGDTKSMVMDHRGQPPELAALPTPESTPVLHQKTLQAMKSHSEKAHGHGASRKETPQFFPSSPPPHSPLSHGHIPSAIVLPNATHDYNTSFSNSNAHKAEKKLQNIDHPLTKSSSKRDHRRSVDSRNTLNDLLKHLNDPNSNPKAIMGDIQMAHQNLMLDPMGSMSEVPPKVPNREASLYSPPSTLPRNSPTKRVDVPTTPGVPMTSLERQRGYHKNSSQRHSISAMPKNLNSPNGVLLSRQPSMNRGGYMPTPTGAKVDYIQGTPVSVHLQPSLSRQSSYTSNGTLPRTGLKRTPSLKPDVPPKPSFVPQTPSVRPLNKYTY

SEQ ID NO: 36299 - protein, 80 aa, Homo sapiens
MKIIEEMLVLYCLILAKKSLKDMANVSVTSVINYSFFEVKKGDRIAQLICERIFYPEIEEVQALDDTERGSGGFGSTGKN

SEQ ID NO: 36300 - protein, 545 aa, Homo sapiens
LLLLTQDNREGYCFTEVLQNMCQIGSSNRNPVTKSECCCDGGRGWGPHCEICPFQGTVAFKKLCPHGRGFMTNGADIDECKVIHDVCRNGECVNDRGSYHCICKTGYTPDITGTSCVDLNECNQAPKPCNFICKNTEGSYQCSCPKGYILQEDGRSCKDLDECATKQHNCQFLCVNTIGGFTCKCPPGFTQHHTSCIDNNECTSDINLCGSKGICQNTPGSFTCECQRGFSLDQTGSSCEDVDECEGNHRCQHGCQNIIGGYRCSCPQGYLQHYQWNQCVDENECLSAHICGGASCHNTLGSYKCMCPAGFQYEQFSGGCQDINECGSAQAPCSYGCSNTEGGYLCGCPPGYFRIGQGHCVSGMGMGRGNPEPPVSGEMDDNSLSPEACYECKINGYPKRGRKRRSTNETDASNIEDQSETEANVSLASWDVEKTAIFAFNISHVSNKVRILELLPALTTLTNHNRYLIESGNEDGFFKINQKEGISYLHFTKKKPVAGTYSLQISSTPLYKKKELNQLEDKYDKDYLSGELGDNLKMKIQVLLH

SEQ ID NO: 36301 - protein, 2995 aa, Homo sapiens
LRGRYLKRWGKEGAAGAAAETVGATSGQEPQLGQLRAEPSSGCSGHDWEQPPPPPRESEPPLLHWQGPPEVGAAPGEGGRSPARGTGGGIAGPRRRGALQGAAAAADRAPGAARGGGSRWRLGIMRRGRLLEIALGFTVLLASYTSHGADANLEAGNVKETRASRAKRRGGGGHDALKGPNVCGSRYNAYCCPGWKTLPGGNQCIVPICRHSCGDGFCSRPNMCTCPSGQIAPSCGSRSIQHCNIRCMNGGSCSDDHCLCQKGYIGTHCGQPVCESGCLNGGRCVAPNRCACTYGFTGPQCERDYRTGPCFTVISNQMCQGQLSGIVCTKTLCCATVGRAWGHPCEMCPAQPHPCRRGFIPNIRTGACQDVDECQAIPGLCQGGNCINTVGSFECKCPAGHKLNEVSQKCEDIDECSTIPGICEGGECTNTVSSYFCKCPPGFYTSPDGTRCIDVRPGYCYTALTNGRCSNQLPQSITKMQCCCDAGRCWSPGVTVAPEMCPIRATEDFNKLCSVPMVIPGRPEYPPPPLGPIPPVLPVPPGFPPGPQIPVPRPPVEYLYPSREPPRVLPVNVTDYCQLVRYLCQNGRCIPTPGSYRCECNKGFQLDLRGECIDVDECEKNPCAGGECINNQGSYTCQCRAGYQSTLTRTECRDIDECLQNGRICNNGRCINTDGSFHCVCNAGFHVTRDGKNCEDMDECSIRNMCLNGMCINEDGSFKCICKPGFQLASDGRYCKDINECETPGICMNGRCVNTDGSYRCECFPGLAVGLDGRVCVDTHMRSTCYGGYKRGQCIKPLFGAVTKSECCCASTEYAFGEPCQPCPAQNSAEYQALCSSGPGMTSAGSDINECALDPDICPNGICENLRGTYKCICNSGYEVDSTGKNCVDINECVLNSLLCDNGQCRNTPGSFVCTCPKGFIYKPDLKTCEDIDECESSPCINGVCKNSPGSFICECSSESTLDPTKTICIETIKGTCWQTVIDGRCEININGATLKSQCCSSLGAAWGSPCTLCQVDPICGKGYSRIKGTQCEDIDECEVFPGVCKNGLCVNTRGSFKCQCPSGMTLDATGRICLDIRLETCFLRYEDEECTLPIAGRHRMDACCCSVGAAWGTEECEECPMRNTPEYEELCPRGPGFATKEITNGKPFFKDINECKMIPSLCTHGKCRNTIGSFKCRCDSGFALDSEERNCTDIDECRISPDLCGRGQCVNTPGDFECKCDEGYESGFMMMKNCMDIDECQRDPLLCRGGVCHNTEGSYRCECPPGHQLSPNISACIDINECELSAHLCPNGRCVNLIGKYQCACNPGYHSTPDRLFCVDIDECSIMNGGCETFCTNSEGSYECSCQPGFALMPDQRSCTDIDECEDNPNICDGGQCTNIPGEYRCLCYDGFMASEDMKTCVDVNECDLNPNICLSGTCENTKGSFICHCDMGYSGKKGKTGCTDINECEIGAHNCGKHAVCTNTAGSFKCSCSPGWIGDGIKCTDLDECSNGTHMCSQHADCKNTMGSYRCLCKEGYTGDGFTCTDLDECSENLNLCGNGQCLNAPGGYRCECDMGFVPSADGKACEDIDECSLPNICVFGTCHNLPGLFRCECEIGYELDRSGGNCTDVNECLDPTTCISGNCVNTPGSYICDCPPDFELNPTRVGCVDTRSGNCYLDIRPRGDNGDTACSNEIGVGVSKASCCCSLGKAWGTPCEMCPAVNTSEYKILCPGGEGFRPNPITVILEDIDECQELPGLCQGGKCINTFGSFQCRCPTGYYLNEDTRVCDDVNECETPGICGPGTCYNTVGNYTCICPPDYMQVNGGNNCMDMRRSLCYRNYYADNQTCDGELLFNMTKKMCCCSYNIGRAWNKPCEQCPIPSTDEFATLCGSQRPGFVIDIYTGLPVDIDECREIPGVCENGVCINMVGSFRCECPVGFFYNDKLLVCEDIDECQNGPVCQRNAECINTAGSYRCDCKPGYRFTSTGQCNDRNECQEIPNICSHGQCIDTVGSFYCLCHTGFKTNDDQTMCLDINECERDACGNGTCRNTIGSFNCRCNHGFILSHNNDCIDVDECASGNGNLCRNGQCINTVGSFQCQCNEGYEVAPDGRTCVDINECLLEPRKCAPGTCQNLDGSYRCICPPGYSLQNEKCEDIDECVEEPEICALGTCSNTEGSFKCLCPEGFSLSSSGRRCQDLRMSYCYAKFEGGKCSSPKSRNHSKQECCCALKGEGWGDPCELCPTEPDEAFRQICPYGSGIIVGPDDSAVDMDECKEPDVCKHGQCINTDGSYRCECPFGYILAGNECVDTDECSVGNPCGNGTCKNVIGGFECTCEEGFEPGPMMTCEDINECAQNPLLCAFRCVNTYGSYECKCPVGYVLREDRRMCKDEDECEEGKHDCTEKQMECKNLIGTYMCICGPGYQRRPDGEGCVDENECQTKPGICENGRCLNTRGSYTCECNDGFTASPNQDECLDNREGYCFTEVLQNMCQIGSSNRNPVTKSECCCDGGRGWGPHCEICPFQGTVAFKKLCPHGRGFMTNGADIDECKVIHDVCRNGECVNDRGSYHCICKTGYTPDITGTSCVDLNECNQAPKPCNFICKNTEGSYQCSCPKGYILQEDGRSCKDLDECATKQHNCQFLCVNTIGGFTCKCPPGFTQHHTSCIDNNECTSDINLCGSKGICQNTPGSFTCECQRGFSLDQTGSSCEDVDECEGNHRCQHGCQNIIGGYRCSCPQGYLQHYQWNQCVDENECLSAHICGGASCHNTLGSYKCMCPAGFQYEQFSGGCQDINECGSAQAPCSYGCSNTEGGYLCGCPPGYFRIGQGHCVSGMGMGRGNPEPPVSGEMDDNSLSPEACYECKINGYPKRGRKRRSTNETDASNIEDQSETEANVSLASWDVEKTAIFAFNISHVSNKVRILELLPALTTLTNHNRYLIESGNEDGFFKINQKEGISYLHFTKKKPVAGTYSLQISSTPLYKKKELNQLEDKYDKDYLSGELGDNLKMKIQVLLH

SEQ ID NO: 36302 - protein, 76 aa, Homo sapiens
MRRGRLLEIALGFTVLLASYTSHGADANLEAGNVKETRASRAKRRGGGGHDALKGIAPVYKGRGDLILWLKICREV

SEQ ID NO: 36303 - protein, 75 aa, Homo sapiens
MESCFVAQSRVQWHDLGSLQPPPPGFKRFSCLSLPRSWNYRLLKLKEMFNSKFGSIPKFYVRAPGRVNIIAFSFF

SEQ ID NO: 36304 - protein, 206 aa, Homo sapiens [sequence omitted]

SEQ ID NO: 36305 - protein, 23 aa, Homo sapiens
MEFLYIQLLATKQKSNSKQRHSN

SEQ ID NO: 36306 - protein, 11 aa, Homo sapiens
MLFMNTRSTTL

SEQ ID NO: 36307 - protein, 217 aa, Homo sapiens
MLPLKIDIIKHPNETDGKSTAIHAKLLAPEFVNIYTYPCIPEYEEKDHEVALIFPGPQSISIKDISFHLQKRIQNNVRGKNDDPDKPSFKRKRTEEQEFCDLNDSKCKGTTLKKIIFIDSTWNQTNKIFTDERLQGLLQVELKTRKTCFWRHQKGKPDTFLSTIEAIYYFLVDYHTDILKEKYRGQYDNLLFFYSFMYQLIKNAKCSGDKETGKLTH

SEQ ID NO: 36308 - protein, 236 aa, Homo sapiens
LTWFTTIVPLVLVITMTAVKDATDDYFRHKSDNQVNNRQSEVLINSKLQNEKWMNVKVGDIIKLENNQFVAADLLLLSSSEPHGLCYVETAELDGETNLKVRHALSVTSELGADISRLAGFDGIVVCEVPNNKLDKFMGILSWKDSKHSLNNEKIILRGCILRNTSWCFGMVIFAGPDTKLMQNSGKTKFKRTSIDRLMNTLVLWEIQSGRVKLGTNSELSSFGMKERRALCSPDS

SEQ ID NO: 36309 - protein, 305 aa, Homo sapiens
LHRSNLLGHKGEVAEEFGIIMKALWTGQYRYISPKDFKITIGKINDQFAGYSQQDSQELLLFLMDGLHEDLNKADNRKRYKEENNDHLDDFKAAEHAWQKHKQLNESIIVALFQGQFKSTVQCLTCHKKSRTFEAFMYLSLPLASTSKCTLQDCLRLFSKEEKLTDNNRFYCSHCRARRDSLKKIEIWKLPPVLLVHLKRFSYDGRWKQKLQTSVDFPLENLDLSQYVIGPKNNLKKYNLFSVSNHYGGLDGGHYTAYCKNAARQRWFKFDDHEVSDISVSSVKSSAAYILFYTSLGPRVTDVAT

SEQ ID NO: 36310 - protein, 31 aa, Homo sapiens
MAVKIFLSVFSVFSDDITGSQLDACWPREGK

SEQ ID NO: 36311 - protein, 48 aa, Homo sapiens
VILLGLLLLYDVFFVFITPFITKNGESIMVELAAGPFGNNEKVGMAMK

SEQ ID NO: 36312 - protein, 338 aa, Homo sapiens
LRLECRGKISAHCNLCLPDSSDSPTSASQSAMLPAGFRQKDQTQKAATGPFDREHLLMYLEKEALEQKDREDFVPFTGEKKGRVFIPKEKPIETRKEEKVTLDPELEEALASASDTELYDLAAVLGVHNLLNNPKFDEETANNKGGKGPVRNVVKGEKVKPVFEEPPNPTNVEISLQQMKANDPSLQEVNLNNIKNIPIPTLREFAKALETNTHVKKFSLAATRSNDPVAIAFADMLKVNKTLTSLNIESNFITGTGILALVEALKENDTLTEIKIDNQRQQLGTAVEMEIAQMLEENSRILKFGYQFTKQGPRTRVAAAITKNNDLVRKKRVEADRR

SEQ ID NO: 36313 - protein, 8 aa, Homo sapiens
LTVLNSKN

SEQ ID NO: 36314 - protein, 193 aa, Homo sapiens
MSKLLILILTASGDGTCALWDVESGQLLQSFHGHGADVLCLDLAPSETGNTFVSGGCDKKAMVWDMRSGQCVQAFETHESDINSVRYYPSGDAFASGSDDATCRLYDLRADREVAIYSKESIIFGASSVDFSLSGRLLFAGYNDYTINVWDVLKGSRVSILFGHENRVSTLRVSPDGTAFCSGSWDHTLRVWA

SEQ ID NO: 36315 - protein, 74 aa, Homo sapiens [sequence omitted]

SEQ ID NO: 36316 - protein, 23 aa, Homo sapiens
VERSRLLAASPGVMARPLRAASA

SEQ ID NO: 36317 - protein, 74 aa, Homo sapiens
MLTDCETDICAYSIVLYQQKYFDSGDYNMAKAKMKNKQLPTAAPDKTEVTGDHIPTPQDLPQRKPSLVASKLAG

SEQ ID NO: 36318 - protein, 1080 aa, Homo sapiens
LDVKMKPDRDTLDEYFEYDAEEFLVSLALLITEGRTPECSVKGRTESFHCPPAQSCYPVTTKHECSDKLAQCRQARRTRSEVTLLWKNNLPIMVEMMLLPDCCYSDDGPTTEGIDLNDPAIKQDALLLERWILEPVPRQNGDRFIEEKTLLLAVRSFVFFSQLSAWLSVSHGAIPRNILYRISAADVDLQWNFSQTPIEHVFPVPNVSHNVALKVSVQSLPRQSNYPVLTCSIHTNIGLYEKRIQQHKLKTHQHHNPNEAEQCGTNSSQRLCSKQTWTMAPESVLHAKSGPSPEYTAAVKNIKLYPGTGSKSDHGTSQANILGFSGIGDIKSQETSVRTLKSFSMVDSSISNRQSFWQSAGETNPLIGSLIQERQEIIARIAQHLIHCDPSTSHVSGRPFNTQESSSLHSKLFRVSQENENVGKGKEAFSMTFGSPEFSSPEDTNEGKIRLKPETPRSETCISNDFYSHMPVGETNPLIGSLLQERQDVIARIAQHLEHIDPTASHIPRQSFNMHDSSSVASKVFRSSYEDKNLLKKNKDESSVSISHTKCSLLGDISDGKNLVPNKCFTSFKNNSKEKCSLKHQTRNQCQNNPSEIIQSTYQETQNKSSSLSTSSILSQHKENNLDLTSRFKEQEMSNGIDKQYSNCTTIDKQICTNKYKEKIINENYNPKFFGNLQSDDSKKNDSKIKVTVLEMSEYLNKYESMSSNKDSKRPKTCEQNTQLNSIENYLNKDNEGFKCKKSDQLKNEQDKQEDPTNEKSQNYSQRRSIKDCLSTCEQPKNTEVLRTTLKHSNVWRKHNFHSLDGTSTRAFHPQTGLPLLSSPVPQRKTQSGCFDLDSSLLHLKSFSSRSPRPCLNIEDDPDIHEKPFLSSSAPPITSLSLLGNFEESVLNYRFDPLGIVDGFTAEVGASGAFCPTHLTLPVEVSFYSVSDDNAPSPYMGVITLESLGKRGYRVPPSGTIQVTLFNPNKTVVKMFVVIYDLRDMPANHQTFLRQRTFSVPVKQEVKRSVNKENIRHTEERLLRYLIHLRFQSSKSGKIYLHRDVRLLFSRKSMEVDSGAAYELKSYTESPTNPQFSPRC

SEQ ID NO: 36319 - protein, 967 aa, Homo sapiens
LDVKMKPDRDTLDEYFEYDAEEFLVSLALLITEGRTPECSVKGRTESFHCPPAQSCYPVTTKHECSDKLAQCRQARRTRSEVTLLWKNNLPIMVEMMLLPDCCYSDDGPTTEGIDLNDPAIKQDALLLERWILEPVPRQNGDRFIEEKTLLLAVRSFVFFSQLSAWLSVSHGAIPRNILYRISAADVDLQWNFSQTPIEHVFPVPNVSHNVALKVSVQSLPRQSNYPVLTCSIHTNIGLYEKRIQQHKLKTHQHHNPNEAEQCGTNSSQRLCSKQTWTMAPESVLHAKSGPSPEYTAAVKNIKLYPGTGSKSDHGTSQANILGFSGIGDIKSQETSVRTLKSFSMVDSSISNRQSFWQSAGETNPLIGSLIQERQEIIARIAQHLIHCDPSTSHVSGRPFNTQESSSLHSKLFRVSQENENVGKGKEAFSMTFGSPEFSSPEDTNEGKIRLKPETPRSETCISNDFYSHMPVGETNPLIGSLLQERQDVIARIAQHLEHIDPTASHIPRQSFNMHDSSSVASKVFRSSYEDKNLLKKNKDESSVSISHTKCSLLGDISDGKNLVPNKCFTSFKNNSKEKCSLKHQTRNQCQNNPSEIIQSTYQETQNKSSSLSTSSILSQHKENNLDLTSRFKEQEMSNGIDKQYSNCTTIDKQICTNKYKEKIINENYNPKFFGNLQSDDSKKNDSKIKVTVLEMSEYLNKYESMSSNKDSKRPKTCEQNTQLNSIENYLNKDNEGFKCKKSDQLKNEQDKQEDPTNEKSQNYSQRRSIKDCLSTCEQPKNTEVLRTTLKHSNVWRKHNFHSLDGTSTRAFHPQTGLPLLSSPVPQRKTQSGCFDLDSSLLHLKSFSSRSPRPCLNIEDDPDIHEKPFLSSSAPPITSLSLLGNFEESVLNYRFDPLGIVDGFTAEVGASGAFCPTHLTLPVEVSFYSVSDDNAPSPYMGVITLESLGKRGYRVPPSGTIQVVCVL

SEQ ID NO: 36320 - protein, 26 aa, Homo sapiens
LAYTLGVKELIVGVNKMNSTEPHYSQ

SEQ ID NO: 36321 - protein, 29 aa, Homo sapiens
LIWKTLLNFCYQLHSVMLTLPVHSMVVRS

SEQ ID NO: 36322 - protein, 173 aa, Homo sapiens
LFGGVTRGFNMRIEKCYFCSGPIYPGHGMMFVRNDCKVFRFCKSKCHKNFKKKRNPRKVRWTKAFRKAAGKELTVDNSFEFEKRRNEPIKYQRELWNKTIDAMKRVEEIKQKRQAKFIMNRLKKNKELQKVQDIKEVKQNIHLIRAPLAGKGKQLEEKMVQQLQEDVDMEDAP

SEQ ID NO: 36323 - protein, 85 aa, Homo sapiens
LFLSNLFLALYTGLVHQRGTLDVMSHIQKVCYNNPNKSSASIFIMMPCHSTPYYRPGAVAHACNPSTLGGRGGWITRSEDRDHPG

SEQ ID NO: 36324 - protein, 958 aa, Homo sapiens
LPGAASARSPREALLSLRERLLLFLQLFPASSRFSSSSSTVACPGRGRARPVCWKRSEMATCAVEVFGLLEDEENSRIVRVRVIAGIGLAKKDILGASDPYVRVTLYDPMNGVLTSVQTKTIKKSLNPKWNEEILFRVHPQQHRLLFEVFDENRLTRDDFLGQVDVPLYPLPTENPRLERPYTFKDFVLHPRSHKSRVKGYLRLKMTYLPKTSGSEDDNAEQAEELEPGWVVLDQPDAACHLQQQQEPSPLPPGWEERQDILGRTYYVNHESRRTQWKRPTPQDNLTDAENGNIQLQAQRAFTTRRQISEETESVDNRESSENWEIIREDEATMYSNQAFPSPPPSSNLDVPTHLAEELNARLTIFGNSAVSQPASSSNHSSRRGSLQAYTFEEQPTLPVLLPTSSGLPPGWEEKQDERGRSYYVDHNSRTTTWTKPTVQATVETSQLTSSQSSAGPQSQASTSDSGQQVTQPSEIEQGFLPKGWEVRHAPNGRPFFIDHNTKTTTWEDPRLKIPAHLRGKTSLDTSNDLGPLPPGWEERTHTDGRIFYINHNIKRTQWEDPRLENVAITGPAVPYSRDYKRKYEFFRRKLKKQNDIPNKFEMKLRRATVLEDSYRRIMGVKRADFLKARLWIEFDGEKGLDYGGVAREWFFLISKEMFNPYYGLFEYSATDNYTLQINPNSGLCNEDHLSYFKFIGRVAGMAVYHGKLLDGFFIRPFYKMMLHKPITLHDMESVDSEYYNSLRWILENDPTELDLRFIIDEELFGQTHQHELKNGGSEIVVTNKNKKEYIYLVIQWRFVNRIQKQMAAFKEGFFELIPQDLIKIFDENELELLMCGLGDVDVNDWREHTKYKNGYSANHQVIQWFWKAVLMMDSEKRIRLLQFVTGTSRVPMNGFAELYGSNGPQSFTVEQWGTPEKLPRAHTCFNRLDLPPYESFEELWDKLQMAIENTQGFDGVD

SEQ ID NO: 36325 - protein, 26 aa, Homo sapiens
MIFSFDAVQLLLACLRTEIFVMTFSP

SEQ ID NO: 36326 - protein, 1146 aa, Homo sapiens
LYPMTFSLSKPTDWGSLHTRRARNARLLACKFRAVRILGLPPGHTSQQLAPTWRQGPGPRPGPARGGARGSSRARDAAHMPVPASRVGEKTGSSDTGRLTRSLPMRQRAGCTRAPPFPRLGCQLRNGSRRRRRSVVFRAPPFPPPLSPPPQGSSQADPLRSRKENRNNLLACLESHGNSKMAELFMECEEEELEPWQKKVKEVEDDDDDEPIFVGEISSSKPAISNILNRVNPSSYSRGLKNGALSRGITAAFKPTSQHYTNPTSNPVPASPINFHPESRSSDSSVIVQPFSKPGYITNSSRVVSNKSSELLFDLTQDTGLSHYQGGPTLSMAGMSESSFLSKRPSTSEVNNVNPKKPKPSESVSGANSSAVLPSVKSPSVTSSQAMLAKGTNTSSNQSKNGTPFPRACPKCNIHFNLLDPLKNHMKYCCPDMINNFLGLAKTEFSSTVNKNTTIDSEKGKLIMLVNDFYYGKHEGDVQEEQKTHTTFKCFSCLKILKNNIRFMNHMKHHLELEKQSSESWENHTTCQHCYRQFPTPFQLQCHIESTHTPHEFSTICKICELSFETEHVLLQHMKDNHKPGEMPYVCQVCNYRSSSFSDVETHFRTSHENTKNLLCPFCLKVIKIATPYMHHYMKHQKKGIHRCTKCRLQFLTCKEKMDHKTQHHRTFIKPKQLEGLPPGTKVTIRASVGPLQSGASPTPSISASASTLQLSPPRTKNITAKNPAKSNTSKPNTVKSNASKPNTSKPNGSKSKYKPKISNMQKKQSTLASSNKKSKVNTALRNLRYRRGIHKCIECCSEIKDFANHFPTYVHCSFCRYNTSCSKAYVNHMMSFHSNRPSKRFCIFKKHSENLRGITLVCLNCDFLSDVSGLDNMATHLSQHKTHTCQVVMQKVSVCIPTSEHLSELKKEAPAKEQEPVSKEIARPNMAERETETSNSESKQDKAASSKEKNGCNANSFEGSSTTKSEESITVSDKENETCLADQETGSKNIVSCDSNIGADKVEKKKQIQHVCQEMELKMCQSSENIILSDQIKDHNSSEARFSSKNIKDLRLASDNVSIDQFLRKRHEPESVSSDVSEQGSIHLEPLTPSEVLEYEATEILQKGSGDPSAKTDEVVSDQTDDIPGGNNPSTTEATVDLEDEKERS

SEQ ID NO: 36327 - protein, 128 aa, Homo sapiens
LLRPPPLPATPASGSAARAGRAEPRRGARHCRRNYLSFRARPGPAGREVRGAASRAPTSAGLSGRRLAKGFPRRASGPIGSAGGAPGTRTRTFQNPRLPATASSTATLPFRPAFFVRPATAAGLDPGL

SEQ ID NO: 36328 - protein, 25 aa, Homo sapiens
LSLLAITLLFFSQSSTWSSAGEGTL

SEQ ID NO: 36329 - protein, 15 aa, Homo sapiens
LIYFYFLFVGVIFDL

SEQ ID NO: 36330 - protein, 93 aa, Homo sapiens
VCGQIIPWNFPLLMFAWKIAPALCCGNTVVIKPAEQTPLSALYMGALIKEAGFPPGVINILPGYGPTAGAAIASHIGIDKIAFTGSTEHISSD

SEQ ID NO: 36331 - protein, 66 aa, Homo sapiens
VSHRSWPEISSLLCLLSVIQLQKKLPRKPGPRVKRRNGHKSPVFLHSVGFMHLYPIKCPWTKPETR

SEQ ID NO: 36332 - protein, 83 aa, Homo sapiens
VRRRRRRQRQRKMVLLRVLILLLSWAAGMGDRDFDDGVLGLAWVGAPSGSSGGICEKSKLYSDVPTMGKLHSKEKPIKSSSPN

SEQ ID NO: 36333 - protein, 760 aa, Homo sapiens
VRRRRRRQRQRKMVLLRVLILLLSWAAGMGGQYGNPLNKYIRHYEGLSYNVDSLHQKHQRAKRAVSHEDQFLRLDFHAHGRHFNLRMKRDTSLFSDEFKVETSNKVLDYDTSHIYTGHIYGEEGSFSHGSVIDGRFEGFIQTRGGTFYVEPAERYIKDRTLPFHSVIYHEDDINYPHKYGPQGGCADHSVFERMRKYQMTGVEEVTQIPQEEHAANGPELLRKKRTTSAEKNTCQLYIQTDHLFFKYYGTREAVIAQISSHVKAIDTIYQTTDFSGIRNISFMVKRIRINTTADEKDPTNPFRFPNIGVEKFLELNSEQNHDDYCLAYVFTDRDFDDGVLGLAWVGAPSGSSGGICEKSKLYSDGKKKSLNTGIITVQNYGSHVPPKVSHITFAHEVGHNFGSPHDSGTECTPGESKNLGQKENGNYIMYARATSGDKLNNNKFSLCSIRNISQVLEKKRNNCFVESGQPICGNGMVEQGEECDCGYSDQCKDECCFDANQPEGRKCKLKPGKQCSPSQGPCCTAQCAFKSKSEKCRDDSDCAREGICNGFTALCPASDPKPNFTDCNRHTQVCINGQCAGSICEKYGLEECTCASSDGKDDKELCHVCCMKKMDPSTCASTGSVQWSRHFSGRTITLQPGSPCNDFRGYCDVFMRCRLVDADGPLARLKKAIFSPELYENIAEWIVAHWWAVLLMGIALIMLMAGFIKICSVHTPSSNPKLPPPKPLPGTLKRRRPPQPIQQPQRQRPRESYQMGHMRR

SEQ ID NO: 36334 - protein, 230 aa, Homo sapiens
VRRRRRRQRQRKMVLLRVLILLLSWAAGMGGQYGNPLNKYIRHYEGLSYNVDSLHQKHQRAKRAVSHEDQFLRLDFHAHGRHFNLRMKRDTSLFSDEFKVETSNKVLDYDTSHIYTGHIYGEEGSFSHGSVIDGRFEGFIQTRGGTFYVEPAERYIKDRTLPFHSVIYHEDDINYPHKYGPQGGCADHSVFERMRKYQMTGVEEVTQTLLLAPASSMSCACSPFTFCPCL

SEQ ID NO: 36335 - protein, 81 aa, Homo sapiens
VRRRRRRQRQRKMVLLRVLILLLSWAAGMGGQYGNPLNKYIRHYEGLSYNVDSLHQKHQRAKRAVSHEDQFLRLDFHAHGR

SEQ ID NO: 36336 - protein, 111 aa, Homo sapiens
VRRRRRRQRQRKMVLLRVLILLLSWAAGMGGQYGNPLNKYIRHYEGLSYNVDSLHQKHQRAKRAVSHEDQFLRLDFHAHGRWSLALLTKLECSSVISAHCSLHLPDISTYE

SEQ ID NO: 36337 - protein, 15 aa, Homo sapiens
MASKALAAEKWPRSP

SEQ ID NO: 36338 - protein, 195 aa, Homo sapiens [sequence omitted]

SEQ ID NO: 36339 - protein, 398 aa, Homo sapiens
LFVFGSLAPHPVAFPFLVVVLGMEPCPSSAPPPFYPGVGEVAGLRWFSIYDQRPSWYRTKKLGLLDIGSLDYQEFVVDIESRLRMEGVELKEEWQDEDFPIPLPEDDSIEADILAITGPEDQPGSLEVNGNKVRKKLMAPDISLTLDPSDGSVLSDDLDESGEIDLDGLDTPSENSNEFEWEDDLPKPKTTEVIRKGSITEYTAAEEKEDGRRWRMFRIGEQDHRVDMKAIEPYKKVISHGGYYGDGLNAIVVFAVCFMPESSQPNYRYLMDNLFKYVIGTLELLVAENYMIVYLNGATTRRKMPSLGWLRKCYQQIDRRLRKNLKSLIIVHPSWFIRTLLAVTRPFISSKFSQKIRYVFNLAELAELVPMEYVGIPECIKQVDQELNGKQDEPKNEQ

SEQ ID NO: 36340 - protein, 53 aa, Homo sapiens
MEYVGIPECIKQYEEEKFKKKQKRDGVLPCCPGWSQTPGQAVRPPRPSKVLGS

SEQ ID NO: 36341 - protein, 358 aa, Homo sapiens
LLSIWGRSQLSAHGPASFKMSTVHEILCKLSLEGDHSTPPSAYGSVKAYTNFDAERDALNIETAIKTKGVDEVTIVNILTNRSNAQRQDIAFAYQRRTKKELASALKSALSGHLETVILGLLKTPAQYDASELKASMKGLGTDEDSLIEIICSRTNQELQEINRVYKEMYKTDLEKDIISDTSGDFRKLMVALAKGRRAEDGSVIDYELIDQDARDLYDAGVKRKGTDVPKWISIMTERSVPHLQKVFDRYKSYSPYDMLESIRKEVKGDLENAFLNLVQCIQNKPLYFADRLYDSMKGKGTRDKVLIRIMVSRSEVDMLKIRSEFKRKYGKSLYYYIQQDTKGDYQKALLYLCGGDD

SEQ ID NO: 36342 - protein, 236 aa, Homo sapiens
LLSIWGRSQLSAHGPASFKMSTVHEILCKLSLEGDHSTPPSAYGSVKAYTNFDAERDALNIETAIKTKGVDEVTIVNILTNRSNAQRQDIAFAYQRRTKKELASALKSALSGHLETVILGLLKTPAQYDASELKASMKGLGTDEDSLIEIICSRTNQELQEINRVYKEMYKTDLEKDIISDTSGDFRKLMVALAKVGFPVSFFALASSQGKSHTSFYTWSELTKSPVPASEIQLHF

SEQ ID NO: 36343 - protein, 131 aa, Homo sapiens
MSTVHEILCKLSLEGDHSTPPSAYGSVKAYTNFDAERDALNIETAIKTKGVDEVTIVNILTNRSNAQRQDIAFAYQRRTKKGLALSPRLDCSGVIRLTATSAMWTQMIHLSLPNCWDYSHKPPHPKPRSWF

SEQ ID NO: 36344 - protein, 19 aa, Homo sapiens
LEGGQATSAVLERPKHTWL

SEQ ID NO: 36345 - protein, 65 aa, Homo sapiens
VLHVIFLKYRFVIIFHILLSIKSEKFNVIVGSDSSTLGYTFTRRFIYFLTMIEEHNLGKLPMSVR

SEQ ID NO: 36346 - protein, 3759 aa, Homo sapiens
LCLSATMVLESVVADLLNRFLGDYVENLNKSQLKLGIWGGNVALDNLQIKENALSELDVPFKVKAGQIDKLTLKIPWKNLYGEAVVATLEGLYLLVVPGASIKYDAVKEEKSLQDVKQKELSRIEEALQKAAEKGTHSGEFIYGLENFVYKDIKPGRKRKKHKKHFKKPFKGLDRSKDKPKEAKKDTFVEKLATQVIKNVQVKITDIHIKYEDDVTDPKRPLSFGVTLGELSLLTANEHWTPCILNEADKIIYKLIRLDSLSAYWNVNCSMSYQRSREQILDQLKNEILTSGNIPPNYQYIFQPISASAKLYMNPYAESELKTPKLDCNIEIQNIAIELTKPQYLSMIDLLESVDYMVRNAPYRKYKPYLPLHTNGRRWWKYAIDSVLEVHIRRYTQMWSWSNIKKHRQLLKSYKIAYKNKLTQSKVSEEIQKEIQDLEKTLDVFNIILARQQAQVEVIRSGQKLRKKSADTGEKRGGWFSGLWGKKESKKKDEESLIPETIDDLMTPEEKDKLFTAIGYSESTHNLTLPKQYVAHIMTLKLVSTSVTIRENKNIPEILKIQIIGLGTQVSQRPGAQALKVEAKLEHWYITGLRQQDIVPSLVASIGDTTSSLLKIKFETNPEDSPADQTLIVQSQPVEVIYDAKTVNAVVEFFQSNKGLDLEQITSATLMKLEEIKERTATGLTHIIETRKVLDLRINLKPSYLVVPQTGFHHEKSDLLILDFGTFQLNSKDQGLQKTTNSSLEEIMDKAYDKFDVEIKNVQLLFARAEETWKKCRFQHPSTMHILQPMDIHVELAKAMVEKDIRMARFKVSGGLPLMHVRISDQKMKDVLYLMNSIPLPQKSSAQSPERQVSSIPIISGGTKGLLGTSLLLDTVESESDDEYFDAEDGEPQTCKSMKGSELKKAAEVPNEELINLLLKFEIKEVILEFTKQQKEEDTILVFNVTQLGTEATMRTFDLTVVSYLKKISLDYHEIEGSKRKPLHLISSSDKPGLDLLKVEYIKADKNGPSFQTAFGKTEQTVKVAFSSLNLLLQTQALVASINYLTTIIPSDDQSISVAKEVQISTEKQQKNSTLPKAIVSSRDSDIIDFRLFAKLNAFCVIVCNEKNNIAEIKIQGLDSSLSLQSRKQSLFARLENIIVTDVDPKTVHKKAVSIMGNEVFRFNLDLYPDATEGDLYTDMSKVDGVLSLNVGCIQIVYLHKFLMSLLNFLNNFQTAKESLSAATAQAAERAATSVKDLAQRSFRVSINIDLKAPVIVIPQSSISTNAVVVDLGLIRVHNQFSLVSDEDYLNPPVIDRMDVQLTKLTLYRTVIQPGIYHPDIQLLHPINLEFLVNRNLAASWYHKVPVVEIKGHLDSMNVSLNQEDLNLLFRILTENLCEGTEDLDKVKPRVQETGEIKEPLEISISQDVHDSKNTLTTGVEEIRSVDIINMLLNFEIKEVVVTLMKKSEKKGRPLHELNVLQLGMEAKVKTYDMTAKAYLKKISMQCFDFTDSKGEPLHIINSSNVTDEPLLKMLLTKADSDGPEFKTIHDSTKQRLKVSFASLDLVLHLEALLSFMDFLSSAAPFSEPSSSEKESELKPLVGESRSIAVKAVSSNISQKDVFDLKITAELNAFNVFVCDQKCNIADIKIHGMDASISVKPKQTDVFARLKDIIVMNVDLQSIHKKAVSILGDEVFRFQLTLYPDATEGEAYADMSKVDGKLSFKVGCIQIVYVHKFFMSLLNFLNNFQTAKEALSTATVQAAERAASSMKDLAQKSFRLLMDINLKAPVIIIPQSSVSPNAVIADLGLIRVENKFSLVPMEHYSLPPVIDKMNIELTQLKLSRTILQASLPQNDIEILKPVNMLLSIQRNLAAAWYVQIPGMEIKGKLKPMQVALSEDDLTVLMKILLENLGEASSQPSPTQSVQETVRVRKVDVSSVPDHLKEQEDWTDSKLSMNQIVSLQFDFHFESLSIILYNNDINQESGVAFHNDSFQLGELRLHLMASSGKMFKDGSMNVSVKLKTCTLDDLREGIERATSRMIDRKNDQDNNSSMIDISYKQDKNGSQIDAVLDKLYVCASVEFLMTVADFFIKAVPQSPENVAKETQILPRQTATGKVKIEKDDSVRPNMTLKAMITDPEVVFVASLTKADAPALTASFQCNLSLSTSKLEQMMEASVRDLKVLACPFLREKRGKNITTVLQPCSLFMEKCTWASGKQNINIMVKEFIIKISPIILNTVLTIMAALSPKTKEDGSKDTSKEMENLWGIKSINDYNTWFLGVDTATEITESFKGIEHSLIEENCGVVVESIQVTLECGLGHRTVPLLLAESKFSGNIKNWTSLMAAVADVTLQVHYYNEIHAVWEPLIERVEGKRQWNLRLDVKKNPVQDKSLLPGDDFIPEPQMAIHISSGNTMNITISKSCLNVFNNLAKGFSEGTASTFDYSLKDRAPFTVKNAVGVPIKVKPNCNLRVMGFPEKSDIFDVDAGQNLELEYASMVPSSQGNLSILSRQESSFFTLTIVPHGYTEVANIPVARPGRRLYNVRNPNASHSDSVLVQIDATEGNKVITLRSPLQIKNHFSIAFIIYKFVKNVKLLERIGIARPEEEFHVPLDSYRCQLFIQPAGILEHQYKESTTYISWKEELHRSREVRCMLQCPSVEVSFLPLIVNTVALPDELSYICTHGEDWDVAYIIHLYPSLTLRNLLPYSLRYLLEGTAETHELAEGSTADVLHSRISGEIMELVLVKYQGKNWNGHFRIRDTLPEFFPVCFSSDSTEVTTVDLSVHVRRIGSRMVLSVFSPYWLINKTTRVLQYRSEDIHVKHPADFRDIILFSFKKKNIFTKNKVQLKISTSAWSSSFSLDTVGSYGCVKCPANNMEYLVGVSIKMSSFNLSRIVTLTPFCTIANKSSLELEVGEIASDGSMPTNKWNYIASSECLPFWPESLSGKLCVRVVGCEGSSKPFFYNRQDNGTLLSLEDLNGGILVDVNTAEHSTVITFSDYHEGSAPALIMNHTPWDILTYKQSGSPEEMVLLPRQARLFAWADPTGTRKLTWTYAANVGEHDLLKDGCGQFPYDANIQIHWVSFLDGRQRVLLFTDDVALVSKALQAEEMEQADYEITLSLHSLGLSLVNNESKQEVSYIGITSSGVVWEVKPKQKWKPFSQKQIILLEQSYQKHQISRDHGWIKLDNNFEVNFDKDPMEMRLPIRSPIKRDFLSGIQIEFKQSSHQRSLRARLYWLQVDNQLPGAMFPVVFHPVAPPKSIALDSEPKPFIDVSVITRFNEYSKVLQFKYFMVLIQEMALKIDQGFLGAIIALFTPTTDPEAERRRTKLIQQDIDALNAELMETSMTDMSILSFFEHFHISPVKLHLSLSLGSGGEESDKEKQEMFAVHSVNLLLKSIGATLTDVDDLIFKLAYYEIRYQFYKRDQLIWSVVRHYSEQFLKQMYVLVLGLDVLGNPFGLIRGLSEGVEALFYEPFQGAVQGPEEFAEGLVIGVRSLFGHTVGGAAGVVSRITGSVGKGLAAITMDKEYQQKRREELSRQPRDFGDSLARGGKGFLRGVVGGVTGIITKPVEGAKKEGAAGFFKGIGKGLVGAVARPTGGIVDMASSTFQGIQRAAESTEEVSSLRPPRLIHEDGIIRPYDRQESEGSDLLENHIKKLEGETYRYHCAIPGSKKTILMVTNRRVLCIKEVEILGLMCVDWQCPFEDFVFPPSVSENVLKISVKEQGLFHKKDSANQGCVRKVYLKDTATAERACNAIEDAQSTRQQQKLMKQSSVRLLRPQLPS

SEQ ID NO: 36347 - protein, 3742 aa, Homo sapiens
LRRRGCHLQRWSQPSAAPGGSGSSLSLCLSATMVLESVVADLLNRFLGDYVENLNKSQLKLGIWGGNVALDNLQIKENALSELDVPFKVKAGQIDKLTLKIPWKNLYGEAVVATLEGLYLLVVPGASIKYDAVKEEKSLQDVKQKELSRIEEALQKAAEKDKPKEAKKDTFVEKLATQVIKNVQVKITDIHIKYEDDVTDPKRPLSFGVTLGELSLLTANEHWTPCILNEADKIIYKLIRLDSLSAYWNVNCSMSYQRSREQILDQLKNEILTSGNIPPNYQYIFQPISASAKLYMNPYAESELKTPKLDCNIEIQNIAIELTKPQYLSMIDLLESVDYMVRNAPYRKYKPYLPLHTNGRRWWKYAIDSVLEVHIRRYTQMWSWSNIKKHRQLLKSYKIAYKNKLTQSKVSEEIQKEIQDLEKTLDVFNIILARQQAQVEVIRSGQKLRKKSADTGEKRGGWFSGLWGKKESKKKDEESLIPETIDDLMTPEEKDKLFTAIGYSESTHNLTLPKQYVAHIMTLKLVSTSVTIRENKNIPEILKIQIIGLGTQVSQRPGAQALKVEAKLEHWYITGLRQQDIVPSLVASIGDTTSSLLKIKFETNPEDSPADQTLIVQSQPVEVIYDAKTVNAVVEFFQSNKGLDLEQITSATLMKLEEIKERTATGLTHIIETRKVLDLRINLKPSYLVVPQTGFHHEKSDLLILDFGTFQLNSKDQGLQKTTNSSLEEIMDKAYDKFDVEIKNVQLLFARAEETWKKCRFQHPSTMHILQPMDIHVELAKAMVEKDIRMARFKVSGGLPLMHVRISDQKMKDVLYLMNSIPLPQKSSAQSPERQVSSIPIISGGTKGLLGTSLLLDTVESESDDEYFDAEDGEPQTCKSMKGSELKKAAEVPNEELINLLLKFEIKEVILEFTKQQKEEDTILVFNVTQLGTEATMRTFDLTVVSYLKKISLDYHEIEGSKRKPLHLISSSDKPGLDLLKVEYIKADKNGPSFQTAFGKTEQTVKVAFSSLNLLLQTQALVASINYLTTIIPSDDQSISVAKEVQISTEKQQKNSTLPKAIVSSRDSDIIDFRLFAKLNAFCVIVCNEKNNIAEIKIQGLDSSLSLQSRKQSLFARLENIIVTDVDPKTVHKKAVSIMGNEVFRFNLDLYPDATEGDLYTDMSKVDGVLSLNVGCIQIVYLHKFLMSLLNFLNNFQTAKESLSAATAQAAERAATSVKDLAQRSFRVSINIDLKAPVIVIPQSSISTNAVVVDLGLIRVHNQFSLVSDEDYLNPPVIDRMDVQLTKLTLYRTVIQPGIYHPDIQLLHPINLEFLVNRNLAASWYHKVPVVEIKGHLDSMNVSLNQEDLNLLFRILTENLCEGTEDLDKVKPRVQETGEIKEPLEISISQDVHDSKNTLTTGVEEIRSVDIINMLLNFEIKEVVVTLMKKSEKKGRPLHELNVLQLGMEAKVKTYDMTAKAYLKKISMQCFDFTDSKGEPLHIINSSNVTDEPLLKMLLTKADSDGPEFKTIHDSTKQRLKVSFASLDLVLHLEALLSFMDFLSSAAPFSEPSSSEKESELKPLVGESRSIAVKAVSSNISQKDVFDLKITAELNAFNVFVCDQKCNIADIKIHGMDASISVKPKQTDVFARLKDIIVMNVDLQSIHKKAVSILGDEVFRFQLTLYPDATEGEAYADMSKVDGKLSFKVGCIQIVYVHKFFMSLLNFLNNFQTAKEALSTATVQAAERAASSMKDLAQKSFRLLMDINLKAPVIIIPQSSVSPNAVIADLGLIRVENKFSLVPMEHYSLPPVIDKMNIELTQLKLSRTILQASLPQNDIEILKPVNMLLSIQRNLAAAWYVQIPGMEIKGKLKPMQVALSEDDLTVLMKILLENLGEASSQPSPTQSVQETVRVRKVDVSSVPDHLKEQEDWTDSKLSMNQIVSLQFDFHFESLSIILYNNDINQESGVAFHNDSFQLGELRLHLMASSGKMFKDGSMNVSVKLKTCTLDDLREGIERATSRMIDRKNDQDNNSSMIDISYKQDKNGSQIDAVLDKLYVCASVEFLMTVADFFIKAVPQSPENVAKETQILPRQTATGKVKIEKDDSVRPNMTLKAMITDPEVVFVASLTKADAPALTASFQCNLSLSTSKLEQMMEASVRDLKVLACPFLREKRGKNITTVLQPCSLFMEKCTWASGKQNINIMVKEFIIKISPIILNTVLTIMAALSPKTKEDGSKDTSKEMENLWGIKSINDYNTWFLGVDTATEITESFKGIEHSLIEENCGVVVESIQVTLECGLGHRTVPLLLAESKFSGNIKNWTSLMAAVADVTLQVHYYNEIHAVWEPLIERVEGKRQWNLRLDVKKNPVQDKSLLPGDDFIPEPQMAIHISSGNTMNITISKSCLNVFNNLAKGFSEGTASTFDYSLKDRAPFTVKNAVGVPIKVKPNCNLRVMGFPEKSDIFDVDAGQNLELEYASMVPSSQGNLSILSRQESSFFTLTIVPHGYTEVANIPVARPGRRLYNVRNPNASHSDSVLVQIDATEGNKVITLRSPLQIKNHFSIAFIIYKFVKNVKLLERIGIARPEEEFHVPLDSYRCQLFIQPAGILEHQYKESTTYISWKEELHRSREVRCMLQCPSVEVSFLPLIVNTVALPDELSYICTHGEDWDVAYIIHLYPSLTLRNLLPYSLRYLLEGTAETHELAEGSTADVLHSRISGEIMELVLVKYQGKNWNGHFRIRDTLPEFFPVCFSSDSTEVTTVDLSVHVRRIGSRMVLSVFSPYWLINKTTRVLQYRSEDIHVKHPADFRDIILFSFKKKNIFTKNKVQLKISTSAWSSSFSLDTVGSYGCVKCPANNMEYLVGVSIKMSSFNLSRIVTLTPFCTIANKSSLELEVGEIASDGSMPTNKWNYIASSECLPFWPESLSGKLCVRVVGCEGSSKPFFYNRQDNGTLLSLEDLNGGILVDVNTAEHSTVITFSDYHEGSAPALIMNHTPWDILTYKQSGSPEEMVLLPRQARLFAWADPTGTRKLTWTYAANVGEHDLLKDGCGQFPYDANIQIHWVSFLDGRQRVLLFTDDVALVSKALQAEEMEQADYEITLSLHSLGLSLVNNESKQEVSYIGITSSGVVWEVKPKQKWKPFSQKQIILLEQSYQKHQISRDHGWIKLDNNFEVNFDKDPMEMRLPIRSPIKRDFLSGIQIEFKQSSHQRSLRARLYWLQVDNQLPGAMFPVVFHPVAPPKSIALDSEPKPFIDVSVITRFNEYSKVLQFKYFMVLIQEMALKIDQGFLGAIIALFTPTTDPEAERRRTKLIQQDIDALNAELMETSMTDMSILSFFEHFHISPVKLHLSLSLGSGGEESDKEKQEMFAVHSVNLLLKSIGATLTDVDDLIFKLAYYEIRYQFYKRDQLIWSVVRHYSEQFLKQMYVLVLGLDVLGNPFGLIRGLSEGVEALFYEPFQGAVQGPEEFAEGLVIGVRSLFGHTVGGAAGVVSRITGSVGKGLAAITMDKEYQQKRREELSRQPRDFGDSLARGGKGFLRGVVGGVTGIITKPVEGAKKEGAAGFFKGIGKGLVGAVARPTGGIVDMASSTFQGIQRAAESTEEVSSLRPPRLIHEDGIIRPYDRQESEGSDLLENHIKKLEGETYRYHCAIPGSKKTILMVTNRRVLCIKEVEILGLMCVDWQCPFEDFVFPPSVSENVLKISVKEQGLFHKKDSANQGCVRKVYLKDTATAERACNAIEDAQSTRQQQKLMKQSSVRLLRPQLPS

SEQ ID NO: 36348 - protein, 3634 aa, Homo sapiens
LCLSATMVLESVVADLLNRFLGDYVENLNKSQLKLGIWGGNVALDNLQIKENALSELDVPFKVKAGQIDKLTLKIPWKNLYGEAVVATLEGLYLLVVPGASIKYDAVKEEKSLQDVKQKELSRIEEALQKAAEKGTHSGEFIYGLENFVYKDIKPGRKRKKHKKHFKKPFKGLDRSKDKPKEAKKDTFVEKLATQVIKNVQVKITDIHIKYEDDVTDPKRPLSFGVTLGELSLLTANEHWTPCILNEADKIIYKLIRLDSLSAYWNVNCSMSYQRSREQILDQLKNEILTSGNIPPNYQYIFQPISASAKLYMNPYAESELKTPKLDCNIEIQNIAIELTKPQYLSMIDLLESVDYMVRNAPYRKYKPYLPLHTNGRRWWKYAIDSVLEVHIRRYTQMWSWSNIKKHRQLLKSYKIAYKNKLTQSKVSEEIQKEIQDLEKTLDVFNIILARQQAQVEVIRSGQKLRKKSADTGEKRGGWFSGLWGKKESKKKDEESLIPETIDDLMTPEEKDKLFTAIGYSESTHNLTLPKQYVAHIMTLKLVSTSVTIRENKNIPEILKIQIIGLGTQVSQRPGAQALKVEAKLEHWYITGLRQQDIVPSLVASIGDTTSSLLKIKFETNPEDSPADQTLIVQSQPVEVIYDAKTVNAVVEFFQSNKGLDLEQITSATLMKLEEIKERTATGLTHIIETRKVLDLRINLKPSYLVVPQTGFHHEKSDLLILDFGTFQLNSKDQGLQKTTNSSLEEIMDKAYDKFDVEIKNVQLLFARAEETWKKCRFQHPSTMHILQPMDIHVELAKAMVEKDIRMARFKVSGGLPLMHVRISDQKMKDVLYLMNSIPLPQKSSAQSPERQVSSIPIISGGTKGLLGTSLLLDTVESESDDEYFDAEDGEPQTCKSMKGSELKKAAEVPNEELINLLLKFEIKEVILEFTKQQKEEDTILVFNVTQLGTEATMRTFDLTVVSYLKKISLDYHEIEGSKRKPLHLISSSDKPGLDLLKVEYIKADKNGPSFQTAFGKTEQTVKVAFSSLNLLLQTQALVASINYLTTIIPSDDQSISVAKEVQISTEKQQKNSTLPKAIVSSRDSDIIDFRLFAKLNAFCVIVCNEKNNIAEIKIQGLDSSLSLQSRKQSLFARLENIIVTDVDPKTVHKKAVSIMGNEVFRFNLDLYPDATEGDLYTDMSKVDGVLSLNVGCIQIVYLHKFLMSLLNFLNNFQTAKESLSAATAQAAERAATSVKDLAQRSFRVSINIDLKAPVIVIPQSSISTNAVVVDLGLIRVHNQFSLVSDEDYLNPPVIDRMDVQLTKLTLYRTVIQPGIYHPDIQLLHPINLEFLVNRNLAASWYHKVPVVEIKGHLDSMNVSLNQEDLNLLFRILTENLCEGTEDLDKVKPRVQETGEIKEPLEISISQDVHDSKNTLTTGVEEIRSVDIINMLLNFEIKEVVVTLMKKSEKKGRPLHELNVLQLGMEAKVKTYDMTAKAYLKKISMQCFDFTDSKGEPLHIINSSNVTDEPLLKMLLTKADSDGPEFKTIHDSTKQRLKVSFASLDLVLHLEALLSFMDFLSSAAPFSEPSSSEKESELKPLVGESRSIAVKAVSSNISQKDVFDLKITAELNAFNVFVCDQKCNIADIKIHGMDASISVKPKQTDVFARLKDIIVMNVDLQSIHKKAVSILGDEVFRFQLTLYPDATEGEAYADMSKVDGKLSFKVGCIQIVYVHKFFMSLLNFLNNFQTAKEALSTATVQAAERAASSMKDLAQKSFRLLMDINLKAPVIIIPQSSVSPNAVIADLGLIRVENKFSLVPMEHYSLPPVIDKMNIELTQLKLSRTILQASLPQNDIEILKPVNMLLSIQRNLAAAWYVQIPGMEIKGKLKPMQVALSEDDLTVLMKILLENLGEASSQPSPTQSVQETVRVRKVDVSSVPDHLKEQEDWTDSKLSMNQIVSLQFDFHFESLSIILYNNDINQESGVAFHNDSFQLGELRLHLMASSGKMFKDGSMNVSVKLKTCTLDDLREGIERATSRMIDRKNDQDNNSSMIDISYKQDKNGSQIDAVLDKLYVCASVEFLMTVADFFIKAVPQSPENVAKETQILPRQTATGKVKIEKDDSVRPNMTLKAMITDPEVVFVASLTKADAPALTASFQCNLSLSTSKLEQMMEASVRDLKVLACPFLREKRGKNITTVLQPCSLFMEKCTWASGKQNINIMVKEFIIKISPIILNTVLTIMAALSPKTKEDGSKDTSKEMENLWGIKSINDYNTWFLGVDTATEITESFKGIEHSLIEENCGVVVESIQVTLECGLGHRTVPLLLAESKFSGNIKNWTSLMAAVADVTLQVHYYNEIHAVWEPLIERVEGKRQWNLRLDVKKNPVQDKSLLPGDDFIPEPQMAIHISSGNTMNITISKSCLNVFNNLAKGFSEGTASTFDYSLKDRAPFTVKNAVGVPIKVKPNCNLRVMGFPEKSDIFDVDAGQNLELEYASMVPSSQGNLSILSRQESSFFTLTIVPHGYTEVANIPVARPGRRLYNVRNPNASHSDSVLVQIDATEGNKVITLRSPLQIKNHFSIAFIIYKFVKNVKLLERIGIARPEEEFHVPLDSYRCQLFIQPAGILEHQYKESTTYISWKEELHRSREVRCMLQCPSVEVSFLPLIVNTVALPDELSYICTHGEDWDVAYIIHLYPSLTLRNLLPYSLRYLLEGTAETHELAEGSTADVLHSRISGEIMELVLVKYQGKNWNGHFRIRDTLPEFFPVCFSSDSTEVTTVDLSVHVRRIGSRMVLSVFSPYWLINKTTRVLQYRSEDIHVKHPADFRDIILFSFKKKNIFTKNKVQLKISTSAWSSSFSLDTVGSYGCVKCPANNMEYLVGVSIKMSSFNLSRIVTLTPFCTIANKSSLELEVGEIASDGSMPTNKWNYIASSECLPFWPESLSGKLCVRVVGCEGSSKPFFYNRQDNGTLLSLEDLNGGILVDVNTAEHSTVITFSDYHEGSAPALIMNHTPWDILTYKQSGSPEEMVLLPRQARLFAWADPTGTRKLTWTYAANVGEHDLLKDGCGQFPYDANIQIHWVSFLDGRQRVLLFTDDVALVSKALQAEEMEQADYEITLSLHSLGLSLVNNESKQEVSYIGITSSGVVWEVKPKQKWKPFSQKQIILLEQSYQKHQISRDHGWIKLDNNFEVNFDKDPMEMRLPIRSPIKRDFLSGIQIEFKQSSHQRSLRARLYWLQVDNQLPGAMFPVVFHPVAPPKSIALDSEPKPFIDVSVITRFNEYSKVLQFKYFMVLIQEMALKIDQGFLGAIIALFTPTTDPEAERRRTKLIQQDIDALNAELMETSMTDMSILSFFEHFHISPVKLHLSLSLGSGGEESDKEKQEMFAVHSVNLLLKSIGATLTDVDDLIFKLAYYEIRYQFYKRDQLIWSVVRHYSEQFLKQMYVLVLGLDVLGNPFGLIRGLSEGVEALFYEPFQGAVQGPEEFAEGLVIGVRSLFGHTVGGAAGVVSRITGSVGKGLAAITMDKEYQQKRREELSRQPRDFGDSLARGGKGFLRGVVGGVTGIITKPVEGAKKEGAAGFFKGIGKGLVGAVARPTGGIVDMASSTFQGIQRAAESTEEVSSLRPPRLIHEDGIIRPYDRQESEGSDLLEQELEIQE

SEQ ID NO: 36349 - protein, 3591 aa, Homo sapiens
LCLSATMVLESVVADLLNRFLGDYVENLNKSQLKLGIWGGNVALDNLQIKENALSELDVPFKVKAGQIDKLTLKIPWKNLYGEAVVATLEGLYLLVVPGASIKYDAVKEEKSLQDVKQKELSRIEEALQKAAEKDKPKEAKKDTFVEKLATQVIKNVQVKITDIHIKYEDDVTDPKRPLSFGVTLGELSLLTANEHWTPCILNEADKIIYKLIRLDSLSAYWNVNCSMSYQRSREQILDQLKNEILTSGNIPPNYQYIFQPISASAKLYMNPYAESELKTPKLDCNIEIQNIAIELTKPQYLSMIDLLESVDYMVRNAPYRKYKPYLPLHTNGRRWWKYAIDSVLEVHIRRYTQMWSWSNIKKHRQLLKSYKIAYKNKLTQSKVSEEIQKEIQDLEKTLDVFNIILARQQAQVEVIRSGQKLRKKSADTGEKRGGWFSGLWGKKESKKKDEESLIPETIDDLMTPEEKDKLFTAIGYSESTHNLTLPKQYVAHIMTLKLVSTSVTIRENKNIPEILKIQIIGLGTQVSQRPGAQALKVEAKLEHWYITGLRQQDIVPSLVASIGDTTSSLLKIKFETNPEDSPADQTLIVQSQPVEVIYDAKTVNAVVEFFQSNKGLDLEQITSATLMKLEEIKERTATGLTHIIETRKVLDLRINLKPSYLVVPQTGFHHEKSDLLILDFGTFQLNSKDQGLQKTTNSSLEEIMDKAYDKFDVEIKNVQLLFARAEETWKKCRFQHPSTMHILQPMDIHVELAKAMVEKDIRMARFKVSGGLPLMHVRISDQKMKDVLYLMNSIPLPQKSSAQSPERQVSSIPIISGGTKGLLGTSLLLDTVESESDDEYFDAEDGEPQTCKSMKGSELKKAAEVPNEELINLLLKFEIKEVILEFTKQQKEEDTILVFNVTQLGTEATMRTFDLTVVSYLKKISLDYHEIEGSKRKPLHLISSSDKPGLDLLKVEYIKADKNGPSFQTAFGKTEQTVKVAFSSLNLLLQTQALVASINYLTTIIPSDDQSISVAKEVQISTEKQQKNSTLPKAIVSSRDSDIIDFRLFAKLNAFCVIVCNEKNNIAEIKIQGLDSSLSLQSRKQSLFARLENIIVTDVDPKTVHKKAVSIMGNEVFRFNLDLYPDATEGDLYTDMSKVDGVLSLNVGCIQIVYLHKFLMSLLNFLNNFQTAKESLSAATAQAAERAATSVKDLAQRSFRVSINIDLKAPVIVIPQSSISTNAVVVDLGLIRVHNQFSLVSDEDYLNPPVIDRMDVQLTKLTLYRTVIQPGIYHPDIQLLHPINLEFLVNRNLAASWYHKVPVVEIKGHLDSMNVSLNQEDLNLLFRILTENLCEGTEDLDKVKPRVQETGEIKEPLEISISQDVHDSKNTLTTGVEEIRSVDIINMLLNFEIKEVVVTLMKKSEKKGRPLHELNVLQLGMEAKVKTYDMTAKAYLKKISMQCFDFTDSKGEPLHIINSSNVTDEPLLKMLLTKADSDGPEFKTIHDSTKQRLKVSFASLDLVLHLEALLSFMDFLSSAAPFSEPSSSEKESELKPLVGESRSIAVKAVSSNISQKDVFDLKITAELNAFNVFVCDQKCNIADIKIHGMDASISVKPKQTDVFARLKDIIVMNVDLQSIHKKAVSILGDEVFRFQLTLYPDATEGEAYADMSKVDGKLSFKVGCIQIVYVHKFFMSLLNFLNNFQTAKEALSTATVQAAERAASSMKDLAQKSFRLLMDINLKAPVIIIPQSSVSPNAVIADLGLIRVENKFSLVPMEHYSLPPVIDKMNIELTQLKLSRTILQASLPQNDIEILKPVNMLLSIQRNLAAAWYVQIPGMEIKGKLKPMQVALSEDDLTVLMKILLENLGEASSQPSPTQSVQETVRVRKVDVSSVPDHLKEQEDWTDSKLSMNQIVSLQFDFHFESLSIILYNNDINQESGVAFHNDSFQLGELRLHLMASSGKMFKDGSMNVSVKLKTCTLDDLREGIERATSRMIDRKNDQDNNSSMIDISYKQDKNGSQIDAVLDKLYVCASVEFLMTVADFFIKAVPQSPENVAKETQILPRQTATGKVKIEKDDSVRPNMTLKAMITDPEVVFVASLTKADAPALTASFQCNLSLSTSKLEQMMEASVRDLKVLACPFLREKRGKNITTVLQPCSLFMEKCTWASGKQNINIMVKEFIIKISPIILNTVLTIMAALSPKTKEDGSKDTSKEMENLWGIKSINDYNTWFLGVDTATEITESFKGIEHSLIEENCGVVVESIQVTLECGLGHRTVPLLLAESKFSGNIKNWTSLMAAVADVTLQVHYYNEIHAVWEPLIERVEGKRQWNLRLDVKKNPVQDKSLLPGDDFIPEPQMAIHISSGNTMNITISKSCLNVFNNLAKGFSEGTASTFDYSLKDRAPFTVKNAVGVPIKVKPNCNLRVMGFPEKSDIFDVDAGQNLELEYASMVPSSQGNLSILSRQESSFFTLTIVPHGYTEVANIPVARPGRRLYNVRNPNASHSDSVLVQIDATEGNKVITLRSPLQIKNHFSIAFIIYKFVKNVKLLERIGIARPEEEFHVPLDSYRCQLFIQPAGILEHQYKESTTYISWKEELHRSREVRCMLQCPSVEVSFLPLIVNTVALPDELSYICTHGEDWDVAYIIHLYPSLTLRNLLPYSLRYLLEGTAETHELAEGSTADVLHSRISGEIMELVLVKYQGKNWNGHFRIRDTLPEFFPVCFSSDSTEVTTVDLSVHVRRIGSRMVLSVFSPYWLINKTTRVLQYRSEDIHVKHPADFRDIILFSFKKKNIFTKNKVQLKISTSAWSSSFSLDTVGSYGCVKCPANNMEYLVGVSIKMSSFNLSRIVTLTPFCTIANKSSLELEVGEIASDGSMPTNKWNYIASSECLPFWPESLSGKLCVRVVGCEGSSKPFFYNRQDNGTLLSLEDLNGGILVDVNTAEHSTVITFSDYHEGSAPALIMNHTPWDILTYKQSGSPEEMVLLPRQARLFAWADPTGTRKLTWTYAANVGEHDLLKDGCGQFPYDANIQIHWVSFLDGRQRVLLFTDDVALVSKALQAEEMEQADYEITLSLHSLGLSLVNNESKQEVSYIGITSSGVVWEVKPKQKWKPFSQKQIILLEQSYQKHQISRDHGWIKLDNNFEVNFDKDPMEMRLPIRSPIKRDFLSGIQIEFKQSSHQRSLRARLYWLQVDNQLPGAMFPVVFHPVAPPKSIALDSEPKPFIDVSVITRFNEYSKVLQFKYFMVLIQEMALKIDQGFLGAIIALFTPTTDPEAERRRTKLIQQDIDALNAELMETSMTDMSILSFFEHFHISPVKLHLSLSLGSGGEESDKEKQEMFAVHSVNLLLKSIGATLTDVDDLIFKLAYYEIRYQFYKRDQLIWSVVRHYSEQFLKQMYVLVLGLDVLGNPFGLIRGLSEGVEALFYEPFQGAVQGPEEFAEGLVIGVRSLFGHTVGGAAGVVSRITGSVGKGLAAITMDKEYQQKRREELSRQPRDFGDSLARGGKGFLRGVVGGVTGIITKPVEGAKKEGAAGFFKGIGKGLVGAVARPTGGIVDMASSTFQGIQRAAESTEEVSSLRPPRLIHEDGIIRPYDRQESEGSDLLEQELEIQE

SEQ ID NO: 36350 - protein, 379 aa, Homo sapiens
VGVRGEPRSGSSSGKEEVTSGPLHSNSAAPRARGAPANPTPVCCVCLTPGPCRPPAPARRCPQLEEDIAAKEKLLRVSEDERDRVLEELHKAEDSLLAAEEAAAKAEADVASLNRRIQLVEEELDRAQERLATALQKLEEAEKAADESERGMKVIESRAQKDEEKMEIQEIQLKEAKHIAEDADRKYEEVARKLVIIESDLERAEERAELSEGQVRQLEEQLRIMDQTLKALMAAEDKVLMARVVFRFNCNPDIFQLPMPPGSFGITTAPSLHPLLFISCLKCFPLVLYAPLFSLHKCSLGSQKRSQIIALQSCWIWSPCLLLLRGWGAVFLENLNILIPDDLATLRQPFVSRTQFSFFPIPLLFLSSFLWLVSHPFCL

SEQ ID NO: 36351 - protein, 307 aa, Homo sapiens
LRSPGGCDFRTAPGRRGRRHRTERPGRGGPALGSQDSRGSRVRRAAAGLSHCSPPARLPSGAMAGSSSLEAVRRKIRSLQEQADAAEERAGTLQRELDHERKLRETAEADVASLNRRIQLVEEELDRAQERLATALQKLEEAEKAADESERGMKVIESRAQKDEEKMEIQEIQLKEAKHIAEDADRKYEEVARKLVIIESDLERAEERAELSEGKCAELEEELKTVTNNLKSLEAQAEKYSQKEDRYEEEIKVLSDKLKEAETRAEFAERSVTKLEKSIDDLEDQLYQQLEQNRRLTNELKLALNED

SEQ ID NO: 36352 - protein, 279 aa, Homo sapiens
LGSQDSRGSRVRRAAAGLSHCSPPARLPSGAMAGSSSLEAVRRKIRSLQEQADAAEERAGTLQRELDHERKLRETAEADVASLNRRIQLVEEELDRAQERLATALQKLEEAEKAADESERGMKVIESRAQKDEEKMEIQEIQLKEAKHIAEDADRKYEEVARKLVIIESDLERAEERAELSEGQVRQLEEQLRIMDQTLKALMAAEDKYSQKEDRYEEEIKVLSDKLKEAETRAEFAERSVTKLEKSIDDLEEKVAHAKEENLSMHQMLDQTLLELNNM

SEQ ID NO: 36353 - protein, 78 aa, Homo sapiens
LHWPPAAAPTPSCIALFLLLCWDGARTTLTHPPFLDHSPCSCTSAFHFLVIDELYAQKLKYKAISEELDHALNDMTSI

SEQ ID NO: 36354 - protein, 19 aa, Homo sapiens
LRPHSFVLFCFVFKHLLTP

SEQ ID NO: 36355 - protein, 237 aa, Homo sapiens
LAGTPPRPRPPPRLSPPPPLAPRSEGRSEKMAKTYDYLFKLLLIGDSGVGKTCLLFRFSEDAFNTTFISTIGIDFKIRTIELDGKKIKLQIWDTAGQERFRTITTAYYRGAMGIMLVYDITNEKSFDNIKNWIRNIEEHASSDVERMILGNKCDMNDKRQVSKERGEKLAIDYGIKFLETSAKSSANVEEAFFTLARDIMTKLNRKMNDSNSAGAGGPVKITENRSKKTSFFRCSLL

SEQ ID NO: 36356 - protein, 166 aa, Homo sapiens
MGHSGSGKIPNNHDSVLQRSHGRNFRDKKNIITGMIWNSLQGIMLVYDITNEKSFDNIKNWIRNIEEHASSDVERMILGNKCDMNDKRQVSKERGEKLAIDYGIKFLETSAKSSANVEEAFFTLARDIMTKLNRKMNDSNSAGAGGPVKITENRSKKTSFFRCSLL

SEQ ID NO: 36357 - protein, 9 aa, Homo sapiens
LRIIFLIAG

SEQ ID NO: 36358 - protein, 54 aa, Homo sapiens
MASLMSWEPVLLGKVTSDLMGAQMCVCLSVCLCVCVHSRPLTASKPGVASRPCH

SEQ ID NO: 36359 - protein, 507 aa, Homo sapiens
LGNNMMQLVYCVFFFLLVCRSNKSPWVCLTCSSVHCGRYVNGHAKKHYEDAQVPLTNHKKSEKQDKVQHTVCMDCSSYSTYCYRCDDFVVNDTKLGLVQKVREHLQNLENSAFTADRHKKRKLLENSTLNSKLLKVNGSTTAICATGLRNLGNTCFMNAILQSLSNIEQFCCYFKELPAVELRNGKTAGRRTYHTRSQGDNNVSLVEEFRKTLCALWQGSQTAFSPESLFYVVWKIMPNFRGYQQQDAHEFMRYLLDHLHLELQGGFNGVSRSAILQENSTLSASNKCCINGASTVVTAIFGGILQNEVNCLICGTESRKFDPFLDLSLDIPSQFRSKRSKNQENGPVCSLRDCLRSFTDLEELDETELYMCHKCKKKQKSTKKFWIQKLPKVLCLHLKRFHWTAYLRNKVDTYVEFPLRGLDMKCYLLEPENSGPESCLYDLAAVVVHHGSGVGSGHYTAYATHEGRWFHFNDSTVTLTDEETVVKAKAYILFYVEHQAKAGSDKL

SEQ ID NO: 36360 - protein, 48 aa, Homo sapiens
LLKLPNRPMGPSGLIYRGGLGPCEVTSSWPRYCSSKSWGFCKSLLPVD

SEQ ID NO: 36361 - protein, 83 aa, Homo sapiens
LGAPSGKPRPRPSRVLGRLWTEGMPVPGATTLDSLFRSGCAALQGSGAWRLLQSSFKLRPLNVPAGRHFILAQVLQLQIVGIL

SEQ ID NO: 36362 - protein, 19 aa, Homo sapiens
LRGHFILAQVLQLQIVGIL

SEQ ID NO: 36363 - protein, 651 aa, Homo sapiens [sequence omitted]

SEQ ID NO: 36364 - protein, 71 aa, Homo sapiens [sequence omitted]

SEQ ID NO: 36365 - protein, 202 aa, Homo sapiens
LPRAVGTQTLSGAGLLKMFNKATDAVSKMTIKMNESDIWFEEKLQEVECEEQRLRKLHAVVETLVNHRKELALNTAQFAKSLAMLGSSEDNTALSRALSQLAEVEEKIEQLHQEQANNDFFLLAELLSDYIRLLAIVRAAFDQRMKTWQRWQDAQATLQKKREAEARLLWANKPDKLQQAKDEILEVSPLRQPSQGCSAGSK

SEQ ID NO: 36366 - protein, 289 aa, Homo sapiens
VATTHEPASVPAPQGDLLSGAEPEGGNGARRPPGAREQPQSPPPARGGAGSLATAAPPSSGLSCPGCFRLRLWMLRLSERNMKVLLAAALIAGSVFFLLLPGPSAADEKKKGPKVTVKVYFDLRIGDEDVGRVIFGLFGKTVPKTVDNFVALATGEKGFGYKNSKFHRVIKDFMIQGGDFTRGDGTGGKSIYGERFPDENFKLKHYGPGWVSMANAGKDTNGSQFFITTVKTAWLDGKHVVFGKVLEGMEVVRKVESTKTDSRDKPLKDVIIADCGKIEVEKPFAIAKE

SEQ ID NO: 36367 - protein, 597 aa, Homo sapiens
VQDVGLLQLSWFRLGKMAVAGAVSGEPLVHWCTQQLRKTFGLDVSEEIIQYVLSIESAEEIREYVTDLLQGNEGKKGQFIEELITKWQKNDQELISDPLQQCFKKDEILDGQKSGDHLKRGRKKGRNRQEVPAFTEPDTTAEVKTPFDLAKAQENSNSVKKKTKFVNLYTREGQDRLAVLLPGRHPCDCLGQKHKLINNCLICGRIVCEQEGSGPCLFCGTLVCTHEEQDILQRDSNKSQKLLKKLMSGVENSGKVDISTKDLLPHQELRIKSGLEKAIKHKDKLLEFDRTSIRRTQVIDDESDYFASDSNQWLSKLERETLQKREEELRELRHASRLSKKVTIDFAGRKILEEENSLAEYHSRLDETIQAIANGTLNQPLTKLDRSSEEPLGVLVNPNMYQSPPQWVDHTGAASQKKAFRSSGFGLEFNSFQHQLRIQDQEFQEGFDGGWCLSVHQPWASLLVRGIKRVEGRSWYTPHRGRLWIAATAKKPSPQEVSELQATYRLLRGKDVEFPNDYPSGCLLGCVDLIDCLSQKQFKEQFPDISQESDSPFVFICKNPQEMVVKFPIKGNPKIWKLDSKIHQGAKKGLMKQNKAV

SEQ ID NO: 36368 - protein, 29 aa, Homo sapiens
MVLIILFAVSTMTEGRPLAISPPPDLRTT

SEQ ID NO: 36369 - protein, 26 aa, Homo sapiens
LCIFFLCFLSPQGLLSIGFSVPGQCP

SEQ ID NO: 36370 - protein, 66 aa, Homo sapiens
MLYPRATVGEEGKLGSPGTDERAPRCLGKDTEGLRVRVAYCVLGVDSLKLFSIKNSINILFTCNHQ

SEQ ID NO: 36371 - protein, 113 aa, Homo sapiens
MNALLLSAWFGHLRILQILVNSGAKIHCESKEGNTALHLAAGRGHMAVLQRLVDIGLDLEEQNAEGLTALHSAAGGSHPDCVQLLLRAGSTVNALTQVARPSQDCGRLLAAEP

SEQ ID NO: 36372 - protein, 10 aa, Homo sapiens
LFRIIIVSTV

SEQ ID NO: 36373 - protein, 385 aa, Homo sapiens
MPSCGACTCGAAAVRLITSSLASAQRGISGGRIHMSVLGRLGTFETQILQRAPLRSFTETPAYFASKDGISKDGSGDGNKKSASEGSSKKSGSGNSGKGGNQLRCPKCGDLCTHVETFVSSTRFVKCEKCHHFFVVLSEADSKKSIIKEPESAAEAVKLAFQQKPPPPPKKIYNYLDKYVVGQSFAKKVLSVAVYNHYKRIYNNIPANLRQQAEVEKQTSLTPRELEIRRREDEYRFTKLLQIAGISPHGNALGASMQQQVNQQIPQEKRGGEVLDSSHDDIKLEKSNILLLGPTGSGKTLLAQTLAKCLDVPFAICDCTTLTQAGYVGEDIESVIAKLLQDANYNVEKAQQGIVFLDEVDKIGSVPGIHQLRDVGGEGVQQVSS

SEQ ID NO: 36374 - protein, 1194 aa, Homo sapiens
LPRSHGLGGKMVGTKAWVFSFLVLEVTSVLGRQTMLTQSVRRVQPGKKNPSIFAKPADTLESPGEWTTWFNIDYPGGKGDYERLDAIRFYYGDRVCARPLRLEARTTDWTPAGSTGQVVHGSPREGFWCLNREQRPGQNCSNYTVRFLCPPGSLRRDTERIWSPWSPWSKCSAACGQTGVQTRTRICLAEMVSLCSEASEEGQHCMGQDCTACDLTCPMGQVNADCDACMCQDFMLHGAVSLPGGAPASGAAIYLLTKTPKLLTQTDSDGRFRIPGLCPDGKSILKITKVKFAPIVLTMPKTSLKAATIKAEFVRAETPYMVMNPETKARRAGQSVSLCCKATGKPRPDKYFWYHNDTLLDPSLYKHESKLVLRKLQQHQAGEYFCKAQSDAGAVKSKVAQLIVIASDETPCNPVPESYLIRLPHDCFQNATNSFYYDVGRCPVKTCAGQQDNGIRCRDAVQNCCGISKTEEREIQCSGYTLPTKVAKECSCQRCTETRSIVRGRVSAADNGEPMRFGHVYMGNSRVSMTGYKGTFTLHVPQDTERLVLTFVDRLQKFVNTTKVLPFNKKGSAVFHEIKMLRRKKPITLEAMETNIIPLGEVVGEDPMAELEIPSRSFYRQNGEPYIGKVKASVTFLDPRNISTATAAQTDLNFINDEGDTFPLRTYGMFSVDFRDEVTSEPLNAGKVKVHLDSTQVKMPEHISTVKLWSLNPDTGLWEEEGDFKFENQRRNKREDRTFLVGNLEIRERRLFNLDVPESRRCFVKVRAYRSERFLPSEQIQGVVISVINLEPRTGFLSNPRAWGRFDSVITGPNGACVPAFCDDQSPDAYSAYVLASLAGEELQAVESSPKFNPNAIGVPQPYLNKLNYRRTDHEDPRVKKTAFQISMAKPRPNSAEESNGPIYAFENLRACEEAPPSAAHFRFYQIEGDRYDYNTVPFNEDDPMSWTEDYLAWWPKPMEFRACYIKVKIVGPLEVNVRSRNMGGTHRQTVGKLYGIRDVRSTRDRDQPNVSAACLEFKCSGMLYDQDRVDRTLVKVIPQGSCRRASVNPMLHEYLVNHLPLAVNNDTSEYTMLAPLDPLGHNYGIYTVTDQDPRTAKEIALGRCFDGTSDGSSRIMKSNVGVALTFNCVERQVGRQSAFQYLQSTPAQSPAAGTVQGRVPSRRQQRASRGGQRQGGVVASLRFPRVAQQPLIN

SEQ ID NO: 36375 - protein, 942 aa, Homo sapiens
LGYWGGGRDLSCGIPRSASPLAPLAAPAITQAPEALSRTRASTARFVCRASGEPRPALRWLHNGAPLRPNGRVKVQGGGGSLVITQIGLQDAGYYQCVAENSAGMACAAASLAVVVREGLPSAPTRVTATPLSSSAVLVAWERPEMHSEQIIGFSLHYQKARGMDNVEYQFAVNNDTTELQVRDLEPNTDYEFYVVAYSQLGASRTSTPALVHTLDDVPSAAPQLSLSSPNPSDIRVAWLPLPPSLSNGQVVKYKIEYGLGKEDQIFSTEVRGNETQLMLNSLQPNKVYRVRISAGTAAGFGAPSQWMHHRTPSMHNQSHVPFAPAELKVQAKMESLVVSWQPPPHPTQISGYKLYWREVGAEEEANGDRLPGGRGDQAWDVGPVRLKKKVKQYELTQLVPGRLYEVKLVAFNKHEDGYAAVWKGKTEKAPAPDMPIQRGPPLPPAHVHAESNSSTSIWLRWKKPDFTTVKIVNYTVRFSPWGLRNASLVTYYTSSGEDILIGGLKPFTKYEFAVQSHGVDMDGPFGSVVERSTLPDRPSTPPSDLRLSPLTPSTVRLHWCPPTEPNGEIVEYLILYSSNHTQPEHQWTLLTTQGNIFSAEVHGLESDTRYFFKMGARTEVGPGPFSRLQDVITLQEKLSDSLDMHSVTGIIVGVCLGLLCLLACMCAGLRRSPHRESLPGLSSTATPGNPALYSRARLGPPSPPAAHELESLVHPHPQDWSPPPSDVEDRAEVHSLMGGGVSEGRSHSKRKISWAQPSGLSWAGSWAGCELPQAGPRPALTRALLPPAGTGQTLLLQALVYDAIKGNGRKKSPPACRNQVEAEVIVHSDFSASNGNPDLHLQDLEPEDPLPPEAPDLISGVGDPGQGAAWLDRELGGCELAAPGPDRLTCLPEAASASCSYPDLQPGEVLEETPGDSCQLKSPCPLGASPGLPRSPVSSSA

SEQ ID NO: 36376 - protein, 1305 aa, Homo sapiens
LAPAPAPARARAPEAAPPPAAPRLPGPLTPGALSPRGGGRSTGRRRRRRRPEPSPMARGDAGRGRGLLALTFCLLAARGELLLPQETTVELSCGVGPLQVILGPEQAAVLNCSLGAAAAGPPTRVTWSKDGDTLLEHDHLHLLPNGSLWLSQPLAPNGSDESVPEAVGVIEGNYSCLAHGPLGVLASQTAVVKLATLADFSLHPESQTVEENGTARFECHIEGLPAPIITWEKDQVTLPEEPRLIVLPNGVLQILDVQESDAGPYRCVATNSARQHFSQEALLSVAHRGSLASTRGQDVVIVAAPENTTVVSGQSVVMECVASADPTPFVSWVRQDGKPISTDVIVLGRTNLLIANAQPWHSGVYVCRANKPRTRDFATAAAELRVLAAPAITQAPEALSRTRASTARFVCRASGEPRPALRWLHNGAPLRPNGRVKVQGGGGSLVITQIGLQDAGYYQCVAENSAGMACAAASLAVVVREGLPSAPTRVTATPLSSSAVLVAWERPEMHSEQIIGFSLHYQKARGMDNVEYQFAVNNDTTELQVRDLEPNTDYEFYVVAYSQLGASRTSTPALVHTLDDVPSAAPQLSLSSPNPSDIRVAWLPLPPSLSNGQVVKYKIEYGLGKEDQIFSTEVRGNETQLMLNSLQPNKVYRVRISAGTAAGFGAPSQWMHHRTPSMHNQSHVPFAPAELKVQAKMESLVVSWQPPPHPTQISGYKLYWREVGAEEEANGDRLPGGRGDQAWDVGPVRLKKKVKQYELTQLVPGRLYEVKLVAFNKHEDGYAAVWKGKTEKAPAPDMPIQRGPPLPPAHVHAESNSSTSIWLRWKKPDFTTVKIVNYTVRFSPWGLRNASLVTYYTSSGEDILIGGLKPFTKYEFAVQSHGVDMDGPFGSVVERSTLPDRPSTPPSDLRLSPLTPSTVRLHWCPPTEPNGEIVEYLILYSSNHTQPEHQWTLLTTQGNIFSAEVHGLESDTRYFFKMGARTEVGPGPFSRLQDVITLQEKLSDSLDMHSVTGIIVGVCLGLLCLLACMCAGLRRSPHRESLPGLSSTATPGNPALYSRARLGPPSPPAAHELESLVHPHPQDWSPPPSDVEDRAEVHSLMGGGVSEGRSHSKRKISWAQPSGLSWAGSWAGCELPQAGPRPALTRALLPPAGTGQTLLLQALVYDAIKGNGRKKSPPACRNQVEAEVIVHSDFSASNGNPDLHLQDLEPEDPLPPEAPDLISGVGDPGQGAAWLDRELGGCELAAPGPDRLTCLPEAASASCSYPDLQPGEVLEETPGDSCQLKSPCPLGASPGLPRSPVSSSA

SEQ ID NO: 36377 - protein, 108 aa, Homo sapiens
LLLPPLLLSAAFAAWVVTGAAAEEATATRTGVEAAQHEAAQARSIAHVGTVRAGPGGRCSIRPLLLLLRRRGLGHGSPGPFRLTEGLLGAFSGKMQHGSSNGNRTAGC

SEQ ID NO: 36378 - protein, 82 aa, Homo sapiens
VLKPPRPRPLLLPPLLLSAAFAAWVVTGAAAEEATATRTGVEAAQHEAAQARSIAHVGTVRAGPGGRKMQHGSSNGNRTAGC

SEQ ID NO: 36379 - protein, 92 aa, Homo sapiens
LGSVAMENQVLTPHVYWAQRHRELYLRVELSDVQNPAISITENVLHFKGQYPSKCSHLYTQLRRCGGGFPFLKKCICLTCFLLMFTPLILMR

SEQ ID NO: 36380 - protein, 129 aa, Homo sapiens
MRRRGEIDMATEGDVELELETETSGPERPPEKPRKHDSGAADLERVTDYAEEKEIQSSNLETAMSVIGDRRSREQKAKQEREKELAKVTIKKEDLELIMTEMEISRAAAERSLREHMGNVVEALIALTN

SEQ ID NO: 36381 - protein, 68 aa, Homo sapiens
LPRKQKPKQLSLLHLLFHLPGAVCAQPCPPGTFGQNCSQDCPCHHGGQCDHVTGQCHCTAGYMGDRTR

SEQ ID NO: 36382 - protein, 42 aa, Homo sapiens
LALCLGLFVCMLMIKTCARLNYSEILVNVGSHSYNCTAVPAP

SEQ ID NO: 36383 - protein, 512 aa, Homo sapiens
LRQASSHTVNPTPEPRTGLSPTPGPQESWQSADPQSGKRLRAGIQTPRERSAVPGPQPKEETRLTEGDENKSPLLRSSAAPTSRPNACARPLISVYSEKGESSGKNVTLPAVFKAPIRPDIVNFVHTNLRKNNRQPYAVSELAGHQTSAESWGTGRAVARIPRVRGGGTHRSGQGAFGNMCRGGRMFAPTKTWRRWHRRVNTTQKRYAICSALAASALPALVMSKGHRIEEVPELPLVVEDKVEGYKKTKEAVLLLKKLKAWNDIKKVYASQRMRAGKGKMRNRRRIQRRGPCIIYNEDNGIIKAFRNIPGITLLNVSKLNILKLAPGGHVGRFCIWTESAFRKLDELYGTWRKAASLKSNYNLPMHKMINTDLSRILKSPEIQRALRAPRKKIHRRVLKKNPLKNLRIMLKLNPYAKTMRRNTILRQARNHKLRVDKAAAAAAALQAKSDEKAAVAGKKPVVGKKGKKAAVGVKKQKKPLVGKKAAATKKPAPEKKPAEKKPTTEEKKPAA

SEQ ID NO: 36384 - protein, 153 aa, Homo sapiens
LRGAWLSPLSAMACARPLISVYSEKGESSGKNVTLPAVFKAPIRPDIVNFVHTNLRKNNRQPYAVSELAGHQTSAESWGTGRAVARIPRVRGGGTHRSGQGAFGNMCRGGRMFAPTKTWRRWHRRVNTTQKRYAICSALAASALPALVMSKGL

SEQ ID NO: 36385 - protein, 32 aa, Homo sapiens
MNGICILKHFFKGQLKRARGNQGSSRGVLVTG

SEQ ID NO: 36386 - protein, 24 aa, Homo sapiens
LLSPGHRFLRGSVEMNLKALRKLR

SEQ ID NO: 36387 - protein, 45 aa, Homo sapiens
LSLGIPTLLYGLGSWLFARVTETVHTSYGPITVYFLNKEDEGAMY

SEQ ID NO: 36388 - protein, 128 aa, Homo sapiens
VEEKGRHAPEELERRRERGPYPVARGKNEARGEKATPRCYPRKIYGASRVPRTGCVRRCCHRRDPLLLTPGPDPPPLTQGKPRRDPGPSTGPESKVQGPAATCVPGALQWLRRWLRFLLAHMSRDSEA

SEQ ID NO: 36389 - protein, 266 aa, Homo sapiens
LIEFRRRGSLCRERAREMEMGRRIHLELRNRTPSDVKELVLDNSRSNEGKLEGLTDEFEELEFLSTINVGLTSIANLPKLNKLKKLELSDNRVSGGLEVLAEKCPNLTHLNLSGNKIKDLSTIEPLKKLENLKSLDLFNCEVTNLNDYRENVFKLLPQLTYLDGYDRDDKEAPDSDAEGYVEGLDDEEEDEDEEEYDEDAQVVEDEEDEDEEEEGEEEDVSGEEEEDEEGYNDGEVDDEEDEEELGEEERGQKRKREPEDEGEDDD

SEQ ID NO: 36390 - protein, 43 aa, Homo sapiens
LLGVPGPEAGRYSADTFPFGLEVPSLVAPGRSGRMAECYGRRL

SEQ ID NO: 36391 - protein, 356 aa, Homo sapiens
VLRTTPMKPLVLLVALLLWPSSVPAYPSITVTPDEEQNLNHYIQVLENLVRSVPSGEPGREKKSNSPKHVYSIASKGSKFKELVTHGDASTENDVLTNPISEETTTFPTGGFTPEIGKKKHTESTPFWSIKPNNVSIVLHAEEPYIENEEPEPEPEPAAKQTEAPRMLPVVTESSTSPYVTSYKSPVTTLDKSTGIGISTESEDVPQLSGETAIEKPEEFGKHPESWNNDDILKKILDINSQVQQALLSDTSNPAYREDIEASKDHLKRSLALAAAAEHKLKTMYKSQLLPVGRTSNKIDDIETVINMLCNSRSKLYEYLDIKCVPPEMREKAATVFNTLKNMCRSRRVTALLKVY

SEQ ID NO: 36392 - protein, 674 aa, Homo sapiens
LAESWRWVNRRGPPLLAVCARQGASAGTEWGAGAGPHWASSPLGTGSGSIDPDELRTVLQSCLRESAISLPDEKLDQLTLALFESADADGNGAITFEELRDELQRFPGVMENLTISAAHWLTAPAPRPRPRRPRQLTRAYWHNHRSQLFCLATYAGLHVLLFGLAASAHRDLGASVMVAKGCGQCLNFDCSFIAVLMLRRCLTWLRATWLAQVLPLDQNIQFHQLMGYVVVGLSLVHTVAHTVNFVLQAQAEASPFQFWELLLTTRPGIGWVHGSASPTGVALLLLLLLMFICSSSCIRRSGHFEVFYWTHLSYLLVWLLLIFHGPNFWKWLLVPGILFFLEKAIGLAVSRMAAVCIMEVNLLPSKVTHLLIKRPPFFHYRPGDYLYLNIPTIARYEWHPFTISSAPEQKDTIWLHIRSQGQWTNRLYESFKASDPLGRGSKRLSRSVTMRKSQRSSKGSEILLEKHKFCNIKCYIDGPYGTPTRRIFASEHAVLIGAGIGITPFASILQSIMYRHQKRKHTCPSCQHSWIEGVQDNMKLHKVDFIWINRDQRSFEWFVSLLTKLEMDQAEEAQYGRFLELHMYMTSALGKNDMKAIGLQMALDLLANKEKKDSITGLQTRTQPGRPDWSKVFQKVAAEKKGKVQVFFCGSPALAKVLKGHCEKFGFRFFQENF

SEQ ID NO: 36393 - protein, 66 aa, Homo sapiens
LELRHRRPEPPLLCCLLLFLRAPVSARPPTLLRILKETGRSPDEVTHGTICLSEPELNLRREGLWK

SEQ ID NO: 36394 - protein, 38 aa, Homo sapiens
LELRHRRPEPPLLCCLLLFLRAPVSARPPTLLRNLTRN

SEQ ID NO: 36395 - protein, 673 aa, Homo sapiens
MITVQEFCKAEEVDEDSVYGVFVSYIEIYNNYIYDLLEEVPFDPIKPKWNSCSTPMRNTDFVPPQSKLLREDKNHNMYVAGCTEVEVKSTEEAFEVFWRGQKKRRIANTHLNRESSRSHSVFNIKLVQAPLDADGDNVLQEKEQITISQLSLVDLAGSERTNRTRAEGNRLREAGNINQSLMTLRTCMDVLRENQMYGTNKMVPYRDSKLTHLFKNYFDGEGKVRMIVCVNPKAEDYEENLQVMRFAEVTQEVEVARPVDKAICGLTPGRRYRNQPRGPVGNEPLVTDVVLQSFPPLPSCEILDINDEQTLPRLIEALEKRHNLRQMMIDEFNKQSNAFKALLQEFDNAVLSKENHMQGKLNEKEKMISGQKLEIERLEKKNKTLEYKIEILEKTTTIYEEDKRNLQQELETQNQKLQRQFSDKRRLEARLQGMVTETTMKWEKECERRVAAKQLEMQNKLWVKDEKLKQLKAIVTEPKTEKPERPSRERDREKVTQRSVSPSPVPLLFQPDQNAPPIRLRHRRSRSAGDRWVDHKPASNMQTETVMQPHVPHAITVSVANEKALAKCEKYMLTHQELASDGEIETKLIKGDIYKTRGGGQSVQFTDIETLKQESPNGSRKRRSSTVAPAQPDGAESEWTDVETRCSVAVEMRAGSQLGPGYQHHAQPKRKKP

SEQ ID NO: 36396 - protein, 74 aa, Homo sapiens
VRPSLHPATSTASGSASPTLARAMASVSELACIYSALILHDDEVTVTEDKINALIKAAGVNVEPFWPGLFAKVR

SEQ ID NO: 36397 - protein, 45 aa, Homo sapiens
LLLLLVFLLQSKESSSVLSCDISADDKYIVTGSGDKKATVYEVIY

SEQ ID NO: 36398 - protein, 85 aa, Homo sapiens
MSVPGPSSPDGALTRPPYCLEAGEPTPGLSDTSPDEGLIEDLTIEDKAVEQLAEGLLSHYLPDLQRSKQALQELTLDLKYDVEYP

SEQ ID NO: 36399 - protein, 98 aa, Homo sapiens
VCACARVCVLGVCVLGVCRGAERRAGPRGRKEAVELPGLGLRLPSSALLPVRSDAAAAVALSAPRWGRGAQAGSSENPLRRLPVPAGLRMPGRLICTY

SEQ ID NO: 36400 - protein, 329 aa, Homo sapiens
MFVSYLILTLLHVQTAVLARPGGESIGCDDYLGSDKVVDKCGVCGGDNTGCQVVSGVFKHALTSLGYHRVVEIPEGATKINITEMYKSNNYLALRSRSGRSIINGNWAIDRPGKYEGGGTMFTYKRPNEISSTAGESFLAEGPTNEILDVYMIHQQPNPGVHYEYVIMGTNAISPQVPPHRRPGEPFNGQMVTEGRSQEEGEQKGRNEEKEDLRGEAPEMFTSESAQTFPVRHPDRFSPHRPDNLVPPAPQPPRRSRDHNWKQLGTTECSTTCGKGEPVWGTGGSLQNPKQGVCGWPKAAVPGFFGTRDWFRGRRFLHGWWRGWGMVSG

SEQ ID NO: 36401 - protein, 566 aa, Homo sapiens
MLLIHTMSLLFSVFLQSIGCDDYLGSDKVVDKCGVCGGDNTGCQVVSGVFKHALTSLGYHRVVEIPEGATKINITEMYKSNNYLALRSRSGRSIINGNWAIDRPGKYEGGGTMFTYKRPNEISSTAGESFLAEGPTNEILDVYMIHQQPNPGVHYEYVIMGTNAISPQVPPHRRPGEPFNGQMVTEGRSQEEGEQKGRNEEKEDLRGEAPEMFTSESAQTFPVRHPDRFSPHRPDNLVPPAPQPPRRSRDHNWKQLGTTECSTTCGKGSQYPIFRCVHRSTHEEAPESYCDSSMKPTPEEEPCNIFPCPAFWDIGEWSECSKTCGLGMQHRQVLCRQVYANRSLTVQPYRCQHLEKPETTSTCQLKICSEWQIRTDWTSCSVPCGVGQRTRDVKCVSNIGDVVDDEECNMKLRPNDIENCDMGPCAKSWFLTEWSERCSAECGAGVRTRSVVCMTNHVSSLPLEGCGNNRPAEATPCDNGPCTGKVEWFAGSWSQCSIECGSGTQQREVICVRKNADTFEVLDPSECSFLEKPPSQQSCHLKPCGAKWFSTEWSMSLQRAMLTRPS

SEQ ID NO: 36402 - protein, 1779 aa, Homo sapiens
MNINDGGRRRFEDNEHTLRIYPGAISEGTIYCPIPARKNSTAAEVIESLINKLHLDKTKCYVLAEVKEFGGEEWILNPTDCPVQRMMLWPRMALENRLSGEDYRFLLREKNLDGSIHYGSLQSWLRVTEERRRMMERGFLPQPQQKDFDDLCSLPDLNEKTLLENLRNRFKHEKIYTYVGSILIVINPFKFLPIYNPKYVKMYDNHQLGKLEPHIYAVADVAYHAMLQRKKNQCIVISGESGSGKTQSTNFLIHHLTALSQKGFASGVEQIILGAGPVLEAFGNAKTAHNNNSSRFGKFIQVNYQETGTVLGAYVEKYLLEKSRLVYQEHNERNYHVFYYLLAGASEDERSAFHLKQPEEYHYLNQDCFTVEGEDLRHDFERLQLAMEMVGFLPKTRRQIFSLLSAILHLGNICYKKKTYRDDSIDICNPEVLPIVSELLEVKEEMLFEALVTRKTVTVGEKLILPYKLAEAVTVRNSMAKSLYSALFDWIVFRINHALLNSKDLEHNTKTLSIGVLDIFGFEDYENNSFEQFCINFANERLQHYFNQHIFKLEQEEYRTEGISWHNIDYIDNTCCINLISKKPTGLLHLLDEESNFPQATNQTLLDKFKHQHEDNSYIEFPAVMEPAFIIKHYAGKVKYGVKDFREKNTDHMRPDIVALLRSSKNAFISGMIGIDPVAVFRWAILRAFFRAMVAFREAGKRNIHRKTGHDDTAPCAILKSMDSFSFLQHPVHQRSLEILQRCKEEKYSITRKNPRTPLSDLQGMNALNEKNQHDTFDIAWNGRTGIRQSRLSSGTSLLDKDGIFANSTSSKLLERAHGILTRNKNFKSKPALPKHLLEVNSLKHLTRLTLQDRITKSLLHLHKKKKPPSISAQFQASLSKLMETLGQAEPYFVKCIRSNAEKLPLRFSDVLVLRQLRYTGMLETVRIRQSGYSSKYSFQDFVSHFHVLLPRNIIPSKFNIQDFFRKINLNPDNYQVGKTMVFLKEQERQHLQDLLHQEVLRRIILLQRWFRVLLCRQHFLHLRQASVIIQRFWRNYLNQKQVRDAAVQKDAFVMASAAALLQASWRAHLERQRYLELRAAAIVIQQKWRDYYRRRHMAAICIQARWKAYRESKRYQEQRKKIILLQSTCRGFRARQRFKALKEQRLRETKPEVGLVNIKGYGSLEIQGSDPSGWEDCSFDNRIKAIEECKSVIESNRISRESSVDCLKESPNKQQERAQSQSGVDLQEDVLVRERPRSLEDLHQKKVGRAKRESRRMRELEQAIFSLELLKVRSLGGISPSEDRRWSTELVPEGLQSPRGTPDSESSQGSLELLSYEESQKSKLESVISDEGDLQFPSPKISSSPKFDSRDNALSASNETSSAEHLKDGTMKEMVVCSSESITCKPQLKDSFISNSLPTFFYIPQQDPLKTNSQLDTSIQRNKLLENEDTAGEALTLDINRETRRYHCSGKDQIVPSLNTESSNPVLKKLEKLNTEKEERQKQLQQQNEKEMMEQIRQQTDILEKERKAFKTIEKPRIGECLVAPSSYQSKQRVERPSSLLSLNTSNKGELNVLGSLSLKDAALAQKDSSSAHLPPKDRPVTVFFERKGSPCQSSTVKELSKTDRMGTQLNVACKLSNNRISKREHFRPTQSYSHNSDDLSREGNARPIFFTPKDNMSIPLVSKEALNSKNPQLHKEDEPAWKPVKLAGPGQREVARPAHKKKARMARTRSDFLTRGTFADGEGDTEEDDYDDIIEPLLSLDQASHCELGPAPSLGQASHSDSEMVILQQYKKNSKQI

SEQ ID NO: 36403 - protein, 523 aa, Homo sapiens
LSQKGSIMSPEAQPQRTKGPQQPCRSPIVKPGLPSFRPSSCTQPWLTHSWSTCAAWTLIHHPSQPGTLASSVPLYHAETIKNVRTATESFASDPILYRPVAVALDTKGPEIRTGLIKGSGTAEVELKKGATLKITLDNAYMEKCDENILWLDYKNICKVVEVGSKIYVDDGLISLQVKQKGADFLVTEVENGGSLGSKKGVNLPGAAVDLPAVSEKDIQDLKFGVEQDVDMVFASFIRKASDVHEVRKVLGEKGKNIKIISKIENHEGVRRFDEILEASDGIMVARGDLGIEIPAEKVFLAQKMMIGRCNRAGKPVICATQMLESMIKKPRPTRAEGSDVANAVLDGADCIMLSGETAKGDYPLEAVRMQHLIAREAEAAIYHLQLFEELRRLAPITSDPTEATAVGAVEASFKCCSGAIIVLTKSGRSAHQVARYRPRAPIIAVTRNPQTARQAHLYRGIFPVLCKDPVQEAWAEDVDLRVNFAMNVGKARGFFKKGDVVIVLTGWRPGSGFTNTMRVVPVP

SEQ ID NO: 36404 - protein, 487 aa, Homo sapiens
LHSSCTRRGSGSLRLCSVARVGQRRRTSAAMSKPHSEAGTAFIQTQQLHAAMADTFLEHMCRLDIDSPPITARNTGIICTIGPASRSVELKKGATLKITLDNAYMEKCDENILWLDYKNICKVVEVGSKIYVDDGLISLQVKQKGADFLVTEVENGGSLGSKKGVNLPGAAVDLPAVSEKDIQDLKFGVEQDVDMVFASFIRKASDVHEVRKVLGEKGKNIKIISKIENHEGVRRFDEILEASDGIMVARGDLGIEIPAEKVFLAQKMMIGRCNRAGKPVICATQMLESMIKKPRPTRAEGSDVANAVLDGADCIMLSGETAKGDYPLEAVRMQHLIAREAEAAIYHLQLFEELRRLAPITSDPTEATAVGAVEASFKCCSGAIIVLTKSGRSAHQVARYRPRAPIIAVTRNPQTARQAHLYRGIFPVLCKDPVQEAWAEDVDLRVNFAMNVGKARGFFKKGDVVIVLTGWRPGSGFTNTMRVVPVP

SEQ ID NO: 36405 - protein, 561 aa, Homo sapiens
LHSSCTRRGSGSLRLCSVARVGQRRRTSAAMSKPHSEAGTAFIQTQQLHAAMADTFLEHMCRLDIDSPPITARNTGIICTIGPASRSVETLKEMIKSGMNVARLNFSHGTHEYHAETIKNVRTATESFASDPILYRPVAVALDTKGPEIRTGLIKGSGTAEVELKKGATLKITLDNAYMEKCDENILWLDYKNICKVVEVGSKIYVDDGLISLQVKQKGADFLVTEVENGGSLGSKKGVNLPGAAVDLPAVSEKDIQDLKFGVEQDVDMVFASFIRKASDVHEVRKVLGEKGKNIKIISKIENHEGVRRFDEILEASDGIMVARGDLGIEIPAEKVFLAQKMMIGRCNRAGKPVICATQMLESMIKKPRPTRAEGSDVANAVLDGADCIMLSGETAKGDYPLEAVRMQHLIAREAEAAIYHLQLFEELRRLAPITSDPTEATAVGAVEASFKCCSGAIIVLTKSGRSAHQVARYRPRAPIIAVTRNPQTARQAHLYRGIFPVLCKDPVQEAWAEDVDLRVNFAMNVGKARGFFKKGDVVIVLTGWRPGSGFTNTMRVVPVP

SEQ ID NO: 36406 - protein, 311 aa, Homo sapiens
LHSSCTRRGSGSLRLCSVARVGQRRRTSAAMSKPHSEAGTAFIQTQQLHAAMADTFLEHMCRLDIDSPPITARNTGIICTIGPASRSVETLKEMIKSGMNVARLNFSHGTHEYHAETIKNVRTATESFASDPILYRPVAVALDTKGPEIRTGLIKGSGTAEVELKKGATLKITLDNAYMEKCDENILWLDYKNICKVVEVGSKIYVDDGLISLQVKQKGADFLVTEVENGGSLGSKKGVNLPGAAVDLPAVSEKDIQDLKFGVEQDVDMVFASFIRKASDVHEVRKVLGEKGKNIKIISKIENHEGVRRQV

SEQ ID NO: 36407 - protein, 170 aa, Homo sapiens [sequence omitted]

SEQ ID NO: 36408 - protein, 393 aa, Homo sapiens
MMTSVYSSLRLSGELSEFFINKTEIEDFPRFPHRGLLLDTSRHYLPLSSILDTLDVMAYNKLNVFHWHLVDDPSFPYESFTFPELMRKGSYNPVTHIYTAQDVKEVIEYARLRGIRVLAEFDTPGHTLSWGPGIPGLLTPCYSGSEPSGTFGPVNPSLNNTYEFMSTFFLEVSSVFPDFYLHLGGDEVDFTCWKSNPEIQDFMRKKGFGEDFKQLESFYIQTLLDIVSSYGKGYVVWQEVFDNKVKIQPDTIIQVWREDIPVNYMKELELVTKAGFRALLSAPWYLNRISYGPDWKDFYIVEPLAFEGTPEQKALVIGGEACMWGEYVDNTNLVPRLWPRAGAVAERLWSNKLTSDLTFAYERLSHFRCELLRRGVQAQPLNVGFCEQEFEQT

SEQ ID NO: 36409 - protein, 35 aa, Homo sapiens
LGTRKSNPEIQDFMRKKGFGEDFKQLESFYIQTYP

SEQ ID NO: 36410 - protein, 164 aa, Homo sapiens
LLLAAAFAGRATALWPWPQNFQTSDQRYVLYPNNFQFQYDVSSAAQPGCSVLDEAFQRYRDLLFGSGSWPRPYLTGKRHTLEKNVLVVSVVTPGCNQLPTLESVENYTLTINDDQCLLLSETVWGALRGNKLGLIKRERERMMWEGWCWWSAVAQSLLTATSAS

SEQ ID NO: 36411 - protein, 21 aa, Homo sapiens
LASPLPPRRPGELHHNIQDSP

SEQ ID NO: 36412 - protein, 507 aa, Homo sapiens
MIWNTRNSTYIFTAPEFPILEKQNWLIHLHYIRKDYEACKAVIKEQLQETQGLCEYAIYVQALIFRLEGNIQESLELFQTCAVLSPQSADNLKQVARSLFLLGKHKAAIEVYNEAAKLNQKDWEISHNLGVCYIYLKQFNKAQDQLHNALNLNRHDLTYIMLGKIHLLEGDLDKAIEVYKKAVEFSPENTELLTTLGLLYLQLGIYQKAFEHLGNALTYDPTNYKAILAAGSMMQTHGDFDVALTKYRVVACAVPESPPLWNNIGMCFFGKKKYVAAISCLKRANYLAPFDWKILYNLGLVHLTMQQYASAFHFLSAAINFQPKMGELYMLLAVALTNLEDIENAKRAYAEAVHLDKCNPLVNLNYAVLLYNQGEKKNALAQYQEMEKKVSLLKDNSSLEFDSEMVEMAQKLGAALQVGEALVWTKPVKDPKSKHQTTSTSKPASFQQPLGSNQALGQAMSSAAAYRTLPSGAGGTSQFTKPPSLPLEPEPAVESSPTETSEQIREK

SEQ ID NO: 36413 - protein, 68 aa, Homo sapiens
VEPGSSPLLFPLGWPLRLSLIPVLLCGPVGPKLHELLDDNVFVPPESLQEVDEFHLILEYQAGCNLHF

SEQ ID NO: 36414 - protein, 1420 aa, Homo sapiens
LSPPLPLTLGEEMAAERGARRLLSTPSFWLYCLLLLGRRAPGAAAARSGSAPQSPGASIRTFTPFYFLVEPVDTLSVRGSSVILNCSAYSEPSPKIEWKKDGTFLNLVSDDRRQLLPDGSLFISNVVHSKHNKPDEGYYQCVATVESLGTIISRTAKLIVAGLPRFTSQPEPSSVYAGNNAILNCEVNADLVPFVRWEQNRQPLLLDDRVIKLPSGMLVISNATEGDGGLYRCVVESGGPPKYSDEVELKVLPDPEVISDLVFLKQPSPLVRVIGQDVVLPCVASGLPTPTIKWMKNEEALDTESSERLVLLAGGSLEISDVTEDDAGTYFCIADNGNETIEAQAELTVQAQPEFLKQPTNIYAHESMDIVFECEVTGKPTPTVKWVKNGDMVIPSDYFKIVKEHNLQVLGLVKSDEGFYQCIAENDVGNAQAGAQLIILEHAPATTGPLPSAPRDVVASLVSTRFIKLTWRTPASDPHGDNLTYSVFYTKEGIARERVENTSHPGEMQVTIQNLMPATVYIFRVMAQNKHGSGESSAPLRVETQPEVQLPGPAPNLRAYAASPTSITVTWETPVSGNGEIQNYKLYYMEKGTDKEQDVDVSSHSYTINGLKKYTEYSFRVVAYNKHGPGVSTPDVAVRTLSDVPSAAPQNLSLEVRNSKSIMIHWQPPAPATQNGQITGYKIRYRKASRKSDVTETLVSGTQLSQLIEGLDRGTEYNFRVAALTINGTGPATDWLSAETFESDLDETRVPEVPSSLHVRPLVTSIVVSWTPPENQNIVVRGYAIGYGIGSPHAQTIKVDYKQRYYTIENLDPSSHYVITLKAFNNVGEGIPLYESAVTRPHTDTSEVDLFVINAPYTPVPDPTPMMPPVGVQASILSHDTIRITWADNSLPKHQKITDSRYYTVRWKTNIPANTKYKNANATTLSYLVTGLKPNTLYEFSVMVTKGRRSSTWSMTAHGTTFELVPTSPPKDVTVVSKEGKPKTIIVNWQPPSEANGKITGYIIYYSTDVNAEIHDWVIEPVVGNRLTHQIQELTLDTPYYFKIQARNSKGMGPMSEAVQFRTPKADSSDKMPNDQASGSGGKGSRLPDLGSDYKPPMSGSNSPHGSPTSPLDSNMLLVIIVSVGVITIVVVVIIAVFCTRRTTSHQKKKRAACKSVNGSHKYKGNSKDVKPPDLWIHHERLELKPIDKSPDPNPIMTDTPIPRNSQDITPVDNSMDSNIHQRRNSYRGHESEDSMSTLAGRRGMRPKMMMPFDSQPPQQSVRNTPSTDTMPASSSQTCCTDHQDPEGATSSSYLASSQEEDSGQSLPTAHVRPSHPLKSFAVPAIPPPGPPTYDPALPSTPLLSQQALNHHIHSVKTASIGTLGRSRPPMPVVVPSAPEVQETTRMLEDSESSYEPDELTKEMAHLEGLMKDLNAITTA

SEQ ID NO: 36415 - protein, 1462 aa, Homo sapiens
LSPPLPLTLGEEMAAERGARRLLSTPSFWLYCLLLLGRRAPGAAAARSGSAPQSPGASIRTFTPFYFLVEPVDTLSVRGSSVILNCSAYSEPSPKIEWKKDGTFLNLVSDDRRQLLPDGSLFISNVVHSKHNKPDEGYYQCVATVESLGTIISRTAKLIVAGLPRFTSQPEPSSVYAGNNAILNCEVNADLVPFVRWEQNRQPLLLDDRVIKLPSGMLVISNATEGDGGLYRCVVESGGPPKYSDEVELKVLPDPEVISDLVFLKQPSPLVRVIGQDVVLPCVASGLPTPTIKWMKNEEALDTESSERLVLLAGGSLEISDVTEDDAGTYFCIADNGNETIEAQAELTVQAQPEFLKQPTNIYAHESMDIVFECEVTGKPTPTVKWVKNGDMVIPSDYFKIVKEHNLQVLGLVKSDEGFYQCIAENDVGNAQAGAQLIILEHAPATTGPLPSAPRDVVASLVSTRFIKLTWRTPASDPHGDNLTYSVFYTKEGIARERVENTSHPGEMQVTIQNLMPATVYIFRVMAQNKHGSGESSAPLRVETQPEVQLPGPAPNLRAYAASPTSITVTWETPVSGNGEIQNYKLYYMEKGTDKEQDVDVSSHSYTINGLKKYTEYSFRVVAYNKHGPGVSTPDVAVRTLSDVPSAAPQNLSLEVRNSKSIMIHWQPPAPATQNGQITGYKIRYRKASRKSDVTETLVSGTQLSQLIEGLDRGTEYNFRVAALTINGTGPATDWLSAETFESDLDETRVPEVPSSLHVRPLVTSIVVSWTPPENQNIVVRGYAIGYGIGSPHAQTIKVDYKQRYYTIENLDPSSHYVITLKAFNNVGEGIPLYESAVTRPHTDTSEVDLFVINAPYTPVPDPTPMMPPVGVQASILSHDTIRITWADNSLPKHQKITDSRYYTVRWKTNIPANTKYKNANATTLSYLVTGLKPNTLYEFSVMVTKGRRSSTWSMTAHGTTFELVPTSPPKDVTVVSKEGKPKTIIVNWQPPSEANGKITGYIIYYSTDVNAEIHDWVIEPVVGNRLTHQIQELTLDTPYYFKIQARNSKGMGPMSEAVQFRTPKASGSGGKGSRLPDLGSDYKPPMSGSNSPHGSPTSPLDSNMLLVIIVSVGVITIVVVVIIAVFCTRRTTSHQKKKRAACKSVNGSHKYKGNSKDVKPPDLWIHHERLELKPIDKSPDPNPIMTDTPIPRNSQDITPVDNSMDSNIHQRRNSYRGHESEDSMSTLAGRRGMRPKMMMPFDSQPPQPVISAHPIHSLDNPHHHFHSSSLASPARSHLYHPGSPWPIGTSMSLSDRANSTESVRNTPSTDTMPASSSQTCCTDHQDPEGATSSSYLASSQEEDSGQSLPTAHVRPSHPLKSFAVPAIPPPGPPTYDPALPSTPLLSQQALNHHIHSVKTASIGTLGRSRPPMPVVVPSAPEVQETTRMLEDSESSYEPDELTKEMAHLEGLMKDLNAITTA

SEQ ID NO: 36416 - protein, 201 aa, Homo sapiens
LLGLLLGRMSGSSLPSALALSLLLVSGSLLPGPGAAQNAAPDITGHKRSENKNEGQDATMYCKSVGYPHPDWIWRKKENGMPMDIVNTSGRFFIINKENYTELNIVNLQITEDPGEYECNATNAIGSASVVTVLRVRSHLAPLWPFLGILAEIIILVVIIVVYEKRKRPDEVPDDDEPAGPMKTNSTNNHKDKNLRQRNTN

SEQ ID NO: 36417 - protein, 286 aa, Homo sapiens
LLGLLLGRMSGSSLPSALALSLLLVSGSLLPGPGAAQNEPRIVTSEEVIIRDSPVLPVTLQCNLTSSSHTLTYSYWTKNGVELSATRKNASNMEYRINKPRAEDSGEYHCVYHFVSAPKANATIEVKAAPDITGHKRSENKNEGQDATMYCKSVGYPHPDWIWRKKENGMPMDIVNTSGRFFIINKENYTELNIVNLQITEDPGEYECNATNAIGSASVVTVLRVRSHLAPLWPFLGILAEIIILVVIIVVYEKRKRPDEVPDAGPMKTNSTNNHKDKNLRQRNTN

SEQ ID NO: 36418 - protein, 402 aa, Homo sapiens
LLGLLLGRMSGSSLPSALALSLLLVSGSLLPGPGAAQNAGFVKSPMSETKLTGDAFELYCDVVGSPTPEIQWWYAEVNRAESFRQLWDGARKRRVTVNTAYGSNGVSVLRITRLTLEDSGTYECRASNDPKRNDLRQNPSITWIRAQATISVLQKPRIVTSEEVIIRDSPVLPVTLQCNLTSSSHTLTYSYWTKNGVELSATRKNASNMEYRINKPRAEDSGEYHCVYHFVSAPKANATIEVKAAPDITGHKRSENKNEGQDATMYCKSVGYPHPDWIWRKKENGMPMDIVNTSGRFFIINKENYTELNIVNLQITEDPGEYECNATNAIGSASVVTVLRVRSHLAPLWPFLGILAEIIILVVIIVVYEKRKRPDEVPDAGPMKTNSTNNHKDKNLRQRNTN

SEQ ID NO: 36419 - protein, 379 aa, Homo sapiens
LQGRGHRVRGAGVSVGAASSRDPCGGRSSAAHDPERRSREAWALRRQEEDGEGRSRAAAASLAHSLAHSPAPSLPPLPSPAPALAPAHSLLGLLLGRMSGSSLPSALALSLLLVSGSLLPGPGAAQNEPRIVTSEEVIIRDSPVLPVTLQCNLTSSSHTLTYSYWTKNGVELSATRKNASNMEYRINKPRAEDSGEYHCVYHFVSAPKANATIEVKAAPDITGHKRSENKNEGQDATMYCKSVGYPHPDWIWRKKENGMPMDIVNTSGRFFIINKENYTELNIVNLQITEDPGEYECNATNAIGSASVVTVLRVRSHLAPLWPFLGILAEIIILVVIIVVYEKRKRPDEVPDDDEPAGPMKTNSTNNHKDKNLRQRNTN

SEQ ID NO: 36420 - protein, 88 aa, Homo sapiens [sequence omitted]

SEQ ID NO: 36421 - protein, 35 aa, Homo sapiens
LLGRMSGSSLPSALALSLLLVSGSLLPGPGAAQNV

SEQ ID NO: 36422 - protein, 565 aa, Homo sapiens
LGRVPESQSRRGAAGAAFHHGEPSCQPPHRKMLRRRGSPGMGVHVGAALGALWFCLTGALEVQVPEDPVVALVGTDATLCCSFSPEPGFSLAQLNLIWQLTDTKQLVHSFAEGQDQGSAYANRTALFPDLLAQGNASLRLQRVRVADEGSFTCFVSIRDFGSAAVSLQVAAPYSKPSMTLEPNKDLRPGDTVTITCSSYQGYPEAEVFWQDGQGVPLTGNVTTSQMANEQGLFDVHSILRVVLGANGTYSCLVRNPVLQQDAHSSVTITPQRSPTGAVEVQVPEDPVVALVGTDATLRCSFSPEPGFSLAQLNLIWQLTDTKQLVHSFTEGRDQGSAYANRTALFPDLLAQGNASLRLQRVRVADEGSFTCFVSIRDFGSAAVSLQVAAPYSKPSMTLEPNKDLRPGDTVTITCSSYRGYPEAEVFWQDGQGVPLTGNVTTSQMANEQGLFDVHSVLRVVLGANGTYSCLVRNPVLQQDAHGSVTITGQPMTFPPEALWVTVGLSVCLIALLVALAFVCWRKIKQSCEEENAGAEDQDGEGEGSKTALQPLKHSDSKEDDGQEIA

SEQ ID NO: 36423 - protein, 68 aa, Homo sapiens
VGPSPVRTLSPSGLDLDPGPAVRLPVSLRGGNVNPLVGMGSCCVVSHLMENPCGREPRVVAGQQQARS

SEQ ID NO: 36424 - protein, 438 aa, Homo sapiens
LPGCVTSGGTMQELHLLWWALLLGLAQACPEPCDCGEKYGFQIADCAYRDLESVPPGFPANVTTLSLSANRLPGLPEGAFREVPLLQSLWLAHNEIRTVAAGALASLSHLKSLDLSHNLISDFAWSDLHNLSALQLLKMDSNELTFIPRDAFRSLRALRSLQLNHNRLHTLAEGTFTPLTALSHLQINENPFDCTCGIVWLKTWALTTAVSIPEQDNIACTSPHVLKGTPLSRLPPLPCSAPSVQLSYQPSQDGAELRPGFVLALHCDVDGQPAPQLHWHIQIPSGIVEITSPNVGTDGRALPGTPVASSQPRFQAFANGSLLIPDFGKLEEGTYSCLATNELGSAESSVDVALATPGEGGEDTLGRRFHGKAVEGKGCYTVDNEVQPSGPEDNVVIIYLSRAGNPEAAVAEGVPGQLPPGLLLLGQSLLLFFFLTSF

SEQ ID NO: 36425 - protein, 114 aa, Homo sapiens
MEYSWEVMGVQGLSNSLLPCPCLCASPVDFLAGDRPRAVPAAVFMVLLSSLCLLLPDEDALPFLTLASAPSQDGKTEAPRDLQVLLPAGLPASPAGPRIPEPLVPCAAGEKLQP

SEQ ID NO: 36426 - protein, 44 aa, Homo sapiens
VVDGKHVVFGKVKEGMNIVEATERFGSRNGKTRKKITIADCGQL

SEQ ID NO: 36427 - protein, 630 aa, Homo sapiens
VRARSSAGPGLSPRCPRVERVGLGHVGQDRVDFGQTEPHTVLFHEPGSSSVWVGGRGKVYLFDFPEGKNASVRTVNIGSTKGSCLDKRDCENYITLLERRSEGLLACGTNARHPSCWNLVNGTVVPLGEMRGYAPFSPDENSLVLFEGDEVYSTIRKQEYNGKIPRFRRIRGESELYTSDTVMQNPQFIKATIVHQDQAYDDKIYYFFREDNPDKNPEAPLNVSRVAQLCRGDQGGESSLSVSKWNTFLKAMLVCSDAATNKNFNRLQDVFLLPDPSGQWRDTRVYGVFSNPWNYSAVCVYSLGDIDKVFRTSSLKGYHSSLPNPRPGKCLPDQQPIPTETFQVADRHPEVAQRVEPMGPLKTPLFHSKYHYQKVAVHRMQASHGETFHVLYLTTDRGTIHKVVEPGEQEHSFAFNIMEIQPFRRAAAIQTMSLDAERRKLYVSSQWEVSQVPLDLCEVYGGGCHGCLMSRDPYCGWDQGRCISIYSSERSVLQSINPAEPHKECPNPKPDKAPLQKVSLAPNSRYYLSCPMESRHATYSWRHKENVEQSCEPGHQSPNCILFIENLTAQQYGHYFCEAQEGSYFREAQHWQLLPEDGIMAEHLLGHACALAASLWLGVLPTLTLGLLVH

SEQ ID NO: 36428 - protein, 790 aa, Homo sapiens
VLDSSAPLERGPPRLLRQSFYGVRGVELRPREGIGPAAPGRRPQVWLVRSWAFPVELPGRGWRRFPQQFRSRSGKPVRREKAARGGGRGGVGSALAPPPGAWVCLRPGAGSVSADCRCRSRGHGMTPPPPGRAAPSAPRARVPGPPARLGLPLRLRLLLLLWAAAASAQGHLRSGPRIFAVWKGHVGQDRVDFGQTEPHTVLFHEPGSSSVWVGGRGKVYLFDFPEGKNASVRTVNIGSTKGSCLDKRDCENYITLLERRSEGLLACGTNARHPSCWNLVNGTVVPLGEMRGYAPFSPDENSLVLFEGDEVYSTIRKQEYNGKIPRFRRIRGESELYTSDTVMQNPQFIKATIVHQDQAYDDKIYYFFREDNPDKNPEAPLNVSRVAQLCRGDQGGESSLSVSKWNTFLKAMLVCSDAATNKNFNRLQDVFLLPDPSGQWRDTRVYGVFSNPWNYSAVCVYSLGDIDKVFRTSSLKGYHSSLPNPRPGKCLPDQQPIPTETFQVADRHPEVAQRVEPMGPLKTPLFHSKYHYQKVAVHRMQASHGETFHVLYLTTDRGTIHKVVEPGEQEHSFAFNIMEIQPFRRAAAIQTMSLDAERRKLYVSSQWEVSQVPLDLCEVYGGGCHGCLMSRDPYCGWDQGRCISIYSSERSVLQSINPAEPHKECPNPKPDKAPLQKVSLAPNSRYYLSCPMESRHATYSWRHKENVEQSCEPGHQSPNCILFIENLTAQQYGHYFCEAQEGSYFREAQHWQLLPEDGIMAEHLLGHACALAASLWLGVLPTLTLGLLVH

SEQ ID NO: 36429 - protein, 44 aa, Homo sapiens
MSRDPYCGWDQGRCISIYSSERSVLQSINPAEPHKECPNPKPGT

SEQ ID NO: 36430 - protein, 424 aa, Homo sapiens
LEAIMMTITRTYLALQDSSAVRVSDLFSGVPCMPGRKRERERERMSLSDWHLAVKLADQPLTPKSILRLPETELGEYSLGGYSISFLKQLIAGKLQESVPDPELIDLIYCGRKLKDDQTLDFYGIQPGSTVHVLRKSWPEPDQKPEPVDKVAAMREFRVLHTALHSSSSYREAVFKMLSNKESLDQIIVATPGLSSDPIALGVLQDKDLFSVFADPNMLDTLVPAHPALVNAIVLVLHSVAGSAPMPGTDSSSRSMPSSSYRDMPGGFLFEGLSDDEDDFHPNTRSTPSSSTPSSRPASLGYSGAAGPRPITQSELATALALASTPESSSHTPTPGTQGHSSGTSPMSSGVQSGTPITNDLFSQALQHALQASGQPSLQSQWQPQLQQLRDMGIQDDELSLRALQATGGDIQAALELIFAGGAP

SEQ ID NO: 36431 - protein, 15 aa, Homo sapiens
LRFFFRVFIFYYFSR

SEQ ID NO: 36432 - protein, 81 aa, Homo sapiens [sequence omitted]

SEQ ID NO: 36433 - protein, 84 aa, Homo sapiens
VRLWARLFPEARGEAGVTSSEKAFRTKRCGQATGPAGNIMAEKVNNFPPLPKFIPLKPCFYQDFEADIPPQHVSMTKRLYYLWM

SEQ ID NO: 36434 - protein, 155 aa, Homo sapiens
LDGSVRTRLWAGPAQRLQVWRVSARQHPQPLAVSGVPTRPGSWHGEMGLPDHNSNSFSVAPTRPPHPSLRAPKAPDATADTGRHEFTYALMPHKGSFQDAGVIQAAYSLNFPLLALPAPSPAPATSWSAFSVSSPAVVLETVKQARAAPSAARWS

SEQ ID NO: 36435 - protein, 22 aa, Homo sapiens
MPERALSFGSCGCGCRHHGAEA

SEQ ID NO: 36436 - protein, 44 aa, Homo sapiens
VVDGKHVVFGKVKEGMNIVEATERFESRNGKTRKKITIADCGQL

SEQ ID NO: 36437 - protein, 15 aa, Homo sapiens
LMASRLIAAHLACFV

SEQ ID NO: 36438 - protein, 51 aa, Homo sapiens
LVKVKLFVFISQTIVAINKDPEAPIFQVADYGIVADLFKVVPEMTEILKKK

SEQ ID NO: 36439 - protein, 357 aa, Homo sapiens
LAEAAPVGRARGCCKAEVAAEAETMFRAAAPGQLRRAASLLRFQSTLVIAEHANDSLAPITLNTITAATRLGGEVSCLVAGTKCDKVAQDLCKVAGIAKVLVAQHDVYKGLLPEELTPLILATQKQFNYTHICAGASAFGKNLLPRVAAKLEVAPISDIIAIKSPDTFVRTIYAGNALCTVKCDEKVKVFSVRGTSFDAAATSGGSASSEKASSTSPVEISEWLDQKLTKSDRPELTGAKVVVSGGRGLKSGENFKLLYDLADQLHAAVGASRAAVDAGFVPNDMQVGQTGKIVAPELYIAVGISGAIQHLAGMKDSKTIVAINKDPEAPIFQVADYGIVADLFKVVPEMTEILKKK

SEQ ID NO: 36440 - protein, 59 aa, Homo sapiens
LALDIFFLASLLRFQSTLVIAEHANDSLAPITLNTITAATRLGGEVSCLVAGTKCDKRN

SEQ ID NO: 36441 - protein, 61 aa, Homo sapiens
LAPFIICYQLYFCDKILMLYFTLLSLNHSQNYLNVDYNFGLLGKKNKNLIFISKCIEATKY

SEQ ID NO: 36442 - protein, 28 aa, Homo sapiens
LDTRARPPITELHSFLILLLILAPNKTG

SEQ ID NO: 36443 - protein, 25 aa, Homo sapiens
LKFGRNVLLAAKTTFVTRMNEVLQI

SEQ ID NO: 36444 - protein, 376 aa, Homo sapiens
LWAVCWGHWDPWPALPEGNQPTPEWLPPCSHPQWPKPLWPLTPDVRECCAEEFSASDDVAPGFSGPHSLAAFPAWGAQDEGTLEFTLTTQSRQAPLAFQAGGRRGDFIYVDIFEGHLRAVVEKGQGTVLLHNSVPVADGQPHEVSVHINAHRLEISVDQYPTHTSNRGVLSYLEPRGSLLLGGLDAEASCHLQEHRLGLIPGATNVSLLGCMEDLRVNGQRQGLREALLTRNMAAGCRLEEEEYEDDAYGHYEAFSTLAPEAWLAMELPEPCVPEPGLPPVFANFTQLLTISPLVVAKGGTAWLEWWHVQPTLDLMEAELRKSQVLFSVTRGAHHGELELDIPGAQARKMFTLLDVVNRKARFIHDGSEDTSDQCQ

SEQ ID NO: 36445 - protein, 173 aa, Homo sapiens
LRHLIKWISLSKYSFLSLQKQKFLLSSLMISYVQVQTVTLIPGDGIGPEISAAVMKIFDAAKAPIQWEERNVTAIQGPGGKWMIPSEAKESMDKNKMGLKGPLKTPIAAGHPSMNLLLRKTFDLYANVRPCVSIEGYKTPYTDVNIVTIRENTEGEYSGIEHVQGGTSCLADC

SEQ ID NO: 36446 - protein, 287 aa, Homo sapiens
LRHLIKWISLSKYSFLSLQKQKFLLSSLMISYVQVQTVTLIPGDGIGPEISAAVMKIFDAAKAPIQWEERNVTAIQGPGGKWMIPSEAKESMDKNKMGLKGPLKTPIAAGHPSMNLLLRKTFDLYANVRPCVSIEGYKTPYTDVNIVTIRENTEGEYSGIEHVIVDGVVQSIKLITEGASKRIAEFAFEYARNNHRSNVTAVHKANIMRMSDGLFLQKCREVAESCKDIKFNEMYLDTVCLNMVQDPSQFDVLVMPNLYGDILRFMGRLQTLQARTWRIPQPSCSVP

SEQ ID NO: 36447 - protein, 10 aa, Homo sapiens
LSGLLSLILG

SEQ ID NO: 36448 - protein, 86 aa, Homo sapiens
LFLACFIADFFWASGAGAQRRVLASHCFCFVGRLYQVEYAMEAIGHAGTCLGILANDGVLLAAERRNIHKLLDEVFFSEKIYKLNE

SEQ ID NO: 36449 - protein, 51 aa, Homo sapiens
LEIATLTRENGKTVIRVLKQKEVEQLIKKHEEEEAKAEREKKEKEQKEKDK

SEQ ID NO: 36450 - protein, 15 aa, Homo sapiens
LNWVLVISVQLNTLL

SEQ ID NO: 36451 - protein, 489 aa, Homo sapiens
LLLLLLLSLLPVARASEAEHRLFERLFEDYNEIIRPVANVSDPVIIHFEVSMSQLVKVDEVNQIMETNLWLKQIWNDYKLKWNPSDYGGAEFMRVPAQKIWKPDIVLYNNAVGDFQVDDKTKALLKYTGEVTWIPPAIFKSSCKIDVTYFPFDYQNCTMKFGSWSYDKAKIDLVLIGSSMNLKDYWESGEWAIIKAPGYKHDIKYNCCEEIYPDITYSLYIRRLPLFYTINLIIPCLLISFLTVLVFYLPSDCGEKVTLCISVLLSLTVFLLVITETIPSTSLVIPLIGEYLLFTMIFVTLSIVITVFVLNVHYRTPTTHTMPSWVKTVFLNLLPRVMFMTRPTSNEGNAQKPRPLYGAELSNLNCFSRAESKGCKEGYPCQDGMCGYCHHRRIKISNFSANLTRSSSSESVDAVLSLSALSPEIKEAIQSVKYIAENMKAQNEAKEIQDDWKYVAMVIDRIFLWVFTLVCILGTAGLFLQPLMAREDA

SEQ ID NO: 36452 - protein, 866 aa, Homo sapiens
MPGGPSPRSPAPLLRPLLLLLCALAPGAPGPAPGRATEGRAALDIVHPVRVDAGGSFLSYELWPRALRKRDVSVRRDAPAFYELQYRGRELRFNLTANQHLLAPGFVSETRRRGGLGRAHIRAHTPACHLLGEVQDPELEGGLAAISACDGLKGVFQLSNEDYFIEPLDSAPARPGHAQPHVVYKRQAPERLAQRGDSSAPSTCGVQVYPELESRRERWEQRQQWRRPRLRRLHQRSVSKEKWVETLVVADAKMVEYHGQPQVESYVLTIMNMVAGLFHDPSIGNPIHITIVRLVLLEDEEEDLKITHHADNTLKSFCKWQKSINMKGDAHPLHHDTAILLTRKDLCAAMNRPCETLGLSHVAGMCQPHRSCSINEDTGLPLAFTVAHELGHSFGIQHDGSGNDCEPVGKRPFIMSPQLLYDAAPLTWSRCSRQYITRFLDRGWGLCLDDPPAKDIIDFPSVPPGVLYDVSHQCRLQYGAYSAFCEDMDNVCHTLWCSVGTTCHSKLDAAVDGTRCGENKWCLSGECVPVGFRPEAVDGGWSGWSAWSICSRSCGMGVQSAERQCTQPTPKYKGRYCVGERKRFRLCNLQACPAGRPSFRHVQCSHFDAMLYKGQLHTWVPVVNDVNPCELHCRPANEYFAEKLRDAVVDGTPCYQVRASRDLCINGICKNVGCDFEIDSGAMEDRCGVCHGNGSTCHTVSGTFEEAEGLGYVDVGLIPAGAREIRIQEVAEAANFLALRSEDPEKYFLNGGWTIQWNGDYQVAGTTFTYARRGNWENLTSPGPTKEPVWIQVPASRGPGGGSRGGVPRPSTLHGRSRPGGVSPGSVTEPGSEPGPPAAASTSVSPSLKWPNLVAAVHRGGWGQLL

SEQ ID NO: 36453 - protein, 34 aa, Homo sapiens
MVACFMVFVFVSNARFNMIDAMHCVASFLEKSIF

SEQ ID NO: 36454 - protein, 48 aa, Homo sapiens
MWATLPLLCAGAWLLGVPVCGAAELCVNSLEKFHFKSWMSKENKKVSL

SEQ ID NO: 36455 - protein, 110 aa, Homo sapiens
MGCAVHKGFAFVQYFSERNARAAGAGEDDRMIAGQVLDINLAAEPKVNRGKAGVKRSAVEMYSSSFHLGYDYQGDYDDTMYSYSARVPPPPPIAWAVVLSKRQRVSGNTS

SEQ ID NO: 36456 - protein, 81 aa, Homo sapiens
LGEPWRRGLALLYAGASAGVSGVDASFLRLFPCCCESERAAGGGGSGAGMEDVNSNVNADQEAGVQWRDLGSLQPLSPRFR

SEQ ID NO: 36457 - protein, 252 aa, Homo sapiens
VAEPEQAGVRRHYLYPFTGGYRRRRAACQAERPAARSKDTDLAAYQKGNLGVQLRNMAQETNHSQVPMLCSTGCGFYGNPRTNGMCSVCYKEHLQRQNSSNGRISPPVQCTDGSVPEAQSALDSTSSSMQPSPVSNQSLLSESVASSQLDSTSVDKAVPETEDVQASVSDTAQQPSEEQSKSLEKPKQKKNRCFMCRKKVGLTGFECRCGNVYCGVHRYSDVHNCSYNYKADAAEKIRKENPVVVGEKIQKI

SEQ ID NO: 36458 - protein, 24 aa, Homo sapiens
LLSTGFFQIMFMGLCVYNMKNDLK

SEQ ID NO: 36459 - protein, 20 aa, Homo sapiens
MMLQPLEAVVSASGLLLSLA

SEQ ID NO: 36460 - protein, 70 aa, Homo sapiens
LPTPRELAAPGGQRPDVRGRCAPGPRGVTLSRLQTQREKLHSGGEGVLSAKDEIPPITRSLSCRTQAGQR

SEQ ID NO: 36461 - protein, 1436 aa, Homo sapiens
LPTPRELAAPGGQRPDVRGRCAPGPRGVTLSRLQTQREKLHSGGEGVLSAKDEIPPITRSLSCRTQAGQREHTARMGAAGRQDFLFKAMLTISWLTLTCFPGATSTVAAGCPDQSPELQPWNPGHDQDHHVHIGQGKTLLLTSSATVYSIHISEGGKLVIKDHDEPIVLRTRHILIDNGGELHAGSALCPFQGNFTIILYGRADEGIQPDPYYGLKYIGVGKGGALELHGQKKLSWTFLNKTLHPGGMAEGGYFFERSWGHRGVIVHVIDPKSGTVIHSDRFDTYRSKKESERLVQYLNAVPDGRILSVAVNDEGSRNLDDMARKAMTKLGSKHFLHLGFRHPWSFLTVKGNPSSSVEDHIEYHGHRGSAAARVFKLFQTEHGEYFNVSLSSEWVQDVEWTEWFDHDKVSQTKGGEKISDLWKAHPGKICNRPIDIQATTMDGVNLSTEVVYKKGQDYRFACYDRGRACRSYRVRFLCGKPVRPKLTVTIDTNVNSTILNLEDNVQSWKPGDTLVIASTDYSMYQAEEFQVLPCRSCAPNQVKVAGKPMYLHIGEEIDGVDMRAEVGLLSRNIIVMGEMEDKCYPYRNHICNFFDFDTFGGHIKFALGFKAAHLEGTELKHMGQQLVGQYPIHFHLAGDVDERGGYDPPTYIRDLSIHHTFSRCVTVHGSNGLLIKDVVGYNSLGHCFFTEDGPEERNTFDHCLGLLVKSGTLLPSDRDSKMCKMITEDSYPGYIPKPRQDCNAVSTFWMANPNNNLINCAAAGSEETGFWFIFHHVPTGPSVGMYSPGYSEHIPLGKFYNNRAHSNYRAGMIIDNGVKTTEASAKDKRPFLSIISARYSPHQDADPLKPREPAIIRHFIAYKNQDHGAWLRGGDVWLDSCRFADNGIGLTLASGGTFPYDDGSKQEIKNSLFVGESGNVGTEMMDNRIWGPGGLDHSGRTLPIGQNFPIRGIQLYDGPINIQNCTFRKFVALEGRHTSALAFRLNNAWQSCPHNNVTGIAFEDVPITSRVFFGEPGPWFNQLDMDGDKTSVFHDVDGSVSEYPGSYLTKNDNWLVRHPDCINVPDWRGAICSGCYAQMYIQAYKTSNLRMKIIKNDFPSHPLYLEGALTRSTHYQQYQPVVTLQKGYTIHWDQTAPAELAIWLINFNKGDWIRVGLCYPRGTTFSILSDVHNRLLKQTSKTGVFVRTLQMDKVEQSYPGRSHYYWDEDSGLLFLKLKAQNEREKFAFCSMKGCERIKIKALIPKNAGVSDCTATAYPKFTERAVVDVPMPKKLFGSQLKTKDHFLEVKMESSKQHFFHLWNDFAYIEVDGKKYPSSEDGIQVVVIDGNQGRVVSHTSFRNSILQGIPWQLFNYVATIPDNSIVLMASKGRYVSRGPWTRVLEKLGADRGLKLKEQMAFVGFKGSFRPIWVTLDTEDHKAKIFQVVPIPVVKKKKL

SEQ ID NO: 36462 - protein, 144 aa, Homo sapiens
LRGAAKMAASRWARKAVVLLCASDLLLLLLLLPPPGSCAAEGSPGTPDESTPPPRKKKKDIRDYNDADMARLLEQWETPEPLPVLPEVPSTCACLSSASLIWTCFSHLSPHALVKRVWPPAKQGLGGKESPASAWLPHRGGELK

SEQ ID NO: 36463 - protein, 240 aa, Homo sapiens
LRGAAKMAASRWARKAVVLLCASDLLLLLLLLPPPGSCAAEGSPGTPDESTPPPRKKKKDIRDYNDADMARLLEQWEKDDDIEEGDLPEHKRPSAPVDFSKIDPSKPESILKMTKKGKTLMMFVTVSGSPTEKETEEITSLWQGSLFNANYDVQRFIVGSDRAIFMLRDGSYAWEIKDFLVGQDRCADVTLEGQVYPGKGGGSKEKNKTKQDKGKKKKEGDLKSRSSKEENRAGNKREDL

SEQ ID NO: 36464 - protein, 606 aa, Homo sapiens
MDYSFDTTAEDPWVRISDCIKNLFSPIMSENHGHMPLQPNASLNEEEGTQGHPDGTPPKLDTANGTPKVYKSADSSTVKKGPPVAPKPAWFRQSLKGLRNRASDPRGLPDPALSTQPAPASREHLGSHIRASSSSSSIRQRISSFETFGSSQLPDKGAQRLSLQPSSGEAAKPLGKHEEGRFSGLLGRGAAPTLVPQQPEQVLSSGSPAASEARDPGVSESPPPGRQPNQKTLPPGPDPLLRLLSTQAEESQGPVLKMPSQRARSFPLTRSQSCETKLLDEKTSKLYSISSQVSSAVMKSLLCLPSSISCAQTPCIPKEGASPTSSSNEDSAANGSAETSALDTGFSLNLSELREYTEGLTEAKEDDDGDHSSLQSGQSVISLLSSEELKKLIEEVKVLDEATLKQLDGIHVTILHKEEGAGLGFSLAGGADLENKVITVHRVFPNGLASQEGTIQKGNEVLSINGKSLKGTTHHDALAILRQAREPRQAVIVTRKLTPEAMPDLNSSTDSAASASAASDVSVESTEATVCTVTLEKMSAGLGFSLEGGKGSLHGDKPLTINRIFKGVGCVWFFACSPVVGMWPGPQKASGHFLGYVVSHNSMSSS

SEQ ID NO: 36465 - protein, 36 aa, Homo sapiens
LLPPHPDGGKHRWASQWLLPRPRPSRTPPSKRLFLK

SEQ ID NO: 36466 - protein, 70 aa, Homo sapiens
LAFLLLGWPTDLGNLPWLWVTCSLSPRTMEAPCRNMVLTLWGLYPKLKGLEKPLKSRDHNPPPSKDKTSH

SEQ ID NO: 36467 - protein, 26 aa, Homo sapiens
LDVWPVSLGKLLLIIFTVDNIGENSP

SEQ ID NO: 36468 - protein, 757 aa, Homo sapiens
LPHLFPSSADPCPNRGARGALTRPLRSEVQYVVLQNVATMSIKRRGMFEPYLKSFYIRSTDPTQIKILKLEVLTNLANETNIPTVLREFQTYIRSMDKDFVAATIQAIGRCATNIGRVRDTCLNGLVQLLSNRDELVVAESVVVIKKLLQMQPAQHGEIIKHLAKLTDNIQVPMARASILWLIGEYCEHVPRIAPDVLRKMAKSFTAEEDIVKLQVINLAAKLYLTNSKQTKLLTQYVLSLAKYDQNYDIRDRARFTRQLIVPSEQGGALSRHAKKLFLAPKPAPVLESSFKDRDHFQLGSLSHLLNAKATGYQELPDWPEEAPDPSVRNVEVPEWTKCSNREKRKEKEKPFYSDSEGESGPTESADSDPESESESDSKSSSESGSGESSSESDNEDQDEDEEKGRGSESEQSEEDGKRKTKKKVPERKGEASSSDEGSDSSSSSSESEMTSESEEEQLEPASWSRKTPPSSKSAPATKEISLLDLEDFTPPSVQPVSPPAIVSTSLAADLEGLTLTDSTLVPSLLSPVSGVGRQELLHRVAGEGLAVDYTFSRQPFSGDPHMVSVHIHFSNSSDTPIKGLHVGTPKLPAGISIQEFPEIESLAPGESATAVMGINFCDSTQAANFQLCTQTRQFYVSIQPPVGELMAPVFMSENEFKKEQGKLMGMNEITEKLMLPDTCRSDHIVVQKVTATANLGRVPCGTSDEYRFAGRTLTGGSLVLLTLDARPAGAAQLTVNSEKMVIGTMLVKDVIQALTQ

SEQ ID NO: 36469 - protein, 15 aa, Homo sapiens
LRFFTKIQKFCLVLF

SEQ ID NO: 36470 - protein, 127 aa, Homo sapiens
LPQTFGIFRMTDTAEAVPKFEEMFASRFTENDKEYQEYLKRPPESPPIVEEWNSRAGGNQRNRGNRLQDNRQFRGRDNRWGWPSDNRSNQWHGRSWGNNYPQHRQEPYYPQQYGHYGYNQRPPYGYY

SEQ ID NO: 36471 - protein, 126 aa, Homo sapiens
MPKKAGATTKGKSQSKEPERPLPPLGPVAVDPKGCVTIAIHAKPGSKQNAVTDLTAEAVNVAIAAPPSEGEANAELCRYLSKVLELRKSDVVLDKKLRDLLKIVPCKLATRTQILGLLVECSFSRL

SEQ ID NO: 36472 - protein, 33 aa, Homo sapiens
MTVTDSPLLLWSSGRTPPGMAQRSQDLEVGTSG

SEQ ID NO: 36473 - protein, 152 aa, Homo sapiens
MAVAVDQQIQTPSVQDLQIVKLEEDSHWEQEISLQGNYPGPETSCQSFWHFRYQEASRPREALLQLQKLCCQWLRPEKCTKEQILELLVLEQFPTVLLQEIQIWVRQQHPESGEEAVALVEDLQKEPGRQRLEPCLMWLWEFLQRRAGVARR

SEQ ID NO: 36474 - protein, 206 aa, Homo sapiens
VGTAGRAAGAGHGSAAQGRLRPQGRGFKRIEGSPGAQRPGSAPERSRGPGTAMARRAGGARMFGSLLLFALLAAGVAPLSWDLPEPRSRASKIRVHSRGNLWATGHFMGKKSLEPSSPSPLGTAPHTSLRDQRLQLSHDLLGILLLKKALGVSLSRPAPQIQEAAGTNTAEMTPIMGQTQQRGLDCAHPGKVLNGTLLMAPSGCKS

SEQ ID NO: 36475 - protein, 173 aa, Homo sapiens
VGTAGRAAGAGHGSAAQGRLRPQGRGFKRIEGSPGAQRPGSAPERSRGPGTAMARRAGGARMFGSLLLFALLAAGVAPLSWDLPEPRSRASKIRVHSRGNLWATGHFMGKKSLEPSSPSPLGTAPHTSLRDQRLQLSHDLLGILLLKKALGVSLSRPAPQIQYRRLLVQILQK

SEQ ID NO: 36476 - protein, 471 aa, Homo sapiens
MPARCIHCGVVHLTLALLKSHIQERHCQVFHKCAFCPMAFKTASSTADHSATQHPTQPHRPSQLIYKCSCEMVFNKKRHIQQHFYQNVSKTQVGVFKCPECPLLFVQKPELMQHVKSTHGVPRNVDELSSLQSSADTSSSRPGSRVPTEPPATSVAARSSSLPSGRWGRPEAHRRVEARPRLRNTGWTCQECQEWVPDRESYVSHMKKSHGRTLKRYPCRQCEQSFHTPNSLRKHIRNNHDTVKKFYTCGYCTEDSPSFPRPSLLESHISLMHGIRNPDLSQTSKVKPPGGHSPQVNHLKRPVSGVGDAPGTSNGATVSSTKRHKSLFQCAKCSFATDSGLEFQSHIPQHQVDSSTAQCLLCGLCYTSASSLSRHLFIVHKVRDQEEEEEEEAAAAEMAVEVAEPEEGSGEEVPMETRENGLEECAGEPLSADPEARRLLGPAPEDDGGHNDHSQPQASQDQDSHTLSPQV

SEQ ID NO: 36477 - protein, 143 aa, Homo sapiens
VVPKCLPPALRTVENKRLCPQCECDRLYPGVVSALSCQCWVSPSPRKCGVGQDPHSSEFASVIYGFSLLLGAPSLVCVLPTPSCLCGPTPLLSTRLEPHSGCALLGGSRLLPSARALLRALFSCRHQLSFLPLDPEKEGNEGC

SEQ ID NO: 36478 - protein, 32 aa, Homo sapiens
MLSQFILYFFTGVIASDGNGVCFSFSQDLHKV

SEQ ID NO: 36479 - protein, 66 aa, Homo sapiens
LGSIQVMQAVRNAGSRFLRSWTWPQTAGVVARTPAGTICTGARQLQDAAAKQKVEQNAAPSHTKFR

SEQ ID NO: 36480 - protein, 124 aa, Homo sapiens
LGSIQVMQAVRNAGSRFLRSWTWPQTAGRVVARTPAGTICTGARQLQDAAAKQKVEQNAAPSHTKFSIYPPIPGEESSLRWAGKKFEEIPIAHIKASHNKGISECQEGHRHRSTDSRHSRSGES

SEQ ID NO: 36481 - protein, 60 aa, Homo sapiens
LDQPSGDPQPLTLARHPPESEPVNFQLCHLLSVGPYANKSEPQPSHLKMRIMLREVVRIR

SEQ ID NO: 36482 - protein, 47 aa, Homo sapiens
LWLLGFLLFLKMFSSFLSDSFEVLDNQELRSHRPWSPIFACSLALRY

SEQ ID NO: 36483 - protein, 415 aa, Homo sapiens
VPIPAPASPQHAAPPPAGRAVRRAALRPQPPRRPGVMWPFPEGGNTIPILHTDICSKNPCHNGGLCEEISQEVRGDVFPSYTCTCLKGYAGNHCETKCVEPLGLENGNIANSQIAASSVRVTFLGLQHWVPELARLNRAGMVNAWTPSSNDDNPWIQVNLLRRMWVTGVVTQGASRLASHEYLKAFKVAYSLNGHEFDFIHDVNKKHKEFVGNWNKNAVHVNLFETPVEAQYVRLYPTSCHTACTLRFELLGCELNGCANPLGLKNNSIPDKQITASSSYKTWGLHLFSWNPSYARLDKQGNFNAWVAGSYGNDQWLQVDLGSSKEVTGIITQGARNFGSVQFVASYKVAYSNDSANWTEYQDPRTGSSKIFPGNWDNHSHKKNLFETPILARYVRILPVAWHNRIALRLELLGC

SEQ ID NO: 36484 - protein, 350 aa, Homo sapiens
LSSPACPFQRPRPRSMPRPRLLAALCGALLCAPSLLVALDICSKNPCHNGGLCEEISQEVRGDVFPSYTCTCLKGYAGNHCETKCVEPLGLENGNIANSQIAASSVRVTFLGLQHWVPELARLNRAGMVNAWTPSSNDDNPWIQVNLLRRMWVTGVVTQGASRLASHEYLKAFKVAYSLNGHEFDFIHDVNKKHKEFVGNWNKNAVHVNLFETPVEAQYVRLYPTSCHTACTLRFELLGCELNGCANPLGLKNNSIPDKQITASSSYKTWGLHLFSWNPSYARLDKQGNFNAWVAGSYGNDQWLQIFPGNWDNHSHKKNLFETPILARYVRILPVAWHNRIALRLELLGC

SEQ ID NO: 36485 - protein, 402 aa, Homo sapiens
LSSPACPFQRPRPRSMPRPRLLAALCGALLCAPSLLVALDICSKNPCHNGGLCEEISQEVRGDVFPSYTCTCLKGYAGNHCETKCVEPLGLENGNIANSQIAASSVRVTFLGLQHWVPELARLNRAGMVNAWTPSSNDDNPWIQVNLLRRMWVTGVVTQGASRLASHEYLKAFKVAYSLNGHEFDFIHDVNKKHKEFVGNWNKNAVHVNLFETPVEAQYVRLYPTSCHTACTLRFELLGCELNGCANPLGLKNNSIPDKQITASSSYKTWGLHLFSWNPSYARLDKQGNFNAWVAGSYGNDQWLQVDLGSSKEVTGIITQGARNFGSVQFVASYKVAYSNDSANWTEYQDPRTGSSKIFPGNWDNHSHKKNLFETPILARYVRILPVAWHNRIALRLELLGC

SEQ ID NO: 36486 - protein, 99 aa, Homo sapiens
VVGILKIQVHYYEDSNVQLVSHKDIQDSLTVSNEVQTAKESTKIVKAAENEYQTAISENYQTMSDTTFKALHRQLLLTRTKIDWNKILSYEVGKEMQNA

SEQ ID NO: 36487 - protein, 53 aa, Homo sapiens
LSSFSIWLLLSQVHLVSLLKMCLNSDFALPPKGFSLRTVKDVCHFVVVVCVLT

SEQ ID NO: 36488 - protein, 307 aa, Homo sapiens
LGWLPSALLRASWLGLLGAWAAGQPGQAADRAIESLYRKHCLEQGKQQLMPQEAGLAEEFLLTDNSAIWQTVEELDYLEVEAEAKMENLRAAVPGQPLALTARGGPKDTQPSYHHGNGPYNDVDIPGCWFFKLPHKDGNSCNVGSPFAKDFLPKMEDGTLQAGPGGASGPRALEINKMISFWRNAHKRISSQMVVWLPRSALPRAVIRHPDYDEEGLYGAILPQVVTAGTITRRAVEPTWLTASNARPDRVGSELKAMVQAPPGYTLVGADVDSQELWIAAVLGDAHFAGMHGEQEPGLGQPSPSAY

SEQ ID NO: 36489 - protein, 58 aa, Homo sapiens [sequence omitted]

SEQ ID NO: 36490 - protein, 1939 aa, Homo sapiens
VSGAVSLKEGTKGRWRGPGPGPRGGGTADMACCHKVMLLLDTAGGAARHSRVRRAALRLLTYLSCRFGLARVHWAFKFFDSQGARSRPSRVSDFRELGSRSWEDFEEELEARLEDRAHLPGPAPRATHTHGALMETLLDYQWDRPEITSPTKPILRSSGRRLLDVESEAKEAEAALGGLVNAVFLLAPCPHSQRELLQFVSGCEAQAQRLPPTPKQVMEKLLPKRVREVMVARKITFYWVDTTEWSKLWESPDHLGYWTVCELLHHGGGTVLPSESFSWDFAQAGEMLLRSGIKLSSEPHLSPWISMLPTDATLNRLLYNSPEYEASFPRMEGMLFLPVEAGKEIQETWTVTLEPLAMHQRHFQKPVRIFLKGSVAQWSLPTSSTLGTDSWMLGSPEESTATQRLLFQQLVSRLTAEELHLVADVDPGEGRPPITGVISPLSASAMILTVCRTKEAEFQRHVLQTAVADSPRDTASLFSDVVDSILNQTHDSLADTASAASPVPEWAQQELGHTTPWSPAVVEKWFPFCNISGASSDLMESFGLLQAASANKEESSKTEGELIHCLAELYQRKSREESTIAHQEDSKKKRGVPRTPVRQKMNTMCRSLKMLNVARLNVKAQKLHPDGSPDVAGEKGIQKIPSGRTVDKLEDRGRTLRSSKPKDFKTEEELLSYIRENYQKTVATGEIMLYACARNMISTVKMFLKSKGTKELEVNCLNQVKSSLLKTSKSLRQNLGKKLDKEDKVRECQLQVFLRLEMCLQCPSINESTDDMEQVVEEVTDLLRMVCLTEDSAYLAEFLEEILRLYIDSIPKTLGNLYNSLGFVIPQKLAGVLPTDFFSDDSMTQENKSPLLSVPFLSSARRSVSGSPESDELQELRTRSAKKRRKNALIRHKSIAEVSQNLRQIEIPKVSKRATKKENSHPAPQQPSQPVKDTVQEVTKVRRNLFNQELLSPSKRSLKRGLPRSHSVSAVDGLEDKLDNFKKNKGYHKLLTKSVAETPVHKQISKRLLHRQIKGRSSDPGPDIGVVEESPEKGDEISLRRSPRIKQLSFSRTHSASFYSVSQPKSRSVQRVHSFQQDKSDQRENSPVQSIRSPKSLLFGAMSEMISPSEKGSARMKKRSRNTLDSEVPAAYQTPKKSHQKSLSFSKTTPRRISHTPQTPLYTPERLQKSPAKMTPTKQAAFKESLKDSSSPGHDSPLDSKITPQKRHTQAGEGTSLETKTPRTPKRQGTQPPGFLPNCTWPHSVNSSPESPSCPAPPTSSTAQPRRECLTPIRDPLRTPPRAAAFMGTPQNQTHQQPHVLRAARAEEPAQKLKDKAIKTPKRPGNSTVTSSPPVTPKKLFTSPLCDVSKKSPFRKSKIECPSPGELDQKEPQMSPSVAASLSCPVPSTPPELSQRATLDTVPPPPPSKVGKRCRKTSDPRRSIVECQPDASATPGVGTADSPAAPTDSRDDQKGLSLSPQSPPERRGYPGPGLRSDWHASSPLLITSDTEHVTLLSEAEHHGIGDLKSNVLSVEEGEGLRTADAEKSSLSHPGIPPSPPSCGPGSPLMPSRDVHCTTDGRQCQASAQLDNLPASAWHSTDSASPQTYEVELEMQASGLPKLRIKKIDPSSSLEAEPLSKEESSLGEESFLPALSMPRASRSLSKPEPTYVSPPCPRLSHSTPGKSRGQTYICQACTPTHGPSSTPSPFQTDGVPWTPSPKHSGKTTPDIIKDWPRRKRAVGCGAGSSSGRGEVGADLPGSLSLLESEGKDHGLELSIHRTPILEDFELEGVCQLPDQSPPRNSMPKAEEASSWGQFGLSSRKRVLLAKEEADRGAKRICDLREDSEVSKSKEGSPSWSAWQLPSTGDEEVFVSGSTPPPSCAVRSCLSASALQALTQSPLLFQGKTPSSQSKDPRDEDVDVLPSTVEDSPFSRAFSRRRPISRTYTRKKLMGTWLEDL

SEQ ID NO: 36491 - protein, 975 aa, Homo sapiens
LSRLPTITMAKGFYISKSLGILGILLGVAAVCTIIALSVVYSQEKNKNANSSPVASTTPSASATTNPASATTLDQSKAWNRYRLPNTLKPDSYRVTLRPYLTPNDRGLYVFKGSSTVRFTCKEATDVIIIHSKKLNYTLSQGHRVVLRGVGGSQPPDIDKTELVEPTEYLVVHLKGSLVKDSQYEMDSEFEGELADDLAGFYRSEYMEGNVRKVVATTQMQAADARKSFPCFDEPAMKAEFNITLIHPKDLTALSNMLPKGPSTPLPEDPNWNVTEFHTTPKMSTYLLAFIVSEFDYVEKQASNGVLIRIWARPSAIAAGHGDYALNVTGPILNFFAGHYDTPYPLPKSDQIGLPDFNAGAMENWGLVTYRENSLLFDPLSSSSSNKERVVTVIAHELAHQWFGNLVTIEWWNDLWLNEGFASYVEYLGADYAEPTWNLKDLMVLNDVYRVMAVDALASSHPLSTPASEINTPAQISELFDAISYSKGASVLRMLSSFLSEDVFKQGLASYLHTFAYQNTIYLNLWDHLQEAVNNRSIQLPTTVRDIMNRWTLQMGFPVITVDTSTGTLSQEHFLLDPDSNVTRPSEFNYVWIVPITSIRDGRQQQDYWLIDVRAQNDLFSTSGNEWVLLNLNVTGYYRVNYDEENWRKIQTQLQRDHSAIPVINRAQIINDAFNLASAHKVPVTLALNNTLFLIEERQYMPWEAALSSLSYFKLMFDRSEVYGPMKNYLKKQVTPLFIHFRNNTNNWREIPENLMDQYSEVNAISTACSNGVPECEEMVSGLFKQWMENPNNNPIHPNLRSTVYCNAIAQGGEEEWDFAWEQFRNATLVNEADKLRAALACSKELWILNRYLSYTLNPDLIRKQDATSTIISITNNVIGQGLVWDFVQSNWKKLFNDYGGGSFSFSNLIQAVTRRFSTEYELQQLEQFKKDNEETGFGSGTRALEQALEKTKANIKWVKENKEVVLQWFTENSK

SEQ ID NO: 36492 - protein, 381 aa, Homo sapiens
MCEKSYTSKYNLVTHILGHNGIKPHSCPHCSKLFKQPSHLQTHLLTHQGTRPHKCQVCHKAFTQTSHLKRHMLLHSEVKPYSCHFCGRGFAYPSELKAHEVKHESGRCHVCVECGLDFSTLTQLKRHLASHQGPTLYQCLECDKSFHYRSQLQNHMLKHQNVRPFVCTECGMEFSQIHHLKQHSLTHKGVKEFKCEVCGREFTLQANMKRHMLIHTSVRPYQCHICFKTFVQKQTLKTHMIVHSPVKPFKCKVCGKSFNRMYNLLGHMHLHAGSKPFKCPYCSSKFNLKGNLSRHMKVKHGVMDIGLDSQGGWAKRNGQSRNDTNMTHSGASCPVRGVGRLAKAETSLGWAQVWKGGTLEGHDDNNDGIFMSSSKDLNEIT

SEQ ID NO: 36493 - protein, 490 aa, Homo sapiens
VPARPAPARPSVSPRPGSREERRALGPLPPCSFALQLGMAGYLRVVRSLCRASGSRPAWAPAALTAPTSQEQPRRHYADKRIKVAKPVVEMDGDEMTRIIWQFIKEKLILPHVDIQLKYFDLGLPNRDQTDDQVTIDSALATQKYSVAVKCATITPDEARVEEFKLKKMWKSPNGTIRNILGGTVFREPIICKNIPRLVPGWTKPITIGRHAHGDQYKATDFVADRAGTFKMVFTPKDGSGVKEWEVYNFPAGGVGMGMYNTDESISGFAHSCFQYAIQKKWPLYMSTKNTILKAYDGRFKDIFQEIFDKHYKTDFDKNKIWYEHRLIDDMVAQVLKSSGGFVWACKNYDGDVQSDILAQGFGSLGLMTSVLVCPDGKTIEAEAAHGTVTRHYREHQKGRPTSTNPIASIFAWTRGLEHRGKLDGNQDLIRFAQMLEKVCVETVESGAMTKDLAGCIHGLSNVKLNEHFLNTTDFLDTIKSNLDRALGRQ

SEQ ID NO: 36494 - protein, 417 aa, Homo sapiens
LGSQELKSMSLVLLVLLRGAATEQGAPHFLHPVLPHESIPRILGALPSMNAAIPHVPRYHLQPKNFNWTGEPAAINSCSLSMKKAGRCYFSSARIRLTSQGQASRRLEAINRVLAGSVPPTLTPKQGYFLQPERVASDSWTECTLPSMVNSEHRAAKVPLCPASAPMLQRSRALLNINQFSTLKRQKQAIRFQKIRRQMEAPGAPPRTLTWEAMEQIRYLHEEFPESWSVPRLAEGFDVSTDVIRRVLKSKFLPTLEQKLKQDQKVLKKAGLAHSLQHLRGSGNTSKLLPAGHSVSGSLLMPGHEASSKDPNHSTALKVIESDTHRTNTPRRRKGRNKEIQDLEESFVPVAAPLGHPRELQKYSSDSESPRGTGSGALPSGQKLEELKAEEPDNFSSKVVQRGREFFDSNGNFLYRI

SEQ ID NO: 36495 - protein, 69 aa, Homo sapiens
LVCVDMAVTLSLLLGGRVCAAVTRCGFATRGVAGPGPIGREPDPDSDWEPEERELQEVERYRLLPGPSA

SEQ ID NO: 36496 - protein, 16 aa, Homo sapiens
MARLPLRSKRRGLGAP

SEQ ID NO: 36497 - protein, 107 aa, Homo sapiens
LGRLRQENCLNPGGRGCSEPRLCHCTSPWVTVRLHLKQTNTSNAVSQIPCLPFFLLYFIYYTSNTYSLKKKTSKMKTKVIPDPTSEELLSYQHFSKHMYNFKTSTKE

SEQ ID NO: 36498 - protein, 175 aa, Homo sapiens
VPTIESLIGESSGNLNDPNKEALAKTEVSLTLTNKFDVPGDENAEMDARTILLNTKRLIVDVIRFQPGETLTEILETPATSEQEAEHQRAMQRRAIRDAKTPDKMKKSKSVKEDSNLTLQEKKEKIQTGLKKLTELGTVDPKNKYQELINDIARVLHSGDRGDPALFKAERLERQ

SEQ ID NO: 36499 - protein, 84 aa, Homo sapiens
LDESWPRQQPPWKDEKHPGFRLTSALNRTNSDSALHTSALSTKPQDPYGGGGQSAWPAPYMGFCDGENNGHGEDSVPVRTPSIL

SEQ ID NO: 36500 - protein, 1016 aa, Homo sapiens
LADPRGAGAAERAGGPGPSGSAAAARGAGGYGWAGARLRLRRCLHAGRRPRACESRQLGRLGPERRGGRALTVCVEASMKLKKQVTVCGAAIFCVAVFSLYLMLDRVQHDPTRHQNGGNFPRSQISVLQNRIEQLEQLLEENHEIISHIKDSVLELTANAEGPPAMLPYYTVNGSWVVPPEPRPSFFSISPQDCQFALGGRGQKPELQMLTVSEELPFDNVDGGVWRQGFDISYDPHDWDAEDLQVFVVPHSHNDPGWIKTFDKYYTEQTQHILNSMVSKLQEDPRRRFLWAEVSFFAKWWDNINVQKRAAVRRLVGNGQLEIATGGWVMPDEANSHYFALIDQLIEGHQWLERNLGATPRSGWAVDPFGYSSTMPYLLRRANLTSMLIQRVHYAIKKHFAATHSLEFMWRQTWDSDSSTDIFCHMMPFYSYDVPHTCGPDPKICCQFDFKRLPGGRINCPWKVPPRAITEANVAERAALLLDQYRKKSQLFRSNVLLVPLGDDFRYDKPQEWDAQFFNYQRLFDFFNSRPNLHVQAQFGTLSDYFDALYKRTGVEPGARPPGFPVLSGDFFSYADREDHYWTGYYTSRPFYKSLDRVLEAHLRGAEVLYSLAAAHARRSGLAGRYPLSDFTLLTEARRTLGLFQHHDAITGTAKEAVVVDYGVRLLRSLVNLKQVIIHAAHYLVLGDKETYHFDPEAPFLQVDDTRLSHDALPERTVIQLDSSPRFVVLFNPLEQERFSMVSLLVNSPRVRVLSEEGQPLAVQISAHWSSATEAVPDVYQVSVPVRLPALGLGVLQLQLGLDGHRTLPSSVRIYLHGRQLSVSRHEAFPLRVIDSGTSDFALSNRYMQVWFSGLTGLLKSIRRVDEEHEQQVDMQVLVYGTRTSKDKSGAYLFLPDGEAKPYVPKEPPVLRVTEGPFFSEVVAYYEHIHQAVRLYNLPGVEGLSLDISSLVDIRDYVNKELALHIHTDIDSQGAAPTVSEEAPPPGQLLPHASHGLYPGRTEAPHAAHCPGPGCL

SEQ ID NO: 36501 - protein, 814 aa, Homo sapiens
LGPERRGGRALTVCVEASMKLKKQVTVCGAAIFCVAVFSLYLMLDRVQHDPTRHQNGGNFPRSQISVLQNRIEQLEQLLEENHEIISHIKDSVLELTANAEGPPAMLPYYTVNGSWVVPPEPRPSFFSISPQDCQFALGGRGQKPELQMLTVSEELPFDNVDGGVWRQGFDISYDPHDWDAEDLQVFVVPHSHNDPGWIKTFDKYYTEQTQHILNSMVSKLQEDPRRRFLWAEVSFFAKWWDNINVQKRAAVRRLVGNGQLEIATGGWVMPDEANSHYFALIDQLIEGHQWLERNLGATPRSGWAVDPFGYSSTMPYLLRRANLTSMLIQRVHYAIKKHFAATHSLEFMWRQTWDSDSSTDIFCHMMPFYSYDVPHTCGPDPKICCQFDFKRLPGGRINCPWKVPPRAITEANVAERAALLLDQYRKKSQLFRSNVLLVPLGDDFRYDKPQEWDAQFFNYQRLFDFFNSRPNLHVQAQFGTLSDYFDALYKRTGVEPGARPPGFPVLSGDFFSYADREDHYWTGYYTSRPFYKSLDRVLEAHLRGAEVLYSLAAAHARRSGLAGRYPLSDFTLLTEARRTLGLFQHHDAITGTAKEAVVVDYGVRLLRSLVNLKQVIIHAAHYLVLGDKETYHFDPEAPFLQVDDTRLSHDALPERTVIQLDSSPRFVVLFNPLEQERFSMVSLLVNSPRVRVLSEEGQPLAVQISAHWSSATEAVPDVYQVSVPVRLPALGLGVLQLQLGLDGHRTLPSSVRIYLHGRQLSVSRHEAFPLRVIDSGTSDFALSNRYMQVWFSGLTGLLKGSGLCFLAEHPKGG

SEQ ID NO: 36502 - protein, 260 aa, Homo sapiens
VTGLFLQALIPLALEGTDVGQTKAAQALAKLTITSNPEMTFPGERIYEVVRPLVSLLHLNCSGLQNFEALMALTNLAGISERLRQKILKEKAVPMIEGYMFEEHEMIRRAATECMCNLAMSKEVQDLFEAQGNDRLKLLVLYSGEDDELLQRAAAGGLAMLTSMRPTLCSRIPQVTTHWLEILQALLLSSNQELQHRGAVVVLNMVEASREIASTLMESEMMEILSVLAKGDHSPVTRAAAACLDKAVEYGLIQPNQDGE

SEQ ID NO: 36503 - protein, 642 aa, Homo sapiens
LLLSGPCGVGLDLDSRLLGASAMRRSEVLAEESIVCLQKALNHLREIWELIGIPEDQRLQRTEVVKKHIKELLDMMIAEEESLKERLIKSISVCQKELNTLCSELHVEPFQEEGETTILQLEKDLRTQVELMRKQKKERKQELKLLQEQDQELCEILCMPHYDIDSASVPSLEELNQFRQHVTTLRETKASRREEFVSIKRQIILCMEALDHTPDTSFERDVVCEDEDAFCLSLENIATLQKLLRQLEMQKSQNEAVCEGLRTQIRELWDRLQIPEEEREAVATIMSGSKAKVRKALQLEVDRLEELKMQNMKKVIEAIRVELVQYWDQCFYSQEQRQAFAPFCAEDYTESLLQLHDAEIVRLKNYYEVHKELFEGVQKWEETWRLFLEFERKASDPNRFTNRGGNLLKEEKQRAKLQKMLPKLEEELKARIELWEQEHSKAFMVNGQKFMEYVAEQWEMHRLEKERAKQERQLKNKKQTETEMLYGSAPRTPSKRRGLAPNTPGKARKLNTTTMSNATANSSIRPIFGGTVYHSPVSRLPPSGSKPVAASTCSGKKTPRTGRHGANKENLELNGSILSGGYPGSAPLQRNFSINSVASTYSEFAKDPSLSDSSTVGLQRELSKASKSDATSGILNSTNIQS

SEQ ID NO: 36504 - protein, 691 aa, Homo sapiens
LLASPHPDCAPATSARGAGIFLERRDATPIATRLRPVARFEILRGSTARGAATRSDIAGVCGWLLLSGPCGVGLDLDSRLLGASAMRRSEVLAEESIVCLQKALNHLREIWELIGIPEDQRLQRTEVVKKHIKELLDMMIAEEESLKERLIKSISVCQKELNTLCSELHVEPFQEEGETTILQLEKDLRTQVELMRKQKKERKQELKLLQEQDQELCEILCMPHYDIDSASVPSLEELNQFRQHVTTLRETKASRREEFVSIKRQIILCMEALDHTPDTSFERDVVCEDEDAFCLSLENIATLQKLLRQLEMQKSQNEAVCEGLRTQIRELWDRLQIPEEEREAVATIMSGSKAKVRKALQLEVDRLEELKMQNMKKVIEAIRVELVQYWDQCFYSQEQRQAFAPFCAEDYTESLLQLHDAEIVRLKNYYEVHKELFEGVQKWEETWRLFLEFERKASDPNRFTNRGGNLLKEEKQRAKLQKMLPKLEEELKARIELWEQEHSKAFMVNGQKFMEYVAEQWEMHRLEKERAKQERQLKNKKQTETEMLYGSAPRTPSKRRGLAPNTPGKARKLNTTTMSNATANSSIRPIFGGTVYHSPVSRLPPSGSKPVAASTCSGKKTPRTGRHGANKENLELNGSILSGGYPGSAPLQRNFSINSVASTYSEFARELSKASKSDATSGILNSTNIQS

SEQ ID NO: 36505 - protein, 205 aa, Homo sapiens
LLLSGPCGVGLDLDSRLLGASAMRRSEVLAEESIVCLQKALNHLREIWELIGIPEDQRLQRTEVVKKHIKELLDMMIAEEESLKERLIKSISVCQKELNTLCSELHVEPFQEEGETTILQLEKDLRTQVELMRKQKKERKQELKLLQEQDQELCEILCMPHYDIDSASVPSLEELNQFRQHVTTLRETKVHCLHLFFLKVTLVFL

SEQ ID NO: 36506 - protein, 147 aa, Homo sapiens
VARFEILRGSTARGAATRSDIAGVCGWLLLSGPCGVGLDLDSRLLGASAMRRSEVLAEESIVCLQKALNHLREIWELIGIPEDQRLQRTEVVKKHIKELLDMMIAEEESLKERLIKSISVCQKELNTLCSELHVEPFQVRGSPQGLW

SEQ ID NO: 36507 - protein, 31 aa, Homo sapiens
LLLSGPCGVGLDLDSRLLGASAMRRSHSLSC

SEQ ID NO: 36508 - protein, 451 aa, Homo sapiens
LNSSSRERLVVTGRAGWMGMGRGAGRSALGFWPTLAFLLCSFPAATSPCKILKCNSEFWSATSGSHAPASDDTPEFCAALRSYALCTRRTARTCRGDLAYHSAVHGIEDLMSQHNCSKDGPTSQPRLRTLPPAGDSQERSDSPEICHYEKSFHKHSATPNYTHCGLFGDPHLRTFTDRFQTCKVQGAWPLIDNNYLNVQVTNTPVLPGSAATATSKLTIIFKNFQECVDQKVYQAEMDELPAAFVDGSKNGGDKHGANSLKITEKVSGQHVEIQAKYIGTTIVVRQVGRYLTFAVRMPEEVVNAVEDWDSQGLYLCLRGCPLNQQIDFQAFHTNAEGTGARRLAAASPAPTAPETFPYETAVAKCKEKLPVEDLYYQACVFDLLTTGDVNFTLAAYYALEDVKMLHSNKDKLHLYERTRDLPGRAAAGLPLAPRPLLGALVPLLALLPVFC

SEQ ID NO: 36509 - protein, 540 aa, Homo sapiens
LSPERWLRRPSRWAGEALAVRSRAGSARRSQACSPGAGGAPRAAAEPAGAAGTSASGAPPTLPRGRRAAPRHPLFSRSPASATPRGPQGLMQPPRERLVVTGRAGWMGMGRGAGRSALGFWPTLAFLLCSFPAATSPCKILKCNSEFWSATSGSHAPASDDTPEFCAALRSYALCTRRTARTCRGDLAYHSAVHGIEDLMSQHNCSKDGPTSQPRLRTLPPAGDSQERSDSPEICHYEKSFHKHSATPNYTHCGLFGDPHLRTFTDRFQTCKVQGAWPLIDNNYLNVQVTNTPVLPGSAATATSKLTIIFKNFQECVDQKVYQAEMDELPAAFVDGSKNGGDKHGANSLKITEKVSGQHVEIQAKYIGTTIVVRQVGRYLTFAVRMPEEVVNAVEDWDSQGLYLCLRGCPLNQQIDFQAFHTNAEGTGARRLAAASPAPTAPETFPYETAVAKCKEKLPVEDLYYQACVFDLLTTGDVNFTLAAYYALEDVKMLHSNKDKLHLYERTRDLPGRAAAGLPLAPRPLLGALVPLLALLPVFC

SEQ ID NO: 36510 - protein, 57 aa, Homo sapiens
LPRGVFIILNLGIWALINSAFLGLGERDGLPPGAHDLSSSKPIMYDSCVAVARLRLP

SEQ ID NO: 36511 - protein, 62 aa, Homo sapiens
VGPGATMPGISTRYSFEIFMMKLAPIQGLSGGVCGSAANLSLIQILSSLASRILSSLASKLG

SEQ ID NO: 36512 - protein, 159 aa, Homo sapiens
LNNSSGFKINWLWLGWTVLGSRHLCVSRVTGEEVPVPLGIVLYATSSQEWQAVESLAFVGPLDIWQRTRKPRFPSVSPSAGKLQAPHAAAVYRPPGLPGEVSRSSCSRGVEQLHEDPKVAKNNSAFQMREPVVQHSVMGQWALVPQCPASPPDTALRSS

SEQ ID NO: 36513 - protein, 132 aa, Homo sapiens
LNNSSGFKINWLWLGWTVLGSRHLCVSRVTGEEVPVPLGIVLYATSSQEWQAVESLAFVGPLDIWQRTRKPRFPSVSPSAGKLQAPHAAAVYRPPGLPGEVSRSSCSRGVEQLHEDPKVAKNNSAFQMRVML

SEQ ID NO: 36514 - protein, 27 aa, Homo sapiens
LTTRLAVFPLKLLMQLLSTDPLDCLGK

SEQ ID NO: 36515 - protein, 759 aa, Homo sapiens
MKSGSGGGSPTSLWGLLFLSAALSLWPTSGEICGPGIDIRNDYQQLKRLENCTVIEGYLHILLISKAEDYRSYRFPKLTVITEYLLLFRVAGLESLGDLFPNLTVIRGWKLFYNYALVIFEMTNLKDIGLYNLRNITRGAIRIEKNADLCYLSTVDWSLILDAVSNNYIVGNKPPKECGDLCPGTMEEKPMCEKTTINNEYNYRCWTTNRCQKMCPSTCGKRACTENNECCHPECLGSCSAPDNDTACVACRHYYYAGVCVPACPPNTYRFEGWRCVDRDFCANILSAESSDSEGFVIHDGECMQECPSGFIRNGSQSMYCIPCEGPCPKVCEEEKKTKTIDSVTSAQMLQGCTIFKGNLLINIRRGNNIASELENFMGLIEVVTGYVKIRHSHALVSLSFLKNLRLILGEEQLEGNYSFYVLDNQNLQQLWDWDHRNLTIKAGKMYFAFNPKLCVSEIYRMEEVTGTKGRQSKGDINTRNNGERASCESDVLHFTSTTTSKNRIIITWHRYRPPDYRDLISFTVYYKEAPFKNVTEYDGQDACGSNSWNMVDVDLPPNKDVEPGILLHGLKPWTQYAVYVKAVTLTMVENDHIRGAKSEILYIRTNASVPSIPLDVLSASNSSSQLIVKWNPPSLPNGNLSYYIVRWQRQPQDGYLYRHNYCSKDKIPIRKYADGTIDIEEVTENPKTEVCGGEKGPCCACPKTEAEKQAEKEEAEYRKVFENFLHNSIFVPRYPAHVKFQLAKPTAQAGSVAFLPTR

SEQ ID NO: 36516 - protein, 33 aa, Homo sapiens
VTLPPPPPRVLGLQKTMYIKICKNHRKPTYPTT

SEQ ID NO: 36517 - protein, 96 aa, Homo sapiens
LLTFGSVRAVDEVDVEGTVEEDLGKSRQGSRMDDEVVQREEEAIQLDKLNASQIRELREKLEKFAFQAEVNRMMKLIINSLYENKEIFLRELILTL

SEQ ID NO: 36518 - protein, 29 aa, Homo sapiens
VKNLLHVTDTGVGMTREELVKNLGTIAKS

SEQ ID NO: 36519 - protein, 14 aa, Homo sapiens
MNDIKPIWQRPSKK

SEQ ID NO: 36520 - protein, 29 aa, Homo sapiens
VDKTVTQKYHNVNGHNCEVRKAPSKPRDG

SEQ ID NO: 36521 - protein, 499 aa, Homo sapiens
LKMGRKKIQITRIMDERNRQVTFTKRKFGLMKKAYELSVLCDCEIALIIFNSSNKLFQYASTDMDKVLLKYTEYNEPHESRTNSDIVETLRKKGLNGCESPDADDYFEHSPLSEDRFSKLNEDSDFIFKRGPPGLPPQNFSMSVTVPVTSPNALSYTNPGSSLVSPSLAASSTLTDSSMLSPPQTTLHRNVSPGAPQRPPSTGNAGGMLSTTDLTVPNGAGSSPVGNGFVNSRASPNLIGATGANSLGKVMPTKSPPPPGGGNLGMNSRKPDLRVVIPPSSKGMMPPLNTQRISSSQATQPLATPVVSVTTPSLPPQGLVYSAMPTAYNTDYSLTSADLSALQGFNSPGMLSLGQVSAWQQHHLGQAALSSLVAGGQLSQGSNLSINTNQNISIKSEPISPPRDRMTPSGFQQQQQQQQQQQPPPPPQPQPQPPQPQPRQEMGRSPVDSLSSSSSSYDGSDREDPRGDFHSPIVLGRPPNTEDRESPSVKRMRMDAWVT

SEQ ID NO: 36522 - protein, 123 aa, Homo sapiens
MCSCGGGAGYEEDGDRRRANRAQPAGGRGQGGTGARTRLPPPSSPSCRPRVPAREREEPPPPRARAAASARRAWSPLKGAGRGGGGGRAEQSAGAGPAGGSGAAMGAAGPRRRRRCPGRASRR

SEQ ID NO: 36523 - protein, 187 aa, Homo sapiens
MERQEESLSARPALETEGLRFLHTTVGSLLATYGWYIVFSCILLYVVFQKLSARLRALRQRQLDRAAAAVEPDVVVKRQEALAAARLKMQEELNAQVEKHKEKLKQLEEEKRRQKIEMWDSMQEGKSYKGNAKKPQEEDSPGPSTSSVLKRKSDRKPLRGGGYNPLSGEGGGACSWRPGRRGPSSGG

SEQ ID NO: 36524 - protein, 148 aa, Homo sapiens
MERQEESLSARPALETEGLRFLHTTVGSLLATYGWYIVFSCILLYVVFQKLSARLRALRQRQLDRAAAAVEPDVVVKRQEALAAARLKMQEELNAQVEKHKEKLKQLEEEKRRQKIEMWDSMQEGKSYKGNAKKPQVTGDLGRLACGR

SEQ ID NO: 36525 - protein, 132 aa, Homo sapiens
LEFSSQTSDFSITSAIKFIGPGREECIHCAKNFHFHDWKCVPACGEGFYPEEMPGLPHKVCRRCDENCLSCAGSSRNCSRCKTGFTQLGTSCITNHTCSNADETFCEMVKSNRLCERKLFIQFCCRTCLLAG

SEQ ID NO: 36526 - protein, 185 aa, Homo sapiens
MAGGVLPLRGLRALCRVLLFLSQFCILSGGEQSQALAQSIKDPGPTRTFTVVPRAAESTEIPPYVMKCPSNGLCSRLPADCIDCTTNFSCTYGKPVTFDCAVKPSVTCVDQDFKSQKNFIINMTCRFCWQLPETDYECTNSTSCMTVSCPRQRYPANCTVRDHVHCLGRSEFKDICQQNVFLQVY

SEQ ID NO: 36527 - protein, 159 aa, Homo sapiens
MAGGVLPLRGLRALCRVLLFLSQFCILSGGESTEIPPYVMKCPSNGLCSRLPADCIDCTTNFSCTYGKPVTFDCAVKPSVTCVDQDFKSQKNFIINMTCRFCWQLPETDYECTNSTSCMTVSCPRQRYPANCTVRDHVHCLGRSEFKDICQQNVFLQVY

SEQ ID NO: 36528 - protein, 62 aa, Homo sapiens
MAGGVLPLRGLRALCRVLLFLSQFCILSGGEQSQALAQSIKDPGPTRTFTVVPRAAANFLYC

SEQ ID NO: 36529 - protein, 70 aa, Homo sapiens
VGGCRWSWVAVMLRLPPTGTMTPVRMQHSLAGQTYAVPLIQPDLRREEAVQQMADALQYLQKVSGDIFSR

SEQ ID NO: 36530 - protein, 73 aa, Homo sapiens
MTPVRMQHSLAGQTYAVPLIQPDLRREEAVQQMADALQYLQKVSGDIFSSQQIFTQQCSCARQCGNLYISSHG

SEQ ID NO: 36531 - protein, 63 aa, Homo sapiens
MTPVRMQHSLAGQTYAVPLIQPDLRREEAVQQMADALQYLQKVSGDIFSSESGLAAAKEHGKA

SEQ ID NO: 36532 - protein, 144 aa, Homo sapiens
MTPVRMQHSLAGQTYAVPLIQPDLRREEAVQQMADALQYLQKVSGDIFSRISQQVEQSRSQVQAIGEKVSLAQAKIEKIKGSKKAIKVFSSAKYPAPERLQEYGSIFTGAQDPGLQRRPRHRIQSKHRPLDERALQEKLTFLCA

SEQ ID NO: 36533 - protein, 112 aa, Homo sapiens
LGMFLSFPTTKTYFPHFDLSHGSAQVKGHGKKVADALTNAVAHVDDMPNALSALSDLHAHKLRVDPVNFKLLSHCLLVTLAAHLPAEFTPAVHASLDKFLASVSTVLTSKYR

SEQ ID NO: 36534 - protein, 126 aa, Homo sapiens
LAPDPNPTPHSASPRRMFLSFPTTKTYFPHFDLSHGSAQVKGHGKKVADALTNAVAHVDDMPNALSALSDLHAHKLRVDPVNFKLLSHCLLVTLAAHLPAEFTPAVHASLDKFLASVSTVLTSKYR

SEQ ID NO: 36535 - protein, 114 aa, Homo sapiens
LERMFLSFPTTKTYFPHFDLSHGSAQVKGHGKKVADALTNAVAHVDDMPNALSALSDLHAHKLRVDPVNFKVSGGPGAIWVEGRDGAFLAGQRITRVAGGVAQAAAAGLGPRPH

SEQ ID NO: 36536 - protein, 41 aa, Homo sapiens
VLFSFLCSVYLCLPTSICKGVAESLMFIEPRRNQTEGQVYR

SEQ ID NO: 36537 - protein, 594 aa, Homo sapiens
LGLRRHRFPVHSSRPDAPAGVHIEDVLRALPRPGVKLWDVPVMLDHKDLEAEIHPLKNEERKSQENLGNPSKNEDNVKSAPPQSRLSRCRAAAFFLSLFLCLFVVFVVSFVIPCPDRPASQRMWRIDYSAAVIYDFLAVDDINGDRIQDVLFLYKNTNSSNNFSRSCVDEGFSSPCTFAAAVSGANGSTLWERPVAQDVALVECAVPQPRGSEAPSACILVGRPSSFIAVNLFTGETLWNHSSSFSGNASILSPLLQVPDVDGDGAPDLLVLTQEREEVSGHLYSGSTGHQIGLRGSLGVDGESGFLLHVTRTGAHYILFPCASSLCGCSVKGLYEKVTGSGGPFKSDPHWESMLNATTRRMLSHSSGAVRYLMHVPGNAGADVLLVGSEAFVLLDGQELTPRWTPKAAHVLRKPIFGRYKPDTLAVAVENGTGTDRQILFLDLGTGAVLCSLALPSLPGGPLSASLPTADHRSAFFFWGLHELGSTSETETGEARHSLYMFHPTLPRVLLELANVSTHIVAFDAVLFEPSRHAAYILLTGPADSEAPGLVSVIKHKVRDLVPSSRVVRLGEGGPDSDQAIRDRFSRLRYQSEA

SEQ ID NO: 36538 - protein, 90 aa, Homo sapiens
LAGATGRRCLPLSMDVRAPPAVMAAVDQALKEFGRIDILINCAAGNFLCPAGALSFNAFKTVMDIDTSGTFNVSRVLYEKFFRVGASCAL

SEQ ID NO: 36539 - protein, 101 aa, Homo sapiens
VRGWVSGEGAEVGPGRCAVLTQNGQGSCQSQTSSGPSASSFCPVAPPLVAAPTQALPRPDPLRVWLQKGSVGNAQPVSREGLLRGLGWGTQGPFGWFRRLA

SEQ ID NO: 36540 - protein, 66 aa, Homo sapiens
VRVSSLRAWLLLGAAPHCRPVPTHQGLFRAAGHLLKPRALLITYGVSGPVHGGPPAPSPSCCLLPC

SEQ ID NO: 36541 - protein, 390 aa, Homo sapiens
LVVVEDLHSGAQQHWSGHSAEISTLALSHSAQVLASASGRSSTTAHCQIRVWDVSGGLCQHLIFPHSTTVLALAFSPDDRLLVTLGDHDGRTLALWGTATYDLVSSTRLPEPVHGVAFNPWDAGELTCVGQGTVTFWLLQQRGADISLQVRREPVPEAVGAGELTSLCYGAPPLLYCGTSSGQVCVWDTRAGRCFLSWEADDGGIGLLLFSGSRLVSGSSTGRLRLWAVGAVSELRCKGSGARSSSVFMEHELVLDGAVVSASFDDSVDMGVVGTTAGTLWFVSWAEGTSTRLISGHRSKVRDFQPGQRRGSRTWCPPCLPAPSPPAQMIPSPAVTGSQRPPWGSQRGSLGCARPLKAVPVVSAQASRLAGLAGERGGLQPRGVPLRHMQ

SEQ ID NO: 36542 - protein, 139 aa, Homo sapiens
LVPSLPAGSISTSPDDSKSCRHWLAAAALGFPAGKSWVCTSPQSRPGCVCTSEPPGRPCRSSQTVLSLLLLCVFLFVCFLFFVIVKEITSVRAWWFMPVIPALWEAKAGGSPEVRSSRPAWSTWRNPISTENTKISRAS

SEQ ID NO: 36543 - protein, 87 aa, Homo sapiens
MRRDVRILLLGEAQVGKTSLILSLVGEEFPEEVPPRAEEITIPADVTPEKVPTHIVDYSGSGRSLPGARPAAVRRACWVRSGVSLSP

SEQ ID NO: 36544 - protein, 322 aa, Homo sapiens
MRRDVRILLLGEAQVGKTSLILSLVGEEFPEEVPPRAEEITIPADVTPEKVPTHIVDYSEAEQTDEELREEIHKIRTKWIPLVNGGTTQGPRVPIILVGNKSDLRSGSSMEAVLPIMSQFPEIETCVECSAKNLRNISELFYYAQKAVLHPTAPLYDPEAKQLRPACAQALTRIFRLSDQDLDQALSDEELNAFQKSCFGHPLAPQALEDVKTVVCRNVAGGVREDRLTLDGEAGCPPVPGECGEGAVPGAPPALSRCRFPLPEHALHPARPARDHLDHPAALRLQRCPGADCGLSLPSDPRAPRLQHGAQPPWLPVCAESV

SEQ ID NO: 36545 - protein, 340 aa, Homo sapiens
MRRDVRILLLGEAQVGKTSLILSLVGEEFPEEVPPRAEEITIPADVTPEKVPTHIVDYSEAEQTDEELREEIHKANVVCVVYDVSEEATIEKIRTKWIPLVNGGTTQGPRVPIILVGNKSDLRSGSSMEAVLPIMSQFPEIETCVECSAKNLRNISELFYYAQKAVLHPTAPLYDPEAKQLRPACAQALTRIFRLSDQDLDQALSDEELNAFQKSCFGHPLAPQALEDVKTVVCRNVAGGVREDRLTLDGEAGCPPVPGECGEGAVPGAPPALSRCRFPLPEHALHPARPARDHLDHPAALRLQRCPGADCGLSLPSDPRAPRLQHGAQPPWLPVCAESV

SEQ ID NO: 36546 - protein, 57 aa, Homo sapiens
LQVPPRAEEITIPADVTPEKVPTHIVDYSGSGRSLPGARPAAVRRACWVRSGVSLSP

SEQ ID NO: 36547 - protein, 442 aa, Homo sapiens
LFPQANVVCVVYDVSEEATIEKVSPQCRPQQQRHSGRWWPRWTFTQPVASAIAHSILGSLTWSCLTWSHPALSCDPTSPERVWGVPQSEPLRPAVLFLPQFPNPRGGTRRGPALGAALGLGPSDLGVFGSHWGQTDEAAPAACLLPPALFLWPGLGPSVGLDLPLLLSPSQAHAPAGSHVPAGSLTSQPGFAFQIRTKWIPLVNGGTTQGPRVPIILVGNKSDLRSGSSMEAVLPIMSQFPEIETCVECSAKNLRNISELFYYAQKAVLHPTAPLYDPEAKQLRPACAQALTRIFRLSDQDLDQALSDEELNAFQKSCFGHPLAPQALEDVKTVVCRNVAGGVREDRLTLDGEAGCPPVPGECGEGAVPGAPPALSRCRFPLPEHALHPARPARDHLDHPAALRLQRCPGADCGLSLPSDPRAPRLQHGAQPPWLPVCAESV

SEQ ID NO: 36548 - protein, 233 aa, Homo sapiens
MGGPRRGPVGNKSDLRSGSSMEAVLPIMSQFPEIETCVECSAKNLRNISELFYYAQKAVLHPTAPLYDPEAKQLRPACAQALTRIFRLSDQDLDQALSDEELNAFQKSCFGHPLAPQALEDVKTVVCRNVAGGVREDRLTLDGEAGCPPVPGECGEGAVPGAPPALSRCRFPLPEHALHPARPARDHLDHPAALRLQRCPGADCGLSLPSDPRAPRLQHGAQPPWLPVCAESV

SEQ ID NO: 36549 - protein, 143 aa, Homo sapiens
LRPACAQALTRIFRLSDQDLDQALSDEELNAFQKSCFGHPLAPQALEDVKTVVCRNVAGGVREDRLTLDGEAGCPPVPGECGEGAVPGAPPALSRCRFPLPEHALHPARPARDHLDHPAALRLQRCPGADCGLSLPSVSDAGA

SEQ ID NO: 36550 - protein, 18 aa, Homo sapiens
MRCPYKLLRMVLALVCSE

SEQ ID NO: 36551 - protein, 241 aa, Homo sapiens
LPEGGRLMAPASRLLALWALAAVALPGSGAEGDGGWYAFVRPVILQGLTDNSRFRALCSRDRLLASFGDRVVRLSTANTYSYHKVDLPFQEYVEQLLHPQDPTSLGNDTLYFFGDNNFTEWASLFRHYSPPPFGLLGTAPAYSFGIAGAGSGVPFHWHGPGYSEVIYGRKRWFLYPPEKTPEFHPNKTTLAWLRDTYPALPPSARPLECTIRAGEVLYFPDRWWHATLNLDTSVFISTFLG

SEQ ID NO: 36552 - protein, 226 aa, Homo sapiens
LPEGGRLMAPASRLLALWALAAVALPGSGAEGDGGWRPGGPGAVAEEERCTVERRADLTYAEFVQQYAFVRPVILQGLTDNSRFRALCSRDRLLASFGDRVVRLSTANTYSYHKVDLPFQEYVEQLLHPQDPTSLGNDTLYFFGDNNFTEWASLFRHYSPPPFGLLGTAPAYSFGIAGAGSGVPFHWHGPGYSEVIYGRKVLYFPDRWWHATLNLDTSVFISTFLG

SEQ ID NO: 36553 - protein, 228 aa, Homo sapiens
LPEGGRLMAPASRLLALWALAAVALPGSGAEGDGGWRPGGPGAVAEEERCTVERRADLTYAEFVQQYAFVRPVILQGLTDNSRFRALCSRDRLLASFGDRVVRLSTANTYSYHKVDLPFQEYVEQLLHPQDPTSLGNGEAALGGGRGWGRLESPGARIPVPAVSVGRHPVLLRGQQLHRVGLSLSALLPTPIWPAGNRSSLQLWNRRSWLGGALPLAWTRVLRSDLRS

SEQ ID NO: 36554 - protein, 126 aa, Homo sapiens
MAPASRLLALWALAAVALPGSGAEGDGGWYAFVRPVILQGLTDNSVSACPSVPGHSRPCWARPLSPLPAPAEVPGPVLPRQVAGFVWGQSGPAEHRQHLLLPQSGLALPGVCGAAAAPPGPHLPGQ

SEQ ID NO: 36555 - protein, 63 aa, Homo sapiens
MAPASRLLALWALAAVALPGSGAEGDGGWRPGGPGAVAEEERCTVERRADLTYAEFVQQYVRP

SEQ ID NO: 36556 - protein, 263 aa, Homo sapiens
LSSARPPPRSREPGHDLGGGAGRRRAPSSRLALGGAPAPPAQRGRRGEPRESPSPTFGPSALPAPPRAGGRRVGPPHARTHTRGLCACPSCPHCTPPSATPQPQPPPSLARPPAWGAGLGPWGGFELSRLCPYRLPRHTRSVFPLSPPSRAGPSGIEGAGSPRTRAQKSPTGFLHLPPHHTWSPPRGVRGNRPPPKPWPAAESPGPTRTSSPIQPDPRGLSSSLPLCGAVPCPPQNPALVPGQAERIGQGEGGRAGDRLESLT

SEQ ID NO: 36557 - protein, 334 aa, Homo sapiens
LGASPGPGGRRPRLLPPPPGPAPRRGSGGESPDSPDAARRAMGFPAAALLCALCCGLLAPAARAGYSEERCSWRGSGLTQEPGSVGQLALACAEGAVEWLYPAGALRLTLGGPDPRARPGIACLRPVRPFAGAQVFAERAGGALELLLAEGPGPAGGRCVRWGPRERRALFLQATPHQDISRRVAAFRFELREDGRPELPPQAHGLGVDGACRPCSDAELLLAACTSDFVIHGIIHGVTHDVELQESVITVVAARVLRQTPPLFQAGRSGDQGLTSIRTPLRCGVHPGPGTFLFMGWSRFGEARLGCAPRFQEFRRAYEAARAAHLHPCEVALH

SEQ ID NO: 36558 - protein, 220 aa, Homo sapiens
LPATSGVARRLPAGGRGHTASPRPGCEGRGPEPGRTLGGRAARPAAMEQDDPVEALTELRERRLGALELLQAAAGSGLAAYAVWALLLQPGFRRVPLRLQVPYVGASARQVEHVLSLLRGRPGKTVDLGSGDGRIVLAAHRCGLRPAVGYELNPWLVALARLHAWRAGCAGSVCYRRKDLWKVSLRDCRNVSVFLAPSVVGAGLPAPLGSPSHTPGCLLL

SEQ ID NO: 36559 - protein, 281 aa, Homo sapiens
LPATSGVARRLPAGGRGHTASPRPGCEGRGPEPGRTLGGRAARPAAMEQDDPVEALTELRERRLGALELLQAAAGSGLAAYAVWALLLQPGFRRVPLRLQVPYVGASARQVEHVLSLLRGRPGKTVDLGSGDGRIVLAAHRCGLRPAVGYELNPWLVALARLHAWRAGCAGSVCYRRKDLWKVSLRDCRNVSVFLAPSVLPLLEDKLRTELPAGARVVSGRFPLPTWQPVTAVGEGLDRVWAYDVPEGGQAGEAASSRIPIQAAPGPSSAPIPGGLISQAS

SEQ ID NO: 36560 - protein, 35 aa, Homo sapiens
VWALARDLKGAVLFLMGAASATHSSFCLAGHSRLL

SEQ ID NO: 36561 - protein, 291 aa, Homo sapiens
VRDGGGGAGGSERELGLADGMEDYEQELCGVEDDFHNQFAAELEVLAELEGASTPSPSGVPLFTAGRPPRTFEEALARGDAASSPAPAASVGSSQGGARKRQVDADLQPAGSLPHAPRIKRPRLQVVKRLNFRSEEMEEPPPPDSSPTDITPPPSPEDLAELWGHGVSEAAADVGLTRASPAARNPVLRRPPILEDYVHVTSTEGVRAYLVLRADPMAPGVQGSLLHVPWRGGGQLDLLGVSLASLKKQVDGEPVVCTAAGAAASGGPEAFRHPAQSQVGGGGGSPALGGP

SEQ ID NO: 36562 - protein, 106 aa, Homo sapiens
LQMAIWKAQVFLLLERPQEASNRGGRRSGSRCLTWRERERERQSRETCRGNGWRAKSRHRGHESRTPRSCRPRPELHAAEDPQARQTPTQTPRGRGPPTSTQTACG

SEQ ID NO: 36563 - protein, 107 aa, Homo sapiens
LGNMAIWKAQVFLLLERPQEASNRGGRRSGSRCLTWRERERERQSRETCRGNGWRAKSRHRGHESRTPRSCRPRPELHAAEDPQARQTPTQTPRGRGPPTSTQTACG

SEQ ID NO: 36564 - protein, 15 aa, Homo sapiens
MLAFGLLYGVSSLGG

SEQ ID NO: 36565 - protein, 171 aa, Homo sapiens
VRASQSSFVRTLNMSGIALSRLAQERKAWRKDHPFGFVAVPTKNPDGTMNLMNWECAIPGKKGTPWEGGLFKLRMLFKDDYPSSPPKCKFEPPLFHPNVYPSGTVCLSILEEDKDWRPAITIKQILLGIQELLNEPNIQDPAQAEAYTIYCQNRVEYEKRVRAQAKKFAPS

SEQ ID NO: 36566 - protein, 164 aa, Homo sapiens
VPGTLNMSGIALSRLAQERKAWRKDHPFGFVAVPTKNPDGTMNLMNWECAIPGKKGTPWEGGLFKLRMLFKDDYPSSPPKCKFEPPLFHPNVYPSGTVCLSILEEDKDWRPAITIKQILLGIQELLNEPNIQDPAQAEAYTIYCQNRVEYEKRVRAQAKKFAPS

SEQ ID NO: 36567 - protein, 37 aa, Homo sapiens
MAAGLARLLLLLGLSAGGPAPAGAAKMKVVEEPNAFG

SEQ ID NO: 36568 - protein, 240 aa, Homo sapiens
MPSVSKAAAAALSGSPPQTEKPTHYRYLKEFRTEQCPLFSQHKCAQHRPFTCFHWHFLNQRRRRPLRRRDGTFNYSPDVYCSKYNEATGVCPDGDECPYLHRTTGDTERKYHLRYYKTGTCIHETDARGHCVKNGLHCAFAHGPLDLRPPVCDVRELQAQEALQNGQLGGGEGVPDLQPGVLASQAMIEKILSEDPRWQVYVQGDQMGKPRLVESNTKPSPTGGGCRVGFGPRRLPPHLL

SEQ ID NO: 36569 - protein, 249 aa, Homo sapiens
LRVAAVDMFQVPDSEGGRAGSRAMKPPGGESSNLFGSPEEATPSSRPNRMASNIFGPTEEPQNIPKRTNPPGGKGSGIFDESTPVQTRQHLNPPGGKTSDIFGSPVTATSRLAHPNKPKVWTAFRRDSAAAGMPGALSKKAPRQMRHVFRENHGGCRRLSWMQALVIEFGSSPESPRKQSSLVLTEAVGEALLCWWRTPTADGLWRLLTAVLRGAEKRWGAERAADELGPCPSSTLPVSPCRGKVTVLF

SEQ ID NO: 36570 - protein, 77 aa, Homo sapiens
LRVAAVDMFQVPDSEGGRAGSRAMKPPGGESSNLFGSPEEATPSSRPNRMASNIFGPTEEPQNIPKRTNPPGSCFLM

SEQ ID NO: 36571 - protein, 197 aa, Homo sapiens
LRVAAVDMFQVPDSEGGRAGSRAMKPPGGESSNLFGSPEEATPSSRPNRMASNIFGPTEEPQNIPKRTNPPGGKGSGIFDESTPVQTRQHLNPPGGKTSDIFGSPVTATSRLAHPNKPKDHVFLCEGEEPKSDLKAARSIPAGAEPGEKGSARKAGPAKEQEPMPTVDSHEPRLGPRPRSHNKVLNPPGGKSSISFY

SEQ ID NO: 36572 - protein, 225 aa, Homo sapiens
LRVAAVDMFQVPDSEGGRAGSRKWQLLTGSLASTSPSLLSGQGPWAPLQRAMKPPGGESSNLFGSPEEATPSSRPNRMASNIFGPTEEPQNIPKRTNPPGGKGSGIFDESTPVQTRQHLNPPGGKTSDIFGSPVTATSRLAHPNKPKDHVFLCEGEEPKSDLKAARSIPAGAEPGEKGSARKAGPAKEQEPMPTVDSHEPRLGPRPRSHNKVLNPPGGKSSISFY

SEQ ID NO: 36573 - protein, 99 aa, Homo sapiens
VSIVPVGAAAGSCSVSPPAAALLWERAPSWHLERSPVLPVLRAGERVAGLRAPRAFWAQPCHLGPPPLTVSGSRFPGLELGPAHRHLKTRQPQPGGALA

SEQ ID NO: 36574 - protein, 63 aa, Homo sapiens [sequence omitted]

SEQ ID NO: 36575 - protein, 32 aa, Homo sapiens
MICLVLTIFANLFPAGEPRGAGRGRVAGAGPA

SEQ ID NO: 36576 - protein, 115 aa, Homo sapiens
LALQNLDHGKAWGILTFKGKTESEAREIEHVMYHDWRLVPKHEEEAFTAFTPAPEDSLASVPYPPLLRAMIIAERQKNGDTSTEEPMLNVQRIRMEPWDYPAKQEDKGRAKGTPV

SEQ ID NO: 36577 - protein, 281 aa, Homo sapiens
LQPRAPGGGGMEAAAEPGNLAGVRHIILVLSGKGGVGKSTISTELALALRHAGKKVGILDVDLCGPSIPRMLGAQGRAVHQCDRGWAPVFLDREQSISLMSVGFLLEKPDEAVVWRGPKKNALIKQFVSDVAWGELDYLVVDTPPGTSDEHMATIEALRPYQPLGALVVTTPQAVSVGDVRRELTFCRKTGLRVMGIVENMSGFTCPHCTECTSVFSRGGGEELAQLAGVPFLGSVPLDPALMRTLEEGHDFIQEFPGSPAFAALTSIAQKILDATPACLP

SEQ ID NO: 36578 - protein, 54 aa, Homo sapiens
VALAPPVGVARHSLQPGAGLRREKTVQQHAGETDPVTTMRAVRREKDQFKMPRD

SEQ ID NO: 36579 - protein, 330 aa, Homo sapiens
LRRADAGVLQSWAARQSSPARVMVVGRGLLGRRSLAALGAACARRGLGPALLGVFCHTDLRKNLTVDEGTMKVEVLPALTDNYMYLVIDDETKEAAIVDPVQPQKVVDAARKHGVKLTTVLTTHHHWDHAGGNEKLVKLESGLKVYGGDDRIGALTHKITHLSTLQVGSLNVKCLATPCHTSGHICYFVSKPGGSEPPAVFTGDTLFVAGCGKFYEGTADEMCKALLEVLGRLPPDTRVYCGHEYTINNLKFARHVEPGNAAIREKLAWAKEKYSIGEPTVPSTLAEEFTYNPFMRVREKTVQQHAGETDPVTTMRAVRREKDQFKMPRD

SEQ ID NO: 36580 - protein, 350 aa, Homo sapiens
LSPAATARSTSRSAGYPGGVALGLQGSTVRCQKRGGGSRHSSPGAALGPPPPLPGPSPGPWQSGLADKTSPALLGVFCHTDLRKNLTVDEGTMKVEVLPALTDNYMYLVIDDETKEAAIVDPVQPQKVVDAARKHGVKLTTVLTTHHHWDHAGGNEKLVKLESGLKVYGGDDRIGALTHKITHLSTLQVGSLNVKCLATPCHTSGHICYFVSKPGGSEPPAVFTGDTLFVAGCGKFYEGTADEMCKALLEVLGRLPPDTRVYCGHEYTINNLKFARHVEPGNAAIREKLAWAKEKYSIGEPTVPSTLAEEFTYNPFMRVSGPGSSGGRGSAQPAARCWPPQGEDGAAARR

SEQ ID NO: 36581 - protein, 43 aa, Homo sapiens
LWPERPVEKPRSAGDPGVGRARSARPRRQLCRPGEQPAGRASD

SEQ ID NO: 36582 - protein, 85 aa, Homo sapiens
LLLFSTSKVDQEIINIMQDRLKACQQREGQNYQQNCIKEVEQFTQVAKAYQDRCACPTHPQPPTILLRPGGQNHCKSSLPSLVLT

SEQ ID NO: 36583 - protein, 204 aa, Homo sapiens [sequence omitted]

SEQ ID NO: 36584 - protein, 114 aa, Homo sapiens [sequence omitted]

SEQ ID NO: 36585 - protein, 179 aa, Homo sapiens
MSLQMEVSTCCPDWSRTPELKQSPCLGLPKYLDYSSAWKSPNPCAPAPRSWAWGTARKLQRTQLGRLHKDPTGLRCCQDSIPGGFLGPPEPSQARGGRRVLAHFRNLQPGSHSHGRPPIPSFSARGSPGADQEAPNVCLLCALVRRQRHLRAQELGRIQAAQEDPQGDLPGGGGPAAEI

SEQ ID NO: 36586 - protein, 89 aa, Homo sapiens
MSLWVVTVSFLSWWCVPSGATLHFLSQAARTAQPCQCCDHGPVFGFHLLVLHKLLLSLWPRPLPRCGWFWPGRHKVAVGQDTSPVLALQ

SEQ ID NO: 36587 - protein, 1998 aa, Homo sapiens
LRTAIFGKKAQGGNAGPHVGTVRGCRVCSPCPRSWEPQEAARDSSLQPLSRLLPRSSHGAALPAAASLLRRGPGSSLHPRGPAPGPRLRLRVSILALKAVMPDSCGLHIPAAHAAPSRDARIAGLSARGRHRTTTPSKLPRRPSAQCRYRKCGSRFRRRPGARGVRLSPRRGGPERGGAAREGFSGASWSTMAKPTSKDSGLKEKFKILLGLGTPRPNPRSAEGKQTEFIITAEILRELSMECGLNNRIRMIGQICEVAKTKKFEEHAVEALWKAVADLLQPERPLEARHAVLALLKAIVQGQGERLGVLRALFFKVIKDYPSNEDLHERLEVFKALTDNGRHITYLEEELADFVLQWMDVGLSSEFLLVLVNLVKFNSCYLDEYIARMVQMICLLCVRTASSVDIEVSLQVLDAVVCYNCLPAESLPLFIVTLCRTINVKELCEPCWKLMRNLLGTHLGHSAIYNMCHLMEDRAYMEDAPLLRGAVFFVGMALWGAHRLYSLRNSPTSVLPSFYQAMACPNEVVSYEIVLSITRLIKKYRKELQVVAWDILLNIIERLLQQLQTLDSPELRTIVHDLLTTVEELCDQNEFHGSQERYFELVERCADQRPESSLLNLISYRAQSIHPAKDGWIQNLQALMERFFRSESRGAVRIKVLDVLSFVLLINRQFYEEELINSVVISQLSHIPEDKDHQVRKLATQLLVDLAEGCHTHHFNSLLDIIEKVMARSLSPPPELEERDVAAYSASLEDVKTAVLGLLVILQTKLYTLPASHATRVYEMLVSHIQLHYKHSYTLPIASSIRLQAFDFLLLLRADSLHRLGLPNKDGVVRFSPYCVCDYMEPERGSEKKTSGPLSPPTGPPGPAPAGPAVRLGSVPYSLLFRVLLQCLKQESDWKVLKLVLGRLPESLRYKVLIFTSPCSVDQLCSALCSMLSGPKTLERLRGAPEGFSRTDLHLAVVPVLTALISYHNYLDKTKQREMVYCLEQGLIHRCASQCVVALSICSVEMPDIIIKALPVLVVKLTHISATASMAVPLLEFLSTLARLPHLYRNFAAEQYASVFAISLPYTNPSKFNQYIVCLAHHVIAMWFIRCRLPFRKDFVPFITKGLRSNVLLSFDDTPEKDSFRARSTSLNERPKSLRIARPPKQGLNNSPPVKEFKESSAAEAFRCRSISVSEHVVRSRIQTSLTSASLGSADENSVAQADDSLKNLHLELTETCLDMMARYVFSNFTAVPKRSPVGEFLLAGGRTKTWLVGNKLVTVTTSVGTGTRSLLGLDSGELQSGPESSSSPGVHVRQTKEAPAKLESQAGQQVSRGARDRVRSMSGGHGLRVGALDVPASQFLGSATSPGPRTAPAAKPEKASAGTRVPVQEKTNLAAYVPLLTQGWAEILVRRPTGNTSWLMSLENPLSPFSSDINNMPLQELSNALMAAERFKEHRDTALYKSLSVPAASTAKPPPLPRSNTVASFSSLYQSSCQGQLHRSVSWADSAVVMEEGSPGEVPVLVEPPGLEDVEAALGMDRRTDAYSRSSSVSSQEEKSLHAEELVGRGIPIERVVSSEGGRPSVDLSFQPSQPLSKSSSSPELQTLQDILGDPGDKADVGRLSPEVKARSQSGTLDGESAAWSASGEDSRGQPEGPLPSSSPRSPSGLRPRGYTISDSAPSRRGKRVERDALKSRATASNAEKVPGINPSFVFLQLYHSPFFGDESNKPILLPNESQSFERSVQLLDQIPSYDTHKIAVLYVGEGQSNSELAILSNEHGSYRYTEFLTGLGRLIELKDCQPDKVYLGGLDVCGEDGQFTYCWHDDIMQAVFHIATLMPTKDVDKHRCDKKRHLGNDFVSIVYNDSGEDFKLGTIKGQFNFVHVIVTPLDYECNLVSLQCRKDMEGLVDTSVAKIVSDRNLPFVARQMALHANMASQVHHSRSNPTDIYPSKWIARLRHIKRLRQRICEEAAYSNPSLPLVHPPSHSKAPAQTPAEPTPGYEVGQRKRLISSVEDFTEFV

SEQ ID NO: 36588 - protein, 744 aa, Homo sapiens
LPLGHGDLPWQRALLPPGGGEGGLAAGAGAVSGLGRGRPGNGGQSRRAALPGLPGHQGVEVGPAPQGEAFSLESCQNWLPGEPHPATAEHCVRLGPTGWCNTDLCSAPHSYVCELQPGGPVQDAENLLVGAPSGDLQGPLTPLAQQDGLSAPHEPVEVMVFPGLRLSREAFLTTAEFGTQELRRPAQLRLQVYRLLSTAGTPENGSEPESRSPDNRTQLAPACMPGGRWCPGANICLPLDASCHPQACANGCTSGPGLPGAPYALWREFLFSVPAGPPAQYSVTLHGQDVLMLPGDLVGLQHDAGPGALLHCSPAPGHPGPRAPYLSANASSWLPHLPAQLEGTWACPACALRLLAATEQLTVLLGLRPNPGLRLPGRYEVRAEVGNGVSRHNLSCSFDVVSPVAGLRVIYPAPRDGRLYVPTNGSALVLQVDSGANATATARWPGGSVSARFENVCPALVATFVPGCPWETNDTLFSVVALPWLSEGEHVVDVVVENSASRANLSLRVTAEEPICGLRATPSPEARVLQGVLVRYSPVVEAGSDMVFRWTINDKQSLTFQNVVFNVIYQSAAVFKLSLTASNHVSNVTVNYNVTVERMNRMQGLQVSTVPAVLSPNATLALTAGVLVDSAVEVAFLWTFGDGEQALHQFQPPYNESFPVPDPSVAQVLVEHNVMHTYAAPGADPEWPGAHCVLGVCVLQGTGRVRSEPQLLRVLGGPLPQLQQRLQARAVGCTYVQQQDAGAG

SEQ ID NO: 36589 - protein, 66 aa, Homo sapiens
LSSPGPQGRAGEGAGANHGPAFTKTLCLGQVDSAHERVVKREDGEKLAKVSQGRGVVRGCPWRLRA

SEQ ID NO: 36590 - protein, 329 aa, Homo sapiens
LVVAASAVGLRLLVGQPWPRSRCLPRKRAAARGEAGGRRAAVSAGARLPGAALGRTERAAGGGDGARRFGSQRVLVEPDAGAGVAVMKFKNPPVNSLSLEFLTELVISLEKLENDKSFRGVILTSDRPGVFSAGLDLTEMCGRSPAHYAGYWKAVQELWLRLYQSNLVLVSAINGACPAGGCLVALTCDYRILADNPRYCIGLNETQLGIIAPFWLKDTLENTIGHRAAERALQLGLLFPPAEALQVGIVDQVVPEEQVQSTALSAIAQWMAIPDHARQLTKAMMRKATASRLVTQRDADVQNFVSFISKDSIQKSLQMYLERLKEEKG

SEQ ID NO: 36591 - protein, 118 aa, Homo sapiens
LQKCCWFGCCVPVKIPSGFLARKLIRFRFLRVSSVAEPPGKSEALGGGLTLLTWEHTFPFPDDLGWWPGRALAVAGQCPFGKGAAPGFSAAANPVRPGLSRPLLTSRVTPPQRSSHPW

SEQ ID NO: 36592 - protein, 328 aa, Homo sapiens
LAPIGPGVYVIAARRAAATSRSLTLTSERRRPRRLRKAGGGGGGGKMAPSPTKRKDRSDEKSKDRSKDKGATKESSEKDRGRDKTRKRRSASSGSSSTRSRSSSTSSSGSSTSTGSSSGSSSSSASSRSGSSSTSRSSSSSSSSGSPSPSRRRHDNRRRSRSKSKPPKRDEKERKRRSPSPKPTKVHIGRLTRNVTKDHIMEIFSTYGKIKMIDMPVERMHPHLSKGYAYVEFENPDEAEKALKHMDGGQIDGQEITATAVLAPWPRPPPRRFSPPRRMLPPPPMWRRSPPRMRRRSRSPRRRSPVRRRSRSPGRRRHRSRSSSNSSR

SEQ ID NO: 36593 - protein, 216 aa, Homo sapiens
LRKAGGGGGGGKMAPSPTKRKDRSDEKSKDRSKDKGATKESSEKDRGRDKTRKRRSASSGSSSTRSRSSSTSSSGSSTSTGSSSGSSSSSASSRSGSSSTSRSSSSSSSSGSPSPSRRRHDNRRRSRSKSKPPKRDEKERKRRSPSPKPTKVHIGRLTRNVTKDHIMEIFSTYGKIKMIDMPVERMHPHLSKGYAYVEFENPDEAEKALKHMDGGG

SEQ ID NO: 36594 - protein, 59 aa, Homo sapiens
LRKAGGGGGGGKMTRTFPEDGGGNRGPEPVPELGLLFGVNCNRLGIVSQNQVRSESSDK

SEQ ID NO: 36595 - protein, 72 aa, Homo sapiens
LAPIGPGVYVIAARRAAATSRSLTLTSERRRPRRLRKAGGGGGGGKMLLFGVNCNRLGIVSQNQVRSESSDK

SEQ ID NO: 36596 - protein, 82 aa, Homo sapiens
LLPPLGRAGAARGPCSSALRAWWAEPRRGLLFPKGSVLGPGHWLTRSGSGHAWLALGAAADGRHALRRPESWAAGARRPLPR

SEQ ID NO: 36597 - protein, 46 aa, Homo sapiens
LFLGIAGLVGRAAERASFPQGQRLGARPLADPQRLRPCLAGPGGCC

SEQ ID NO: 36598 - protein, 56 aa, Homo sapiens
VEASIAQGLGSVWVLLPLSLSRQPEPLGWEYNGSGNVQLRVGLWCPLLVPHSIAPS

SEQ ID NO: 36599 - protein, 203 aa, Homo sapiens
VLVFRAQRLTGRIAFAAARPQTFVPGPSSPPPPPPPRPAELAPSPPADMSESKSGPEYASFFAVMGASAAMVFSALGAAYGTAKSGTGIAAMSVMRPEQIMKSIIPVVMAGIIAIYGLVVAVLIANSLNDDISLYKSFLQLGAGLSVGLSGLAAGFAIGIVGDAGVRGTAQQPRLFVGMILILIFAEVLGLYGLIVALILSTK

SEQ ID NO: 36600 - protein, 92 aa, Homo sapiens
LRQGVLVWLGAVGKAMWAWGLSPSCVPQAGCSMESALEAASLHPAQLLGLEKSKGTLDFGADADFVVLDDSLHVQATYISGELVWQADAARQ

SEQ ID NO: 36601 - protein, 103 aa, Homo sapiens
LEHSAGLLGETLPCVLPLDRTTTSWASLTSSILTSKATELGAQSQSWQPPAKMMPLPELTAKPFCGSPFSSPSPLLFPFERPVCFLSLPCACSCLLRFSLPHP

SEQ ID NO: 36602 - protein, 95 aa, Homo sapiens
MKENPRSLLDSLSSRMRLLFIYLFYFDGVSLPSRRLECSDAILTREPPPPGFKRFSFLNHPSSWDYRRVPPCPANFCVFSRDRGRYGPSFEKNAE

SEQ ID NO: 36603 - protein, 135 aa, Homo sapiens
LGRAGGPGFVLTPARRPQDVFLMIRRHKTTIFTDAKESSTVFELKRIVEGILKRPPDEQRLYKDDQLLDDGKTLGECGFTSQTARPQAPATVGLAFRADDTFEALCIEPFSSPPELPDVMKPQDSGSSANEQAVQ

SEQ ID NO: 36604 - protein, 70 aa, Homo sapiens
LRTEVLGGLGLRLLFLLQGDSGGPLTCLQSGSWVLVGVVSWGKGCALPNRPGVYTSVATYSPWIQARVSF

SEQ ID NO: 36605 - protein, 92 aa, Homo sapiens
LLLALLLARAGLRKPESQEAAPLSGPCGRRVITSRIVGGEDAELGRWPWQGSLRLWDSHVCGVSLLSHRWALTAAHCFETPTTPVTSYRISI

SEQ ID NO: 36606 - protein, 73 aa, Homo sapiens
LAGGTSKRMREVQVAIINNSMCNHLFLKYSFRKDIFGDMVCAGNAQGGKDACFVSVLATTPSPGKHPVSLCLI

SEQ ID NO: 36607 - protein, 58 aa, Homo sapiens
MHRPEAMLLLLTLALLGGPTWAGKMYGPGGGKYFSTTEDYDHEITGLRVSVGLLLVKR

SEQ ID NO: 36608 - protein, 93 aa, Homo sapiens
MGLRAGPILLLLLWLLPECGHSKEAGRIVGGQDTQEGRWPWQVGLWLTSVGHVCGGSLIHPRWVLTAAHCFLRVTPGGRWSAPSMIRGSRPAL

SEQ ID NO: 36609 - protein, 102 aa, Homo sapiens
MGLRAGPILLLLLWLLPGAHWDVLPSECGHSKEAGRIVGGQDTQEGRWPWQVGLWLTSVGHVCGGSLIHPRWVLTAAHCFLRVTPGGRWSAPSMIRGSRPAL

SEQ ID NO: 36610 - protein, 254 aa, Homo sapiens
LPSGAFTPMLFPQVPPPRPGLADPPLPFPSSNLNKPYLFSVLLGAWQLGNPGSRSQKVGVAWVEPHPVYSWKEGACADIALVRLERSIQFSERVLPICLPDASIHLPPNTHCWISGWGSIQDGVPLPHPQTLQKLKVPIIDSEVCSHLYWRGAGQGPITEDMLCAGYLEGERDACLGDSGGPLMCQVDGAWLLAGIISWGEGCAERNRPGVYISLSAHRSWVEKIVQGVQLRGRAQGGGALRAPSQGSGAAARS

SEQ ID NO: 36611 - protein, 407 aa, Homo sapiens
VTYPWLRAMGTQALQGFLFLLFLPLLQPRGASAGSLHSPGLSECFQVNGADYRGHQNRTGPRGAGRPCLFWDQTQQHSYSSASDPHGRWGLGAHNFCRNPDGDVQPWCYVAETEEGIYWRYCDIPSCHMPGYLGCFVDSGAPPALSGPSGTSTKLTVQVCLRFCRMKGYQLAGVEAGYACFCGSESDLARGRLAPATDCDQICFGHPGQLCGGDGRLGVYEVSVGSCQGNWTAPQGVIYSPDFPDEYGPDRNCSWALGPPGAALELTFRLFELADPRDRLELRDAASGSLLRAFDGARPPPSGPLRLGTAALLLTFRSDARGHAQGFALTYRGLQDAAEDPEAPEGSAQTPAAPLDGANVSCSPRPGAPPAAIGGEAGARDGSESGSRPLAPILTAAVCPQPGSSRR

SEQ ID NO: 36612 - protein, 389 aa, Homo sapiens
VTYPWLRAMGTQALQGFLFLLFLPLLQPRGASAGSLHSPGLSECFQVNGADYRGHQNRTGPRGAGRPCLFWDQTQQHSYSSASDPHGRWGLGAHNFCRNPDGDVQPWCYVAETEEGIYWRYCDIPSCHMPGYLGCFVDSGAPPALSGPSGTSTKLTVQVCLRFCRMKGYQLCGGDGRLGVYEVSVGSCQGNWTAPQGVIYSPDFPDEYGPDRNCSWALGPPGAALELTFRLFELADPRDRLELRDAASGSLLRAFDGARPPPSGPLRLGTAALLLTFRSDARGHAQGFALTYRGLQDAAEDPEAPEGSAQTPAAPLDGANVSCSPRPGAPPAAIGGAVCWLREKGPRRWGLPGAPGEAGLCGTNSPEGWPCPAPPGTPRLRVLPRATGL

SEQ ID NO: 36613 - protein, 428 aa, Homo sapiens
VTYPWLRAMGTQALQGFLFLLFLPLLQPRGASAGSLHSPGLSECFQVNGADYRGHQNRTGPRGAGRPCLFWDQTQQHSYSSASDPHGRWGLGAHNFCRNPDGDVQPWCYVAETEEGIYWRYCDIPSCHMPGYLGCFVDSGAPPALSGPSGTSTKLTVQVCLRFCRMKGYQLAGVEAGYACFCGSESDLARGRLAPATDCDQICFGHPGQLCGGDGRLGVYEVSVGSCQGNWTAPQGVIYSPDFPDEYGPDRNCSWALGPPGAALELTFRLFELADPRDRLELRDAASGSLLRAFDGARPPPSGPLRLGTAALLLTFRSDARGHAQGFALTYRGLQDAAEDPEAPEGSAQTPAAPLDGANVSCSPRPGAPPAAIGGAVCWLREKGPRRWGLPGAPGEAGLCGTNSPEGWPCPAPPGTPRLRVLPRATGL

SEQ ID NO: 36614 - protein, 431 aa, Homo sapiens
VTYPWLRAMGTQALQGFLFLLFLPLLQPRGASAGSLHSPGLSECFQVNGADYRGHQNRTGPRGAGRPCLFWDQTQQHSYSSASDPHGRWGLGAHNFCRNPDGDVQPWCYVAETEEGIYWRYCDIPSCHMPGYLGCFVDSGAPPALSGPSGTSTKLTVQVCLRFCRMKGYQLCGGDGRLGVYEVSVGSCQGNWTAPQGVIYSPDFPDEYGPDRNCSWALGPPGAALELTFRLFELADPRDRLELRDAASGSLLRAFDGARPPPSGPLRLGTAALLLTFRSDARGHAQGFALTYRGLQDAAEDPEAPEGSAQTPAAPLDGANVSCSPRPGAPPAAIGARVFSTVTAVSVLLLLLLGLLRPLRRRSCLLAPGKGPPALGASRGPRRSWAVWYQQPRGVALPCSPGDPQAEGSAAGYRPLSASSQSSLRSLISAL

SEQ ID NO: 36615 - protein, 64 aa, Homo sapiens
LGSRLALRVQVLPGRQPRASSPYPVPPTRPVASLPDLHLSALHTSPPSSHKLARPGSLCPETME

SEQ ID NO: 36616 - protein, 82 aa, Homo sapiens
LWQALLALLCWLWHGLAHPASWLQPLGPPATPPGSPPCSLLLDSSLSSNWDDDSLGPSLSPEAVLARTVGSTSTPRSRCTPR

SEQ ID NO: 36617 - protein, 33 aa, Homo sapiens
LDSLQSPSIWLHSKAPSVLFRTHGLGGRFEINF

SEQ ID NO: 36618 - protein, 540 aa, Homo sapiens
LPRVMGAWAFPAALFLLCLTSESLQGGLPLLPPGLGKVYGPHSGLGAGYDGGVKPQKPGFVVRHGLGTQPDTEGGMKPQNLGFRTFAGAAAQPGYGNGLGAAAFPVAGAQSGPAAQNGFGPGFGGGGKPQKPGPTTQNGYRPGYVGAVKPQKPGFQYRIGLGAQPGFRGDMKAQEPGLGNGNGLSAQPVLTAQNRFGFGAGLGGNVKPLKPGYGKRLRAGAFPGAGTQPEYGHGNGPGVQPGLGAGMKPQMPGLGAPNGYGPGRGRAGVPGGPERRPWVPHLLPFSSPGYLGVMKAQKPGPLAQNGYRAGAGEGMKPQKPGLRGTLKPQKSGHGHENGPWPGPCNARVAPMLLPRLPTPGVPSDKEGGWGLKSQPPSAVQNGKLPAPMPAIQWGLKPQKAGHQPPNGYGPGAEPGFNGGLEPQKIGLGYGNGVLGARVFPEAHPQPGFHGANGFRNRDGVEALVYPKAAALAPEGNGQAGVLWNSRWPTLQAWGAGLKPGYQAGDEYAEARSQPGGPDVKRGSNGQLGNGYGGRCPLGKC

SEQ ID NO: 36619 - protein, 27 aa, Homo sapiens
MSGVFAALTSAPRVRDGTHQPPSRRRR

SEQ ID NO: 36620 - protein, 74 aa, Homo sapiens
LWSLASGLWVGLAHSVLHFSLAHDGPVYSMVSTDRHLLSAGDGEVKAWLWAEMLKKVRSRAWERAGVPGPRESL

SEQ ID NO: 36621 - protein, 228 aa, Homo sapiens
VELGHLRPWLLELLAAMCFPKGLGAWVSACDTEDTVGHLGPWRDKDPALWCQLCLSSQHQAIERFYDKMQNAESGRGQVMSSLAELEDDFKEGYLETVAAYYEEQHPELTPLLEKERDGLRCRGNRSPVPDVEDPATEEPGESFCDKVMRWFQAMLQRLQTWWHGVLAWVKEKVVALVHAVQALWKQFQSFCCSLSELFMSSFQSYGAPRGDKEELTPQKCSEPQSSK

SEQ ID NO: 36622 - protein, 124 aa, Homo sapiens
LFLASRPWLLELLAAMCFPKVLSDDMKKLKARMVMLLPTSAQGLGAWVSACDTEDTVGHLGPWRDKDPALWCQLCLSSQHQAIERFYDKMQNAESGRGQVGGFPLRHQVTCPRPQALHPVWGSG

SEQ ID NO: 36623 - protein, 203 aa, Homo sapiens
LFLASRPWLLELLAAMCFPKVLSDDMKKLKARMHQAIERFYDKMQNAESGRGQVMSSLAELEDDFKEGYLETVAAYYEEQHPELTPLLEKERDGLRCRGNRSPVPDVEDPATEEPGESFCDKVMRWFQAMLQRLQTWWHGVLAWVKEKVVALVHAVQALWKQFQSFCCSLSELFMSSFQSYGAPRGDKEELTPQKCSEPQSSK

SEQ ID NO: 36624 - protein, 249 aa, Homo sapiens
LFLASRPWLLELLAAMCFPKVLSDDMKKLKARMVMLLPTSAQGLGAWVSACDTEDTVGHLGPWRDKDPALWCQLCLSSQHQAIERFYDKMQNAESGRGQVMSSLAELEDDFKEGYLETVAAYYEEQHPELTPLLEKERDGLRCRGNRSPVPDVEDPATEEPGESFCDKVMRWFQAMLQRLQTWWHGVLAWVKEKVVALVHAVQALWKQFQSFCCSLSELFMSSFQSYGAPRGDKEELTPQKCSEPQSSK

SEQ ID NO: 36625 - protein, 240 aa, Homo sapiens
LFLASRPWLLELLAAMCFPKVLSDDMKKLKARMVMLLPTSAQGLGAWVSACDTEDTVGHLGPWRDKDPALWCQLCLSSQHQAIERFYDKMQNAESGRGQDDFKEGYLETVAAYYEEQHPELTPLLEKERDGLRCRGNRSPVPDVEDPATEEPGESFCDKVMRWFQAMLQRLQTWWHGVLAWVKEKVVALVHAVQALWKQFQSFCCSLSELFMSSFQSYGAPRGDKEELTPQKCSEPQSSK

SEQ ID NO: 36626 - protein, 148 aa, Homo sapiens
VESRAWVAPALGREVTPRAAMPAHEDGFTQDAFMMPARQSHQNRKMEDAFCGKIVLFEISKRALQLSSQTEFRSSSHAGVQWRNLSSPQPPPPGFKRFSCLSLLITWDYRHVPPHLANFVFLVEMGFLHVGQAGLELLTSGDPPTSAS

SEQ ID NO: 36627 - protein, 67 aa, Homo sapiens
VLVPRAALPAWSPGRRPCTIAARPAGEAAVDSAGLRLARLPACRVLLSDPGESWPSSRKVFFEVTRG

SEQ ID NO: 36628 - protein, 68 aa, Homo sapiens
VLVPRAALPAWSPGRRPCTIAARPAGEAAVDSAGLRLARLPACRVLLSDPGVHIQMPAQLPQGIPLGD

SEQ ID NO: 36629 - protein, 410 aa, Homo sapiens
VALEAPRNECGVWLQGMMAAKVVPMPPKPKQSFILRVPPDSKLGQDLLRDATNGPKTIHQLVLEHFLTFLPKPSLVQPSQKVKETLVIMKDVSSSLQNRVHPRPLVKLLPKGVQKEQETVSLYLKANPELVVFEDLNVFHCQEECVSLDPTQQLTSEKEDDSSVGEMMLLAVNGSNPEGEDPEREPVENEDYREKSSDDDEMDSSLVSQQPPDNQEKERLNTSIPQKRKMRNLLVTIENDTPLEELSKYVDISIIALTRNRRTRRWYTCPLCGKQFNESSYLISHQRTHTGEKPYDCNHCGKSFNHKTNLNKHERIHTGEKPYSCSQCGKNFRQNSHRSRHEGIHIREKIFKCPECGKTFPKNEEFVLHLQSHEAERPYGCKKCGRRFGRLSNCTRHEKTHSACKTRKQK

SEQ ID NO: 36630 - protein, 411 aa, Homo sapiens
VALEAPRNECGVWLQGMMAAKVVPMPPKPKQSFILRVPPDSKLGQDLLRDATNGPKTIHQLVLEHFLTFLPKPSLVQPSQKVKETLVIMKDVSSSLQNRVHPRPLVKLLPKGVQKEQETVSLYLKANPEELVVFEDLNVFHCQEECVSLDPTQQLTSEKEDDSSVGEMMLLAVNGSNPEGEDPEREPVENEDYREKSSDDDEMDSSLVSQQPPDNQEKERLNTSIPQKRKMRNLLVTIENDTPLEELSKYVDISIIALTRNRRTRRWYTCPLCGKQFNESSYLISHQRTHTGEKPYDCNHCGKSFNHKTNLNKHERIHTGEKPYSCSQCGKNFRQNSHRSRHEGIHIREKIFKCPECGKTFPKNEEFVLHLQSHEAERPYGCKKCGRRFGRLSNCTRHEKTHSACKTRKQK

SEQ ID NO: 36631 - protein, 410 aa, Homo sapiens
VALEAPRNECGVWLQGMMAAKVVPMPPKPKQSFILRVPPDSKLGQDLLRDATNGPKTIHQLVLEHFLTFLPKPSLVQPSQKVKETLVIMKDVSSSLQNRVHPRPLVKLLPKGVQKEQETVSLYLKANPEELVVFEDLNVFHCQEECVSLDPTQQLTSEKEDDSSVGEMMLLVNGSNPEGEDPEREPVENEDYREKSSDDDEMDSSLVSQQPPDNQEKERLNTSIPQKRKMRNLLVTIENDTPLEELSKYVDISIIALTRNRRTRRWYTCPLCGKQFNESSYLISHQRTHTGEKPYDCNHCGKSFNHKTNLNKHERIHTGEKPYSCSQCGKNFRQNSHRSRHEGIHIREKIFKCPECGKTFPKNEEFVLHLQSHEAERPYGCKKCGRRFGRLSNCTRHEKTHSACKTRKQK

SEQ ID NO: 36632 - protein, 28 aa, Homo sapiens
MPNTASLFLLLALYLAFTLNSHGMPTRC

SEQ ID NO: 36633 - protein, 87 aa, Homo sapiens [sequence omitted]

SEQ ID NO: 36634 - protein, 86 aa, Homo sapiens
LLPSEHYVQSNLSTILFSGSEVKSGLFGRGEATLHLCYTQDYSVIAFESFTLPSSEASVFMETYHTCLVGTSCSIPPLFILSVFRY

SEQ ID NO: 36635 - protein, 9 aa, Homo sapiens
LPVGFMRNN

SEQ ID NO: 36636 - protein, 57 aa, Homo sapiens [sequence omitted]

SEQ ID NO: 36637 - protein, 80 aa, Homo sapiens
LGALLALAALLQGAVSLKIAAFNIQTFGETKMSNATLVSYIVQILSRYDIALVQEVRDSHLTAVGKLLDNLNQWVTVAGS

SEQ ID NO: 36638 - protein, 174 aa, Homo sapiens
VLWRGWPGAAALCFMTSGLREPCPSAAVSRAHLCGPTGSGLLTGCLLCPQAKYLAQIIVMGVQVVGRAFARALRQEFAASRAAADARGRAGHRSAAASNLSGLSLQEAQQILNVSKLSPEEVQKNYEHLFKVNDKSVGGSFYLQSKVVRAKERLDEELKIQAQEDREKGQMPHT

SEQ ID NO: 36639 - protein, 48 aa, Homo sapiens
VMVGPRVESELLPGPGLSLCSGSQTTVFLPEAGGCSHFALLLYAFPEG

SEQ ID NO: 36640 - protein, 119 aa, Homo sapiens
LSLPNRCPCALGTWSMSQDSPFLPLQKEFFQDDVFPDTAVIWEPVLSAEAWLQGANGQPWLLSLQPPDMSPGAPRDWVWGGSGMGVGERDRRPRLKFHSCWHAESSGLWEGGVAVSISL

SEQ ID NO: 36641 - protein, 128 aa, Homo sapiens
LPKTECDVREVELMRCLRLRQSSLEPVAFRLPRVRKEFFQDDVFPDTAVIWEPVLSAEAWLQGANGQPWLLSLQPPDMSPGAPRDWVWGGSGMGVGERDRRPRLKFHSCWHAESSGLWEGGVAVSISL

SEQ ID NO: 36642 - protein, 716 aa, Homo sapiens
VDADSNAVASGPRTPSGPTRQERLRPRPAPPGSLRRRRLPGQKMCSRVPLLLPLLLLLALGPGVQGCPSGCQCSQPQTVFCTARQGTTVPRDVPPDTVGLYVFENGITMLDAGSFAGLPGLQLLDLSQNQIASLPSGVFQPLANLSNLDLTANRLHEITNETFRGLRRLERLYLGKNRIRHIQPGAFDTLDRLLELKLQDNELRALPPLRLPRLLLLDLSHNSLLALEPGILDTANVEALRLAGLGLQQLDEGLFSRLRNLHDLDVSDNQLERVPPVIRGLRGLTRLRLAGNTRIAQLRPEDLAGLAALQELDVSNLSLQALPGDLSGLFPRLRLLAAARNPFNCVCPLSWFGPWVRESHVTLASPEETRCHFPPKNAGRLLLELDYADFGCPATTTTATVPTTRPVVREPTALSSSLAPTWLSPTEPATEAPSPPSTAPPTVGPVPQPQDCPPSTCLNGGTCHLGTRHHLACLCPEGFTGLYCESQMGQGTRPSPTPVTPRPPRSLTLGIEPVSPTSLRVGLQRYLQGSSVQLRSLRLTYRNLSGPDKRLVTLRLPASLAEYTVTQLRPNATYSVCVMPLGPGRVPEGEEACGEAHTPPAVHSNHAPVTQAREGNLPLLIAPALAAVLLAALAAVGAAYCVRRGRAMAAAAQDKGQVGPGAGPLELEGVKVPLEPGPKATEGGGEALPSGSECEVPLMGFPGPGLQSPLHAKPYI

SEQ ID NO: 36643 - protein, 339 aa, Homo sapiens
LQWTRPQNRGPGLLELVPPRPRRGGHSSRSLDRIRPILVLMVDKKLVVVFGGTGAQGGSVARTLLEDGTFKVRVVTRNPRKKAAKELRLQGAEVVQGDQDDQVIMELALNGAYATFIVTNYWESCSQEQEVKQGKLLADLARRLGLHYVVYSGLENIKKLTAGRLAAAHFDGKGEVEEYFRDIGVPMTSVRLPCYFENLLSHFLPQKAPDGKSYLLSLPTGDVPMDGMSVSDLGPVVLSLLKMPEKYVGQNIGLSTCRHTAEEYAALLTKHTRKVVHDAKMTPEDYEKLGFPGARDLANMFRFYALRPDRDIELTLRLNPKALTLDQWLEQHKGDFNLL

SEQ ID NO: 36644 - protein, 61 aa, Homo sapiens
VGGRGLTMSLCVVGLLGVCDREDKLGGVSCWGPDASVSKQGTGSVQTLSPWDQQQPEQLAS

SEQ ID NO: 36645 - protein, 59 aa, Homo sapiens
LPPPVPPLQCLLSCLGPSPDDASSTTFPATSAAAATADSIPKGPPAGPRVHQALKSSTH

SEQ ID NO: 36646 - protein, 72 aa, Homo sapiens
VVRAHWACLSSLRMLLFILGSDPPLVRLITAGRDPGVPDCPTGVAHSSGTTQKMGCVGGGCLVSVSSFLPPS

SEQ ID NO: 36647 - protein, 95 aa, Homo sapiens
MGTVLLLLLLVVAHCCCCSSPGPRRESPRKVSPWKVSPAGLWDLHGTVLGVEAEGEGSGGKGAHPPREQRANLLGPAVLLVQERPKGVDNLALEP

SEQ ID NO: 36648 - protein, 289 aa, Homo sapiens
LPFLFPFPFLHLFPFHFFVALLGPGFLFPDLPVQPPNGQGIGRPSALYSGQGLNHHTPHFCPGLKGSEWLWQEVPPHCPAHPTLACQDVNLKMPRNNQLLHFAFREDKQWKLQQIQDARNHVSQAIYLLTSRDQSYQFKTGAEVLKLMDAVMLQLTRARNRLTTPATLTLPEIAASGLTRMFAPALPSDLLVNVYINLNKLCLTVYQLHALQPNSTKNFRPAGGAVLHSPGAMFEWGSQRLEVSHVHKVECVIPWLNDALVYFTVSLQLCQQLKDKISVFSSYWSYRPF

SEQ ID NO: 36649 - protein, 398 aa, Homo sapiens
LVPAASLASRSKPDSCSRRPRPWPGGASLTPAAASLVPGLPQVSGAEADRQAPANREHGAGLGAGWYPLRQSGGGGARRRGRTGGPEDRGQKDWWTGAAAGGEGARRRPAAMATVMAATAAERAVLEEEFRWLLHDEVHAVLKQLQDILKEASLRFTLPGSGTEGPAKQENFILGSCGTDQVKGVLTLQGDALSQADVNLKMPRNNQLLHFAFREDKQWKLQQIQDARNHVSQAIYLLTSRDQSYQFKTGAEVLKLMDAVMLQLTRARNRLTTPATLTLPEIAASGLTRMFAPALPSDLLVNVYINLNKLCLTVYQLHALQPNSTKNFRPAGGAVLHSPGAMFEWGSQRLEVSHVHKVECVIPWLNDALVYFTVSLQLCQQLKDKISVFSSYWSYRPF

SEQ ID NO: 36650 - protein, 143 aa, Homo sapiens
LVPGLPQVSGAEADRQAPANREHGAGLGAGWYPLRQSGGGGARRRGRTGGPEDRGQKDWWTGAAAGGEGARRRPAAMATVMAATAAERAVLEEEFRWLLHDEVHAVLKQLQDILKEASLRFTLPGSGTEGPAKQENFILGSCG

SEQ ID NO: 36651 - protein, 519 aa, Homo sapiens
LAGHGASGLQSQYFGRPSAWIKVEQLKPYHAHKEEMIKINKGKRFQQAVDAVEEFLRRAKGKDQTSSHNSSDDKNRRNSSEERSRPNSGDEKRKLSLSEGKVKKNMGEGKKRVSSGSSERGSKSPLKRAQEQSPRKRGRPPKDEKDLTIPESSTVKGMMAGPMAAFKWQPTASEPVKDADPHFHHFLLSQTEKPAVCYQAITKKLKICEEETGSTSIQAADSTAVNGSITPTDKKIGFLGLGLMGSGIVSNLLKMGHTVTVWNRTAEKCDLFIQEGARLGRTPAEVVSTCDITFACVSDPKAAKDLVLGPSGVLQGIRPGKCYVDMSTVDADTVTELAQVIVSRGGRFLEAPVSGNQQLSNDGMLVILAAGDRGLYEDCSSCFQAMGKTSFFLGEVGNAAKMMLIVNMVQGSFMATIAEGLTLAQVTGQSQQTLLDILNQGQLASIFLDQKCQNILQGNFKPDFYLKYIQKDLRLAIALGDAVNHPTPMAAAANEVYKRAKALDQSDNDMSAVYRAYIH

SEQ ID NO: 36652 - protein, 61 aa, Homo sapiens [sequence omitted]

SEQ ID NO: 36653 - protein, 184 aa, Homo sapiens
VRMERGVVGGSLEGVEGPSGGVLSSHITSLYSQDNMWRCPRQVSTVVCVHEPRCQPPDCHGHGTCVDGHCQCTGHFWRGPGCDELDCGPSNCSQHGLCTETGCRCDAGWTGSNCSEECPLGWHGPGCQRPCKCEHHCPCDPKTGNCSVSRGTYPSKGRGMGRRSCSGPFSLSLVCYSKAVSPAT

SEQ ID NO: 36654 - protein, 161 aa, Homo sapiens [sequence omitted]

SEQ ID NO: 36655 - protein, 29 aa, Homo sapiens
MATSTGRWLLLRLALFGFLWEASGGLDSG

SEQ ID NO: 36656 - protein, 184 aa, Homo sapiens
MASLGLLLLLLLTALPPLWSSSLPGLDTAESKATIADLILSALERATVFLEQRLPEINLDGMVGVRVLEEQLKSVREKWAQEPLLQPLSLRVGMLGEKLEAAIQRSLHYLKLSDPKYLREFQLTLQPGFWKLPHAWIHTDASLVYPTFGPQDSFSEERSDVCLVQLLGTGWALHLPYLLETQTH

SEQ ID NO: 36657 - protein, 42 aa, Homo sapiens
LGPAAAGFSSLAKSLRSSPRAMQSYSLPAWTCLQYLLWDLPC

SEQ ID NO: 36658 - protein, 540 aa, Homo sapiens
LPELGARIPQVGTRRIGSRRSETGPGGWQHAKGVPVPQGVMASMLLAQRLACSFQHSYRLLVPGSRHISQAAAKVDVEFDYDGPLMKTEVPGPRSQELMKQLNIIQNAEAVHFFCNYEESRGNYLVDVDGNRMLDLYSQISSVPIGYSHPALLKLIQQPQNASMFVNRPALGILPPENFVEKLRQSLLSVAPKGMSQLITMACGSCSNENALKTIFMWYRSKERGQRGFSQEELETCMINQAPGCPDYSILSFMGAFHGRTMGCLATTHSKAIHKIDIPSFDWPIAPFPRLKYPLEEFVKENQQEEARCLEEVEDLIVKYRKKKKTVAGIIVEPIQSEGGDNHASDDFFRKLRDIARKHGCAFLVDEVQTGGGCTGKFWAHEHWGLDDPADVMTFSKKMMTGGFFHKEEFRPNAPYRIFNTWLGDPSKNLLLAEVINIIKREDLLNNAAHAGKALLTGLLDLQARYPQFISRVRGRGTFCSFDTPDDSIRNKLILIARNKGVVLGGCGDKSIRFRPTLVFRDHHAHLFLNIFSDILADFK

SEQ ID NO: 36659 - protein, 508 aa, Homo sapiens
LASAEWHTEGILSKRAELAAGLRLPGTGGSTQRVSLSLKGSWPPCCSPSAWPAASSTATACWCLELMKQLNIIQNAEAVHFFCNYEESRGNYLVDVDGNRMLDLYSQISSVPIGYSHPALLKLIQQPQNASMFVNRPALGILPPENFVEKLRQSLLSVAPKGMSQLITMACGSCSNENALKTIFMWYRSKERGQRGFSQEELETCMINQAPGCPDYSILSFMGAFHGRTMGCLATTHSKAIHKIDIPSFDWPIAPFPRLKYPLEEFVKENQQEEARCLEEVEDLIVKYRKKKKTVAGIIVEPIQSEGGDNHASDDFFRKLRDIARKHGCAFLVDEVQTGGGCTGKFWAHEHWGLDDPADVMTFSKKMMTGGFFHKEEFRPNAPYRIFNTWLGDPSKNLLLAEVINIIKREDLLNNAAHAGKALLTGLLDLQARYPQFISRVRGRGTFCSFDTPDDSIRNKLILIARNKGVVLGGCGDKSIRFRPTLVFRDHHAHLFLNIFSDILADFK

SEQ ID NO: 36660 - protein, 163 aa, Homo sapiens
LLFRISQDFRLFIYVAQMNNVFLEKLCHPFIPRGTFIEFRNGMLNVSPIGRSCSQEERIEFYELDKKENIRQKFVADLRKEFAGKGLTFSIGGQISFDVFPDGWDKRYCLRHVENDGYKTIYFFGDKTMPGGNDHEIFTDPRTMGYSVTAPEDTRRICELLFS

SEQ ID NO: 36661 - protein, 23 aa, Homo sapiens
LGLEWMCVLGEAETSRSRQGLGS

SEQ ID NO: 36662 - protein, 1167 aa, Homo sapiens
VRVSLPPPPPAAGRPGAAVADDAREEEEEAAPPPPPPPPPRLAAARPPGSQPRPPAAGEAQAAADMNHQQQQQQQKAGEQQLSEPEDMEMEAGDTDDPPRITQNPVINGNVALSDGHNTAEEDMEDDTSWRSEATFQFTVERFSRLSESVLSPPCFVRNLPWKIMVMPRFYPDRPHQKSVGFFLQCNAESDSTSWSCHAQAVLKIINYRDDEKSFSRRISHLFFHKENDWGFSNFMAWSEVTDPEKGFIDDDKVTFEVFVQADAPHGVAWDSKKHTGYVGLKNQGATCYMNSLLQTLFFTNQLRKAVYMMPTEGDDSSKSVPLALQRVFYELQHSDKPVGTKKLTKSFGWETLDSFMQHDVQELCRVLLDNVENKMKGTCVEGTIPKLFRGKMVSYIQCKEVDYRSDRREDYYDIQLSIKGKKNIFESFVDYVAVEQLDGDNKYDAGEHGLQEAEKGVKFLTLPPVLHLQLMRFMYDPQTDQNIKINDRFEFPEQLPLDEFLQKTDPKDPANYILHAVLVHSGDNHGGHYVVYLNPKGDGKWCKFDDDVVSRCTKEEAIEHNYGGHDDDLSVRHCTNAYMLVYIRESKLSEVLQAVTDHDIPQQLVERLQEEKRIEAQKRKERQEAHLYMQVQIVAEDQFCGHQGNDMYDEEKVKYTVFKVLKNSSLAEFVQSLSQTMGFPQDQIRLWPMQARSNGTKRPAMLDNEADGNKTMIELSDNENPWTIFLETVDPELAASGATLPKFDKDHDVMLFLKMYDPKTRSLNYCGHIYTPISCKIRDLLPVMCDRAGFIQDTSLILYEEVKPNLTERIQDYDVSLDKALDELMDGDIIVFQKDDPENDNSELPTAKEYFRDLYHRVDVIFCDKTIPNDPGFVVTLSNRMNYFQVAKTVAQRLNTDPMLLQFFKSQGYRDGPGNPLRHNYEGTLRDLLQFFKPRQPKKLYYQQLKMKITDFENRRSFKCIWLNSQFREEEITLYPDKHGCVRDLLEECKKAVELGEKASGKLRLLEIVSYKIIGVHQEDELLECLSPATSRTFRIEEIPLDQVDIDKENEMLVTVAHFHKEVFGTFGIPFLLRIHQGEHFREVMKRIQSLLDIQEKEFEKFKFAIVMMGRHQYINEDEYEVNLKDFEPQPGNMSHPRPWLGLDHFNKAPKRSRYTYLEKAIKIHN

SEQ ID NO: 36663 - protein, 1467 aa, Homo sapiens
VATMGRVGYWTLLVLPALLVWRGPAPSAAAEKGPPALNIAVMLGHSHDVTERELRTLWGPEQAAGLPLDVNVVALLMNRTDPKSLITHVCDLMSGARIHGLVFGDDTDQEAVAQMLDFISSHTFVPILGIHGGASMIMADKDPTSTFFQFGASIQQQATVMLKIMQDYDWHVFSLVTTIFPGYREFISFVKTTVDNSFVGWDMQNVITLDTSFEDAKTQVQLKKIHSSVILLYCSKDEAVLILSEARSLGLTGYDFFWIVPSLVSGNTELIPKEFPSGLISVSYDDWDYSLEARVRDGIGILTTAASSMLEKFSYIPEAKASCYGQMERPEVPMHTLHPFMVNVTWDGKDLSFTEEGYQVHPRLVVIVLNKDREWEKVGKWENHTLSLRHAVWPRYKSFSDCEPDDNHLSIVTLEEAPFVIVEDIDPLTETCVRNTVPCRKFVKINNSTNEGMNVKKCCKGFCIDILKKLSRTVKFTYDLYLVTNGKHGKKVNNVWNGMIGEVVYQRAVMAVGSLTINEERSEVVDFSVPFVETGISVMVSRSNGTVSPSAFLEPFSASVWVMMFVMLLIVSAIAVFVFEYFSPVGYNRNLAKGKAPHGPSFTIGKAIWLLWGLVFNNSVPVQNPKGTTSKIMVSVWAFFAVIFLASYTANLAAFMIQEEFVDQVTGLSDKKFQRPHDYSPPFRFGTVPNGSTERNIRNNYPYMHQYMTKFNQKGVEDALVSLKTGKLDAFIYDAAVLNYKAGRDEGCKLVTIGSGYIFATTGYGIALQKGSPWKRQIDLALLQFVGDGEMEELETLWLTGICHNEKNEVMSSQLDIDNMAGVFYMLAAAMALSLITFIWEHLFYWKLRFCFTGVCSDRPGLLFSISRGIYSCIHGVHIEEKKKSPDFNLTGSQSNMLKLLRSAKNISSMSNMNSSRMDSPKRAADFIQRGSLIMDMVSDKGNLMYSDNRSFQGKESIFGDNMNELQTFVANRQKDNLNNYVFQGQHPLTLNESNPNTVEVAVSTESKANSRPRQLWKKSVDSIRQDSLSQNPVSQRDEATAENRTHSLKSPRYLPEEMAHSDISETSNRATCHREPDNSKNHKTKDNFKRSVASKYPKDCSEVERTYLKTKSSSPRDKIYTIDGEKEPGFHLDPPQFVENVTLPENVDFPDPYQDPSENFRKGDSTLPMNRNPLHNEEGLSNNDQYKLYSKHFTLKDKGSPHSETSERYRQNSTHCRSCLSNMPTYSGHFTMRSPFKCDACLRMGNLYDIDEDQMLQETGNPATGEQVYQQDWAQNNALQLQKNKLRISRQHSYDNIVDKPRELDLSRPSRSISLKDRERLLEGNFYGSLFSVPSSKLSGKKSSLFPQGLEDSKRSKSLLPDHTSDNPFLHSHRDDQRLVIGRCPSDPYKHSLPSQAVNDSYLRSSLRSTASYCSRDSRGHNDVYISEHVMPYAANKNNMYSTPRVLNSCSNRRVYKKMPSIESDV

SEQ ID NO: 36664 - protein, 1284 aa, Homo sapiens
VATMGRVGYWTLLVLPALLVWRGPAPSAAAEKGPPALNIAVMLGHSHDVTERELRTLWGPEQAAGLPLDVNVVALLMNRTDPKSLITHVCDLMSGARIHGLVFGDDTDQEAVAQMLDFISSHTFVPILGIHGGASMIMADKDPTSTFFQFGASIQQQATVMLKIMQDYDWHVFSLVTTIFPGYREFISFVKTTVDNSFVGWDMQNVITLDTSFEDAKTQVQLKKIHSSVILLYCSKDEAVLILSEARSLGLTGYDFFWIVPSLVSGNTELIPKEFPSGLISVSYDDWDYSLEARVRDGIGILTTAASSMLEKFSYIPEAKASCYGQMERPEVPMHTLHPFMVNVTWDGKDLSFTEEGYQVHPRLVVIVLNKDREWEKVGKWENHTLSLRHAVWPRYKSFSDCEPDDNHLSIVTLEEAPFVIVEDIDPLTETCVRNTVPCRKFVKINNSTNEGMNVKKCCKGFCIDILKKLSRTVKFTYDLYLVTNGKHGKKVNNVWNGMIGEVVYQRAVMAVGSLTINEERSEVVDFSVPFVETGISVMVSRSNGTVSPSAFLEPFSASVWVMMFVMLLIVSAIAVFVFEYFSPVGYNRNLAKGKAPHGPSFTIGKAIWLLWGLVFNNSVPVQNPKGTTSKIMVSVWAFFAVIFLASYTANLAAFMIQEEFVDQVTGLSDKKFQRPHDYSPPFRFGTVPNGSTERNIRNNYPYMHQYMTKFNQKGVEDALVSLKTGKLDAFIYDAAVLNYKAGRDEGCKLVTIGSGYIFATTGYGIALQKGSPWKRQIDLALLQFVGDGEMEELETLWLTGICHNEKNEVMSSQLDIDNMAGVFYMLAAAMALSLITFIWEHLFYWKLRFCFTGVCSDRPGLLFSISRGIYSCIHGVHIEEKKKSPDFNLTGSQSNMLKLLRSAKNISSMSNMNSSRMDSPKRAADFIQRGSLIMDMVSDKGNLMYSDNRSFQGKESIFGDNMNELQTFVANRQKDNLNNYVFQGQHPLTLNESNPNTVEVAVSTESKANSRPRQLWKKSVDSIRQDSLSQNPVSQRDEATAENRTHSLKSPRYLPEEMAHSDISETSNRATCHREPDNSKNHKTKDNFKRSVASKYPKDCSEVERTYLKTKSSSPRDKIYTIDGEKEPGFHLDPPQFVENVTLPENVDFPDPYQDPSENFRKGDSTLPMNRNPLHNEEGLSNNDQYKLYSKHFTLKDKGSPHSETSERYRQNSTHCRSCLSNMPTYSGHFTMRSPFKCDACLRMGNLYDIDEDQMLQETGMTNAWLLGDAPRTLTNTRCHPRR

SEQ ID NO: 36665 - protein, 168 aa, Homo sapiens
VATMGRVGYWTLLVLPALLVWRGPAPSAAAEKGPPALNIAVMLGHSHDVTERELRTLWGPEQAAGLPLDVNVVALLMNRTDPKSLITHVCDLMSGARIHGLVFGDDTDQEAVAQMLDFISSHTFVPILGIHGGASMIMADKVRPETDALPGPGKPPAAWQLLQVFGRP

SEQ ID NO: 36666 - protein, 45 aa, Homo sapiens
LGLIICPMIWIVFFFSTLFSLKLKWLACPGDFQKPGLEGLEIHQH

SEQ ID NO: 36667 - protein, 30 aa, Homo sapiens
MGAGPAGARGVREDLRGGAGEKAAGTGPRH

SEQ ID NO: 36668 - protein, 160 aa, Homo sapiens
LFVLCLLYAMSHNKGMDPEKLERIQLPVPNAAEKTTYNHPLAERLIRIMNNAAQPDGKIRLATLELSCLLLKQQVLMSAGCIMKDVHLACLEGAREESVHLVRHFYKGEDIFLDMFEDEYRSMTAESREAIGSEDPSFLCFARLSLLSQHLPLARYSIST

SEQ ID NO: 36669 - protein, 73 aa, Homo sapiens
MQSPQQQSPDGGQNLPPLPPPRPRPPRARGRAPRSRPRPPATRTSAHSVRTPITGASRAPARSWTPADSTGGP

SEQ ID NO: 36670 - protein, 13 aa, Homo sapiens
MDNFIYCLYLGLM

SEQ ID NO: 36671 - protein, 662 aa, Homo sapiens
LPTPLRPGAPASISRSLSTTHTAPPIMDPGSGGGGGGGGGGGSSSGSSSSDSAPDCWDQADMEAPGPGPCGGGGSLAAAAEAQRENLSAAFSRQLNVNAKPFVPNVHAAEFVPSFLRGPAAPPPPVGGAANNHGAGSGAGGRAAPVESSQEEQSLCEGSNSAVSMELSEPIENGETEMSPEESWEHKEEISEAEPGGGSLGDGRPPEESAHEMMEEEEEIPKPKSVVAPPGAPKKEHVNVVFIGHVDAGKSTIGGQIMYLTGMVDKRTLEKYEREAKEKNRETWYLSWALDTNQEERDKGKTVEVGRAYFETEKKHFTILDAPGHKSFVPNMIGGASQADLAVLVISARKGEFETGFEKGGQTREHAMLAKTAGVKHLIVLINKMDDPTVNWSNERYEECKEKLVPFLKKVGFNPKKDIHFMPCSGLTGANLKEQSDFCPWYIGLPFIPYLDNLPNFNRSVDGPIRLPIVDKYKDMGTVVLGKLESGSICKGQQLVMMPNKHNVEVLGILSDDVETDTVAPGENLKIRLKGIEEEEILPGFILCDPNNLCHSGRTFDAQIVIIEHKSIICPGYNAVLHIHTCIEEVEITALICLVDKKSGEKSKTRPRFVKQDQVCIARLRTAGTICLETFKDFPQMGRFTLRDEGKTIAIGKVLKLVPEKD

SEQ ID NO: 36672 - protein, 52 aa, Homo sapiens
MVCMLMLLLDAGKSTIGGQIMYLTGMVDKRTLEKYEREAKEKNRETWYSKLL

SEQ ID NO: 36673 - protein, 90 aa, Homo sapiens
LDGGLGVRQRVCVRVCVCVCVCVCVCVCVCVKSCKSTTCPSPFSVETDHSNDKRSWRCFAPPASDRSLLDISHFCMVEIKMKNVFPKDEN

SEQ ID NO: 36674 - protein, 25 aa, Homo sapiens
MMVRLVVTGLLFCFMEIIEGLDPFL

SEQ ID NO: 36675 - protein, 155 aa, Homo sapiens
MLLLLLPSLLLLLLLPGPGSGEASRILRVHRRGILELAGTVGCVGPRTPIAYMKYGCFCGLGGHGQPRDAIDWCCHGHDCCYTRAEEAGCSPKTERYSWQCVNQSVLCGPAENKCQELLCKCDQEIANCLAQTEYNLKYLFYPQFLCEPDSPKCD

SEQ ID NO: 36676 - protein, 186 aa, Homo sapiens
LNFLVCLFTNRAFLSEFLNSAFHFEGVWSLMLLGDMRLPFFQVEDELSSPVVVFRFFQELPGSDPVFKAVPVPNMTPSGVGRERHSCDALNRWLGEQLKQLVPASGLTVMDLEAEGTCLRFSPLMTAAVLGTRGEDVDQLVACIESKLPVLCCTLQLREEFKQEVEATAGLLYVDDPNWSGIGVVR

SEQ ID NO: 36677 - protein, 40 aa, Homo sapiens
LFTFCCIGICLLGFQGSVEKTEGKLRAGPTWSGTQSWSWH

SEQ ID NO: 36678 - protein, 20 aa, Homo sapiens
MGGGAAGAGGAARGSHVCWA

SEQ ID NO: 36679 - protein, 297 aa, Homo sapiens
LFVVFLRVITCPSVSLPSPQASPPSLHCACAVHPCPFWVPVGAPGRWRRRRRGSSVTGARPVKTLLAGATSLPAARNGNGVKGDPSTWPRGSAMELKQSLSTHLEAEKPLRRYGAVEETAWKTERLGRNQLDIISMAETTMMPEEIELEMAKIQRLREVLVRRESELRFMMDDIQLCKDIMDLKQELQNLVAIPEKEKTKLQKQREDELIQKIHKLVQKRDFLVDDAEVERLREQEEDKEMADFLRIKLKPLDKVTKSPASSRAEKKAEPPPSKPTVAKTGLALIKDCCGATQCNIM

SEQ ID NO: 36680 - protein, 73 aa, Homo sapiens
LCVVSWSHLPLPPILCLGTVHIRTASIVLSVCLRCVPGGGLDWHGSSVQKSQQGTGSSDVKARAVENGTQSRC

SEQ ID NO: 36681 - protein, 40 aa, Homo sapiens
LLCKLLKLLIFCLAMLVSVHFLQISQEFLSKCRNLLMKSI

SEQ ID NO: 36682 - protein, 1269 aa, Homo sapiens
VRGGGWRRRWGGAWAVSRPRRRKEPAACSVRGGTRLPAVGLAGGGRAMLVGQGAGPLGPAVVTAAVVLLLSGVGPAHGSEDIVVGCGGFVKSDVEINYSLIEIKLYTKHGTLKYQTDCAPNNGYFMIPLYDKGDFILKIEPPLGWSFEPTTVELHVDGVSDICTKGGDINFVFTGFSVNGKVLSKGQPLGPAGVQVSLRNTGTEAKIQSTVTQPGGKFAFFKVLPGDYEILATHPTWALKEASTTVRVTNSNANAASPLIVAGYNVSGSVRSDGEPMKGVKFLLFSSLVTKEDVLGCNVSPVPGFQPQDESLVYLCYTVSREDGSFSFYSLPSGGYTVIPFYRGERITFDVAPSRLDFTVEHDSLKIEPVFHVMGFSVTGRVLNGPEGDGVPEAVVTLNNQIKVKTKADGSFRLENITTGTYTIHAQKEHLYFETVTIKIAPNTPQLADIVATGFSVCGQISIIRFPDTVKQMNKYKVVLSSQDKDKSLVTVETDAHGSFCFKANPGTYKVQVMVPEAETRAGLTLKPQTFPLTVTDRPVMDVAFVQFLASVSGKVSCLDTCGDLLVTLQSLSRQGEKRSLQLSGKVNAMTFTFDNVLPGKYKISIMHEDWCWKNKSLEVEVLEDDVSAVEFRQTGYMLRCSLSHAITLEFYQDGNGRENVGIYNLSKGVNRFCLSKPGVYKVTPRSCHRFEQAFYTYDTSSPSILTLTAIRHHVLGTITTDKMMDVTVTIKSSIDSEPALVLGPLKSVQELRREQQLAEIEARRQEREKNGNEEGEERMTKPPVQEMVDELQGPFSYDFSYWARSGEKITVTPSSKELLFYPPSMEAVVSGESCPGKLIEIHGKAGLFLEGQIHPELEGVEIVISEKGASSPLITVFTDDKGAYSVGPLHSDLEYTVTSQKEGYVLTAVEGTIGDFKAYALAGVSFEIKAEDDQPLPGVLLSLSGGLFRSNLLTQDNGILTFSNLSPGQYYFKPMMKEFRFEPSSQMIEVQEGQNLKITITGYRTAYSCYGTVSSLNGEPEQGVAMEAVGQNDCSIYGEDTVTDEEGKFRLRGLLPGCVYHVQLKAEGNDHIERALPHHRVIEVGNNDIDDVNIIVFRQINQFDLSGNVITSSEYLPTLWVKLYKSENLDNPIQTVSLGQSLFFHFPPLLRDGENYVVLLDSTLPRSQYDYILPQVSFTAVGYHKHITLIFNPTRKLPEQDIAQGSYIALPLTLLVLLAGYNHDKLIPLLLQLTSRLQGVGALGQAASDNSGPEDAKRQAKKQKTRRT

SEQ ID NO: 36683 - protein, 196 aa, Homo sapiens
MEAVGQNDCSIYGEDTVTDEEGKFRLRGLLPGCVYHVQLKAEGNDHIERALPHHRVIEVGNNDIDDVNIIVFRQINQFDLSGNVITSSEYLPTLWVKLYKSENLDNPIQTVSLGQSLFFHFPPLLRDGENYVVLLDSTLPRSQYDYILPQVSFTAVGYHKHITLIFNPTEIGRTQEHANDSTGMQDNHLEPDLFDK

SEQ ID NO: 36684 - protein, 383 aa, Homo sapiens
LLDSGCGEEYVACLPDNSSGTVAAVSFSAAHEGLLQPEACSAFCFSTGQGLAALSEQGWCLCGSAQPSSASFACLSLCSGPPPPPAPTCRGPTLLQHVFPASPGATLVGPHGPLASGQLAAFHIAAPLPVTATRWDFGDGSPEVDAAGPAASHRYVLPGRYHVTAVLALGTGSALLGTDVQVEAAPAALELVCPSSVQSDESLDLSIQNRGGSGLEAAYSIVALGEEPARAVHPLCPSDTEIFSGNGHCYRLVVEKAAWLQAQEQCRAWAGATLAMVDSPAVQRFLVSRVTRSLDMWIGFSTVQGVEVGPAPQGEAFSLESCQNWLPGEPHPATAEHCVRLGPTGWCNTDLCSAPHSYVCELRPGGPVQDAENLLVGAPSGDL

SEQ ID NO: 36685 - protein, 147 aa, Homo sapiens
VGLAGGGRAMLVGQGAGLLGPAVVTAAVVLLLSGVGPAHGSEDIVVGCGGFVKSDVEINYSLIEIKLYTKHGTLKYQTDCAPNNGYFMIPLYDKGDFILKIEPPLGWSFEPTTVELHVDGVSDICTKGGDINFVFTGFSVNGKVCIF

SEQ ID NO: 36686 - protein, 425 aa, Homo sapiens
MSESSGSALQPGRPSRQPAVHPENLSLDSSCFSSPPVNFLQELPSYRSIARRRTTVHSRDKQSGTLLKPTDSYSSQLEDRIAENLSSHSLRNYALNISEKRRLRDIQETQMKYLSEWDQWKRYSSKSWKRFLEKAREMTTHLELWREDIRSIEGKFGTGIQSYFSFLRFLVLLNLVIFLIIFMLVLLPVLLTKYKITNSSFVLIPFKDMDKQCTVYPVSSSGLIYFYSYIIDLLSGTGFLEETSLFYGHYTIDGVKFQNFTYDLPLAYLLSTIASLALSLLWIVKRSVEGFKINLIRSEEHFQSYCNKIFAGWDFCITNRSMADLKHSSLRSGGRKNAAENSRKDLRRNNTHLLFETVFELYCSGCFRGMLLCNIRSNCLLARAHEKGNRQDGFWREPLHIVSTVYCDHAGQFYHPNDLCQDHPL

SEQ ID NO: 36687 - protein, 187 aa, Homo sapiens
VVAFFSSGNELRRGGGGSPPLAAAPGGPAVPLSLWKKNQCQISQFRNDFRQYQSGSCGSNNPGGSCRRIWSKPHLCRADGCPGSDQRRASHSGAGTALLGKEGAMACTVAVEESIAHHYNNQIRTLMEEDPEKYEELLQLIKKFRDEELEHHDIGLDHDAELAPAYAVLKSIIQAGCRVAIYLSERL

SEQ ID NO: 36688 - protein, 39 aa, Homo sapiens
MLGLGRRRGLPPGLLGHRRPGRPACRCTTPSIYASSGPW

SEQ ID NO: 36689 - protein, 491 aa, Homo sapiens
VLFLLFLFPTLPTSPLPHPPAHLPQWPQGFLSRISGLLLCRWTCRHCCQKCYESSCCQSSEDEVEILGPFPAQTPPWLMASRSSDKDGDSVHTASEVPLTPRTNSPDGRRSSSDTSKSTYSLTRRISSLESRRPSSPLIDIKPIEFGVLSAKKEPIQPSVLRRTYNPDDYFRKFEPHLYSLDSNSDDVDSLTDEEILSKYQLGMLHFSTQYDLLHNHLTVRVIEARDLPPPISHDGSRQDMAHSNPYVKICLLPDQKNSKQTGVKRKTQKPVFEERYTFEIPFLEAQRRTLLLTVVDFDKFSRHCVIGKVSVPLCEVDLVKGGHWWKALIPSSQNEVELGELLLSLNYLPSAGRLNVDVIRAKQLLQTDVSQGSDPFVKIQLVHGLKLVKTKKTSFLRGTIDPFYNESFSFKVPQEELENASLVFTVFGHNMKSSNDFIGRIVIGQYSSGPSETNHWRRMLNTHRTAVEQWHSLRSRAECDRVSPASLEVT

SEQ ID NO: 36690 - protein, 15 aa, Homo sapiens
VIIPLLQRTKQVWGW

SEQ ID NO: 36691 - protein, 463 aa, Homo sapiens
LQQRGPGQGAPRAAATLAGAAVKLDPQAGVRGAGAAAAPQRCDSGRRPAGASALRGRGGRMFVASERKMRAHQVLTFLLLFVITSVASENASTSRGCGLDLLPQYVSLCDLDAIWGIVVEAVAGAGALITLLLMLILLVRLPFIKEKEKKSPVGLHFLFLLGTLGLFGLTFAFIIQEDETICSVRRFLWGVLFALCFSCLLSQAWRVRRLVRHGTGPAGWQLVGLALCLMLVQVIIAVEWLVLTVLRDTRPACAYEPMDFVMALIYDMVLLVVTLGLALFTLCGKFKRWKLNGAFLLITAFLSVLIWVAWMTMYLFGNVKLQQGDAWNDPTLAITLAASGWVFVIFHAIPEIHCTLLPALQENTPNYFDTSQPRMRETAFEEDVQLPRAYMENKAFSMDEHNAALRTAGFPNGSLGKRPSGSLGKRPSAPFRSNVYQPTEMAVVLNGGTIPTAPPSHTGRHLW

SEQ ID NO: 36692 - protein, 545 aa, Homo sapiens
LKGSGHVRTWVMCAVGVVAILRRDPREGCTDWTCVFRGAKEAGVGPSVRKRTTTSGSWAVRREKSVSRRNLPGGGLAVCVRLGVYRGVGDFERHRAGSILSASWTWCWCVSGKLLLMNPPWSVAWGQEGFRAGTPGSRYLPRMFVASERKMRAHQVLTFLLLFVITSVASENASTSRGCGLDLLPQYVSLCDLDAIWGIVVEAVAGAGALITLLLMLILLVRLPFIKEKEKKSPVGLHFLFLLGTLGLFGLTFAFIIQEDETICSVRRFLWGVLFALCFSCLLSQAWRVRRLVRHGTGPAGWQLVGLALCLMLVQVIIAVEWLVLTVLRDTRPACAYEPMDFVMALIYDMVLLVVTLGLALFTLCGKFKRWKLNGAFLLITAFLSVLIWVAWMTMYLFGNVKLQQGDAWNDPTLAITLAASGWVFVIFHAIPEIHCTLLPALQENTPNYFDTSQPRMRETAFEEDVQLPRAYMENKAFSMDEHNAALRTAGFPNGSLGKRPSGSLGKRPSAPFRSNVYQPTEMAVVLNGGTIPTAPPSHTGRHLW

SEQ ID NO: 36693 - protein, 32 aa, Homo sapiens
VQRVMVLPINLIFRYLQNRSWIQVWLYEQVNM

SEQ ID NO: 36694 - protein, 141 aa, Homo sapiens
MAAPAQQTTQPGGGKRKGKAQYVLAKRARRCDAGGPRQLEPGLQGILITCNMNERKCVEEAYSLLNEYGDDMYGPEKFTDKDQQPSGSEGEDDDAEAALKKEVGDIKASTEMRLRRFQSVESGANNVVFIRTLGIGVTNTC

SEQ ID NO: 36695 - protein, 27 aa, Homo sapiens
LSAGFSFVWLHSFCCAMLSCLEYLKKT

SEQ ID NO: 36696 - protein, 361 aa, Homo sapiens
LPGARGGSQARSLPLRATDSASADPGNLKYSSSRDRGGSSSYGLQPSNSAVVSRQRHDDTRVHADIQNDEKERSMSYCDESRLSNLLQRITRENDRDRRLATVKQLKEFIQQPENKLVLVKQLDILAAVHDVLNESSKLLQELRQEGACCLGLLCASLSYEAEKIFKWIFSKFSSSAKDEVKLLYLCATYKALETVGEKKAFSSVMQLVMTSLQSILENVDTPELLCKCVKCILLVARCYPHIFSTNFRDTVGILVGWHRDHTQKPSLTQQVSGWLQSLEPFWVADLAFSTPLLGQFLEDMEAYAEDLSHVASGESVDEDVPPPSVSLPKLAALLRVFSTVVRSTGESLSPIRALQLLRHT

SEQ ID NO: 36697 - protein, 177 aa, Homo sapiens
MGTASRSNIARHLQTNLILFCVGAVGACTLSVTQPWYLEVDYTHEAVTIKCTFSATGCPSEQPTCLWFRYGAHQPENLCLDGCKSEADKFTVREALKENQVSLTVNRVTSNDSAIYICGIAFPSVPEARAKQTGGGTTLVVRGQSARLYFSASLHLVQACKIITSLTCRNQEINLLS

SEQ ID NO: 36698 - protein, 74 aa, Homo sapiens [sequence omitted]

SEQ ID NO: 36699 - protein, 20 aa, Homo sapiens
LLEIILEAFWQELNLFLLLL

SEQ ID NO: 36700 - protein, 65 aa, Homo sapiens
MRGIFSVGVRLHNTQAPFYCGEGPACWLFFKLLVQFPSIMLLIFWHTAEFHLLSMLSTVGFSKQV

SEQ ID NO: 36701 - protein, 15 aa, Homo sapiens
LKFLMYFAYYLVSFS

SEQ ID NO: 36702 - protein, 84 aa, Homo sapiens
MLLMTFASLLCLFSKCIQRGKEVASGISSLIHFHLSSPGNPMTNWPLAGALIRLQFLKRTSGGKSYTSGEVGLELLQYGGKGSS

SEQ ID NO: 36703 - protein, 353 aa, Homo sapiens
LSPATTGLKLILDIGQEDYVPFLASTAGVRLMLHEQRSYPFIRDEGIYAMSGTETSIGVLVDKLQRMGEPYSPCTVNGSEVPVQNFYSDYNTTYSIQACLRSCFQDHMIRNCNCGHYLYPLPRGEKYCNNRDFPDWAHCYSDLQMSVAQRETCIGMCKESCNDTQYKMTISMADWPSEASEDWIFHVLSQERDQSTNITLSRKGIVKLNIYFQEFNYRTIEESAANNIVWLLSNLGGQFGFWMGGSVLCLIEFGEIIIDFVWITIIKLVALAKSLRQRRAQASYAGPPPTVAELVEAHTNFGFQPDTAPRSPNTGPYPSEQALPIPGTPPPNYDSLRLQPLDVIESDSEGDAI

SEQ ID NO: 36704 - protein, 412 aa, Homo sapiens
LPLKVTGPLARNPTPPWTAAAALATRGQRPEKGLFPGPAPFSLGKRKRGRGRTWERRRRVSIETSTCFRPGCERLGAAAGANLSQLASSQRPLRERWVLYTIIMAAAGAPDGMEEPGMDTEAETVATEAPARPVNCLEAEAAAGAAAEDSGAARGSLQPAPAQPPGDPAAQASVSNGEDAGGGAGRELVDLKIIWNKTKHDVKFPLDSTGSELKQKIHSITGLPPAMQKVMYKGLVPEDKTLREIKVTSGAKIMVVGSTINDVLAVNTPKDAAQQDAKAEENKKEPLCRQKQHRKVLDKGKPEDVMPSVKGAQERLPTVPLSGMYNKSGGKVRLTFKLEQDQLWIGTKERTEKLPMGSIKNVVSEPIEGHEDYHMMAFQLGPTEASYYWVYWVPTQYVDAIKDTVLGKWQYF

SEQ ID NO: 36705 - protein, 1199 aa, Homo sapiens
VSAGLGSATAALFVLSPARWTSLPGSPSALKEKLAFLKREYSKTLARLQRAQRAEKIKHSIKKTVEEQDCLSQQDLSPQLKHSEPKNKICVYDKLHIKTHLDEETGEKTSITLDVGPESFNPGDGPGGLPIQRTDDTQEHFPHRVSDPSGEQKQKLPSRRKKQQKRTFISQERDCVFGTDSLRLSGKRLKEQEEISSKNPARSPVTEIRTHLLSLKSELPDSPEPVTEINEDSVLIPPTAQPEKGVDTFLRRPNFTRATTVPLQTLSDSGSSQHLEHIPPKGSSELTTHDLKNIRFTSPVSLEAQGKKMTVSTDNLLVNKAISKSGQLPTSSNLEANISCSLNELTYNNLPANENQNLKEQNQTEKSLKSPSDTLDGRNENLQESEILSQPKSLSLEATSPLSAEKHSCTVPEGLLFPAEYYVRTTRSMSNCQRKVAVEAVIQSHLDVKKKGFKNKNKDASKNLNLSNEETDQSEIRMSGTCTGQPSSRTSQKLLSLTKVSSPAGPTEDNDLSRKAVAQAPGRRYTGKRKSACTPASDHCEPLLPTSSLSIVNRSKEEVTSHKYQHEKLFIQVKGKKSRHQKEDSLSWSNSAYLSLDDDAFTAPFHRDGMLSLKQLLSFLSITDFQLPDEDFGPLKLEKVKSCSEKPVEPFESKMFGERHLKEGSCIFPEELSPKRMDTEMEDLEEDLIVLPGKSHPKRPNSQSQHTKTGLSSSILLYTPLNTVAPDDNDRPTTDMCSPAFPILGTTPAFGPQGSYEKASTEVAGRTCCTPQLAHLKDSVCLASDTKQFDSSGSPAKPHTTLQVSGRQGQPTCDCDSVPPGTPPPIESFTFKENQLCRNTCQELHKHSVEQTETAELPASDSINPGNLQLVSELKNPSGSCSVDVSAMFWERAGCKEPCIITACEDVVSLWKALDAWQWEKLYTWHFAEVPVLQIVPVPDVYNLVCVALGNLEIREIRALFCSSDDESEKQVLLKSGNIKAVLGLTKRRLVSSSGTLSDQQVEVMTFAEDGGGKENQFLMPPEETILTFAEVQGMQEALLGTTIMNNIVIWNLKTGQLLKKMHIDDSYQASVCHKAYSEMGLLFIVLSHPCAKESESLRSPVFQLIVINPKTTLSVGVMLYCLPPGQAGRFLEGDVKDHCAAAILTSGTIAIWDLLLGQCTALLPPVSDQHWSFVKWSGTDSHLLAGQKDGNIFVYHYS

SEQ ID NO: 36706 - protein, 43 aa, Homo sapiens
MPSFSAANTFGQLLQLLIILGKVFVTFQSPDSCCLLKLEGRGE

SEQ ID NO: 36707 - protein, 707 aa, Homo sapiens
VQQRPPPPAPPRPAARGPAAPGPAPLGLRLPARKMADPAAGPPPSEGEESTVRFARKGALRQKNVHEVKNHKFTARFFKQPTFCSHCTDFIWGFGKQGFQCQVCCFVVHKRCHEFVTFSCPGADKGPASDDPRSKHKFKIHTYSSPTFCDHCGSLLYGLIHQGMKCDTCMMNVHKRCVMNVPSLCGTDHTERRGRIYIQAHIDRDVLIVLVRDAKNLVPMDPNGLSDPYVKLKLIPDPKSESKQKTKTIKCSLNPEWNETFRFQLKESDKDRRLSVEIWDWDLTSRNDFMGSLSFGISELQKASVDGWFKLLSQEEGEYFNVPVPPEGSEANEELRQKFERAKISQGTKVPEEKTTNTVSKFDNNGNRDRMKLTDFNFLMVLGKGSFGKVMLSERKGTDELYAVKILKKDVVIQDDDVECTMVEKRVLALPGKPPFLTQLHSCFQTMDRLYFVMEYVNGGDLMYHIQQVGRFKEPHAVFYAAEIAIGLFFLQSKGIIYRDLKLDNVMLDSEGHIKIADFGMCKENIWDGVTTKTFCGTPDYIAPEIIAYQPYGKSVDWWAFGVLLYEMLAGQAPFEGEDEDELFQSIMEHNVAYPKSMSKEAVAICKGLMTKHPGKRLGCGPEGERDIKEHAFFRYIDWEKLERKEIQPPYKPKACGRNAENFDRFFTRHPPVLTPPDQEVIRNIDQSEFEGFSFVNSEFLKPEVKS

SEQ ID NO: 36708 - protein, 705 aa, Homo sapiens
VQQRPPPPAPPRPAARGPAAPGPAPLGLRLPARKMADPAAGPPPSEGEESTVRFARKGALRQKNVHEVKNHKFTARFFKQPTFCSHCTDFIWGFGKQGFQCQVCCFVVHKRCHEFVTFSCPGADKGPASDDPRSKHKFKIHTYSSPTFCDHCGSLLYGLIHQGMKCDTCMMNVHKRCVMNVPSLCGTDHTERRGRIYIQAHIDRDVLIVLVRDAKNLVPMDPNGLSDPYVKLKLIPDPKSESKQKTKTIKCSLNPEWNETFRFQLKESDKDRRLSVEIWDWDLTSRNDFMGSLSFGISELQKASVDGWFKLLSQEEGEYFNVPVPPEGSEANEELRQKFERAKISQGTKVPEEKTTNTVSKFDNNGNRDRMKLTDFNFLMVLGKGSFGKVMLSERKGTDELYAVKILKKDVVIQDDDVECTMVEKRVLALPGKPPFLTQLHSCFQTMDRLYFVMEYVNGGDLMYHIQQVGRFKEPHAVFYAAEIAIGLFFLQSKGIIYRDLKLDNVMLDSEGHIKIADFGMCKENIWDGVTTKTFCGTPDYIAPEIIAYQPYGKSVDWWAFGVLLYEMLAGQAPFEGEDEDELFQSIMEHNVAYPKSMSKEAVAICKGLMTKHPGKRLGCGPEGERDIKEHAFFRYIDWEKLERKEIQPPYKPKARDKRDTSNFDKEFTRQPVELTPTDKLFIMNLDQNEFAGFSYTNPEFVINV

SEQ ID NO: 36709 - protein, 73 aa, Homo sapiens
LSIWSPRSYGMLMLLFAVLFQDRLYFVMEYVNGGDLMYHIQQVGRFKEPHAVFYAAEIAIGLFFLQSKGIIYR

SEQ ID NO: 36710 - protein, 30 aa, Homo sapiens
LQFSRRVFLSLEIALALSFTQRLLRKKQPT

SEQ ID NO: 36711 - protein, 343 aa, Homo sapiens
LPAEVKTLLGILCFMCSMFRFSSWDCLTSNLTFTPLSPPKPKDPVSAAVPAPGRNNSQIASGQNQPQAAAGSHQLSMGQPHNAAGPSPHTLRRAVKKPAPAPPKPGNPPPGHPGGQSSSGTSQHPPSLSPKPPTRSPSPPTQHTGQPPGQPSAPSQLSAPRRYSSSLSPIQAPNHPPPQPPTQATPLMHTKPNSQGPPNPMALPSEHGLEQPSHTPPQTPTPPSTPPLGKQNPSLPAPQTLAGGNPETAQPHAGTLPRPRPVPKPRNRPSVPPPPQPPGVHSAGDSSLTNTAPTASKIVTDSNSRVSEPHRSIFPEMHSDSASKDVPGRILLDIDNDTESTAL

SEQ ID NO: 36712 - protein, 902 aa, Homo sapiens
LPGCPPPCPARAPRAAAATAAMKKQFNRMKQLANQTVGRAEKTEVLSEDLLQIERRLDTVRSICHHSHKRLVACFQGQHGTDAERRHKKLPLTALAQNMQEASTQLEDSLLGKMLETCGDAENQLALELSQHEVFVEKEIVDPLYGIAEVEIPNIQKQRKQLARLVLDWDSVRARWNQAHKSSGTNFQGLPSKIDTLKEEMDEAGNKVEQCKDQLAADMYNFMAKEGEYGKFFVTLLEAQADYHRKALAVLEKTLPEMRAHQDKWAEKPAFGTPLEEHLKRSGREIALPIEACVMLLLETGMKEEGLFRIGAGASKLKKLKAALDCSTSHLDEFYSDPHAVAGALKSYLRELPEPLMTFNLYEEWTQVASVQDQDKKLQDLWRTCQKLPPQNFVNFRYLIKFLAKLAQTSDVNKMTPSNIAIVLGPNLLWARNEGTLAEMAAATSVHVVAVIEPIIQHADWFFPEEVEFNVSEAFVPLTTPSSNHSFHTGNDSDSGTLERKRPASMAVMEGDLVKKESFGVKLMDFQAHRRGGTLNRKHISPAFQPPLPPTDGSTVVPAGPEPPPQSSRAESSSGGGTVPSSAGILEQGPSPGDGSPPKPKDPVSAAVPAPGRNNSQIASGQNQPQAAAGSHQLSMGQPHNAAGPSPHTLRRAVKKPAPAPPKPGNPPPGHPGGQSSSGTSQHPPSLSPKPPTRSPSPPTQHTGQPPGQPSAPSQLSAPRRYSSSLSPIQAPNHPPPQPPTQATPLMHTKPNSQGPPNPMALPSEHGLEQPSHTPPQTPTPPSTPPLGKQNPSLPAPQTLAGGNPETAQPHAGTLPRPRPVPKPRNRPSVPPPPQPPGVHSAGDSSLTNTAPTASKIVTDSNSRVSEPHRSIFPEMHSDSASKDVPGRILLDIDNDTESTAL

SEQ ID NO: 36713 - protein, 824 aa, Homo sapiens
LPGCPPPCPARAPRAAAATAAMKKQFNRMKQLANQTVGRAEKTEVLSEDLLQIERRLDTVRSICHHSHKRLVACFQGQHGTDAERRHKKLPLTALAQNMQEASTQLEDSLLGKMLETCGDAENQLALELSQHEVFVEKEIVDPLYGIAEVEIPNIQKQRKQLARLVLDWDSVRARWNQAHKSSGTNFQGLPSKIDTLKEEMDEAGNKVEQCKDQLAADMYNFMAKEGEYGKFFVTLLEAQADYHRKALAVLEKTLPEMRAHQDKWAEKPAFGTPLEEHLKRSGREIALPIEACVMLLLETGMKEEGLFRIGAGASKLKKLKAALDCSTSHLDEFYSDPHAVAGALKSYLRELPEPLMTFNLYEEWTQVASVQDQDKKLQDLWRTCQKLPPQNFVNFRYLIKFLAKLAQTSDVNKMTPSNIAIVLGPNLLWARNEGTLAEMAAATSVHVVAVIEPIIQHADWFFPEEVEFNVSEAFVPLTTPSSNHSFHTGNDSDSGTLERKRPASMAVMEGDLVKKESPPKPKDPVSAAVPAPGRNNSQIASGQNQPQAAAGSHQLSMGQPHNAAGPSPHTLRRAVKKPAPAPPKPGNPPPGHPGGQSSSGTSQHPPSLSPKPPTRSPSPPTQHTGQPPGQPSAPSQLSAPRRYSSSLSPIQAPNHPPPQPPTQATPLMHTKPNSQGPPNPMALPSEHGLEQPSHTPPQTPTPPSTPPLGKQNPSLPAPQTLAGGNPETAQPHAGTLPRPRPVPKPRNRPSVPPPPQPPGVHSAGDSSLTNTAPTASKIVTDSNSRVSEPHRSIFPEMHSDSASKDVPGRILLDIDNDTESTAL

SEQ ID NO: 36714 - protein, 131 aa, Homo sapiens
MSGGHSSPEPPRPWPLDRGSLPSPPAFPPGIATRATRAWAAPAKMLPCARSACRARDSGLASGTRAEVGGGPASEEYARRLAGCCPRLARPSLPTCEMHRTGLHLFNESFLSSCCEPGLEQAWVLWMGAGP

SEQ ID NO: 36715 - protein, 971 aa, Homo sapiens
LGCSMAVALDSQIDAPLEVEGCLIMKVEKDPEWASEPILEGSDSSETFRKCFRQFCYEDVTGPHEAFSKLWELCCRWLKPEMRSKEQILELLVIEQFLTILPEKIQAWAQKQCPQSGEEAVALVVHLEKETGRLRQQVSSPVHREKHSPLGAAWEVADFQPEQVETQPRAVSREEPGSLHSGHQEQLNRKRERRPLPKNARPSPWVPALADEWNTLDQEVTTTRLPAGSQEPVKDVHVARGFSYRKSVHQIPAQRDLYRDFRKENVGNVVSLGSAVSTSNKITRLEQRKEPWTLGLHSSNKRSILRSNYVKEKSVHAIQVPARSAGKTWREQQQWGLEDEKIAGVHWSYEETKTFLAILKESRFYETLQACPRNSQVYGAVAEWLRECGFLRTPEQCRTKFKSLQKSYRKVRNGHMLEPCAFFEDMDALLNPAARAPSTDKPKEMIPVPRLKRIAISAKEHISLVEEEEAAEDSDDDEIGIEFIRKSEIHGAPVLFQNLSGVHWGYEETKTFLDILRETRFYEALQACHRKSKLYGAVAEQLRECGFLRTPEQCRTKFKSLQKSYRKVKNGHVLESCAFYKEMDALINSRASAPSPSTPEEVPSPSRQERGGIEVEPQEPTGWEPEETSQEAVIEDSCSERMSEEEIVQEPEFQGPPGLLQSPNDFEIGSSIKEDPTQIVYKDMEQHRALIEKSKRVVSQSTDPSKYRKRECISGRQWENLQGIRQGKPMSQPRDLGKAVVHQRPFVGKRPYRLLKYGESFGRSTRLMCRMTHHKENPYKCGVCGKCFGRSRSLIRHQRIHTGEKPFKCLDCGKSFNDSSNFGAHQRIHTGEKPYRCGECGKCFSQSSSLIIHQRTHTGEKPYQCGECGKSFTNSSHFSAHRRVHTGENPYKCVDCEKSFNNCTRFREHRRIHTGEKPYGCAQCGKRFSKSSVLTKHREVHVREKPLPHPPSLYCPENPHKGKTDEFRKTF

SEQ ID NO: 36716 - protein, 509 aa, Homo sapiens
LGCSMAVALDSQIDAPLEVEGCLIMKVEKDPEWASEPILEGSDSSETFRKCFRQFCYEDVTGPHEAFSKLWELCCRWLKPEMRSKEQILELLVIEQFLTILPEKIQAWAQKQCPQSGEEAVALVVHLEKETGRLRQQVSSPVHREKHSPLGAAWEVADFQPEQVETQPRAVSREEPGSLHSGHQEQLNRKRERRPLPKNARPSPWVPALADEWNTLDQEVTTTRLPAGSQEPVKDVHVARGFSYRKSVHQIPAQRDLYRDFRKENVGNVVSLGSAVSTSNKITRLEQRKEPWTLGLHSSNKRSILRSNYVKEKSVHAIQVPARSAGKTWREQQQWGLEDEKIAGVHWSYEETKTFLAILKESRFYETLQACPRNSQVYGAVAEWLRECGFLRTPEQCRTKFKSLQKSYRKVRNGHMLEPCAFFEDMDALLNPAARAPSTDKPKEMIPVPRLKRIAISAKEHISLVEEEEAAEDSDDDEIGIEFIRKSEIHGAPVLFQNLSGKNCALFLW

SEQ ID NO: 36717 - protein, 236 aa, Homo sapiens
LGCSMAVALDSQIDAPLEVEGCLIMKVEKDPEWASEPILEGSDSSETFRKCFRQFCYEDVTGPHEAFSKLWELCCRWLKPEMRSKEQILELLVIEQFLTILPEKIQAWAQKQCPQSGEEAVALVVHLEKETGRLRQQVSSPVHREKHSPLGAAWEVADFQPEQVETQPRAVSREEPGSLHSGHQEQLNRKRERRPLPKNARPSPWVPALADEWNTLDQEVTTTRLPAGSQCHYRNQ

SEQ ID NO: 36718 - protein, 119 aa, Homo sapiens [sequence omitted]

SEQ ID NO: 36719 - protein, 493 aa, Homo sapiens
VRLRGFYTLLYVCPLLLGNQPLPLGRKAGWKRFRRQVPNMSREKCSPGEGAEEGRGSEASGLKASAGHGTEPAGGGPMAGDTHCPAEPLAREGTLWEALRALLPHSKEDLKLDLGEKVERSVVTLLQRATELFYEGRRDECLQSSEVILDYSWEKLNTGTWQDVDKDWRRVYAIGCLLKALCLCQAPEDANTVAAALRVCDMGLLMGAAILGDILLKVAAILQTHLPGKRPARGSLPEQPCTKKARADHGLIPDVKLEKTVPRLHRPSLQHFREQFLVPGRPVILKGVADHWPCMQKWSLEYIQEIAGCRTVPVEVGSRYTDEEWSQTLMTVNEFISKYIVNEPRDVGYLAQHQLFDQIPELKQDISIPDYCSLGDGEEEEITINAWFGPQGTISPLHQDPQQNFLVQVMGRKYIRLYSPQESGALYPHDTHLLHNTSQVDVENPDLEKFPKFAKAPFLSCILSPGEILFIPVKYWHYVRALDLSFSVSFWWS

SEQ ID NO: 36720 - protein, 288 aa, Homo sapiens
MQGSTRRMGVMTDVHRRFLQLLMTHGVLEEWDVKRLQTHCYKVHDRNATVDKLEDFINNINSVLESLYIEIKRGVTEDDGRPIYALVNLATTSISKMATDFAENELDLFRKALELIIDSETGFASSTNILNLVDQLKGKKMRKKEAEQVLQKFVQNKWLIEKEGEFTLHGRAILEMEQYIRETYPDAVKICNICHSLLIQVPAGQGTGAHHWALGSRGSVQVLPGILALGPALLHCWRILPQELAEAISQDVSGRLPAVPRRDALPPSSLVLLLGSKGPRLLYFSQEG

SEQ ID NO: 36721 - protein, 26 aa, Homo sapiens
LRPLPDILKRNLHFSKICRHVWAIAA

SEQ ID NO: 36722 - protein, 832 aa, Homo sapiens
LVPWHLPMGWLCSGLLFPVSCLVLLQVASSGNMKVLQEPTCVSDYMSISTCEWKMNGPTNCSTELRLLYQLVFLLSEAHTCIPENNGGAGCVCHLLMDDVVSADNYTLDLWAGQQLLWKGSFKPSEHVKPRAPGNLTVHTNVSDTLLLTWSNPYPPDNYLYNHLTYAVNIWSENDPADFRIYNVTYLEPSLRIAASTLKSGISYRARVRAWAQCYNTTWSEWSPSTKWHNSYREPFEQHLLLGVSVSCIVILAVCLLCYVSITKIKKEWWDQIPNPARSRLVAIIIQDAQGSQWEKRSRGQEPAKCPHWKNCLTKLLPCFLEHNMKRDEDPHKAAKEMPFQGSGKSAWCPVEISKTVLWPESISVVRCVELFEAPVECEEEEEVEEEKGSFCASPESSRDDFQEGREGIVARLTESLFLDLLGEENGGFCQQDMGESCLLPPSGSTSAHMPWDEFPSAGPKEAPPWGKEQPLHLEPSPPASPTQSPDNLTCTETPLVIAGNPAYRSFSNSLSQSPCPRELGPDPLLARHLEEVEPEMPCVPQLSEPTTVPQPEPETWEQILRRNVLQHGAAAAPVSAPTSGYQEFVHAVEQGGTQASAVVGLGPPGEAGYKAFSSLLASSAVSPEKCGFGASSGEEGYKPFQDLIPGCPGDPAPVPVPLFTFGLDREPPRSPQSSHLPSSSPEHLGLEPGEKVEDMPKPPLPQEQATDPLVDSLGSGIVYSALTCHLCGHLKQCHGQEDGGQTPVMASPCCGCCCGDRSSPPTTPLRAPDPSPGGVPLEASLCPASLAPSGISEKSKSSSSFHPAPGNAQSSSQTPKIVNFVSVGPTYMRVS

SEQ ID NO: 36723 - protein, 130 aa, Homo sapiens
VPWHLPMGWLCSGLLFPVSCLVLLQVASSGNMKVLQEPTCVSDYMSISTCEWKMNGPTNCSTELRLLYQLVFLLSEAHTCIPENNGGAGCVCHLLMDDVVSADNYTLDLWAGQQLLWKGSFKPSEHVQNL

SEQ ID NO: 36724 - protein, 216 aa, Homo sapiens
LPPGAAASCLADSHVCLGPPAPLAARSLKLSVKFPMSQTKPHLEASLGSQEAGIYPALQASPPQMRFSVVAPASAVHVLLRQLPLPPGPLPEPSWYIPICLMPSSGAPCSGKWLPGTEGAFHKCLKNKSTSRRGQCRCNLCVWCLQGLESLGCIRKRWLRKPRPVSLFSTPVVEEVEVPSSLDESPMAFYEPTLDCTLRLGRVFPHEVNWNKWIHL

SEQ ID NO: 36725 - protein, 310 aa, Homo sapiens
LCRLAAALFGFRGLLGLCNNFSYVVMLSAAHDILSHKRTSGNQSHVDPGPTPIPHNSSSRFDCNSVSTAPPGSRQWDLCCWKLRPGCLFSFCGDQPVCYFLLLTSPEAQDPGGEEEAESAARQPLIRTEAPESKPGSSSSLSLRERWTVFKGLLWYIVPLVVVYFAEYFINQGLFELLFFWNTSLSHAQQYRWYQMLYQAGVFASRSSLRCCRIRFTWALALLQCLNLVFLLADVWFGFLPSIYLVFLIILYEGLLGGAAYVNTFHNIALETSDEHREFAMAATCISDTLGISLSGLLALPLHDFLCQLS

SEQ ID NO: 36726 - protein, 188 aa, Homo sapiens
LCRLAAALFGFRGLLGLCNNFSYVVMLSAAHDILSHKRTSGNQSHVDPGPTPIPHNSSSRFDCNSVSTAPPGSRQWDLCCWKLRPGCLFSFCGDQPVCYFLLLTSPEAQDPGGEEEAESAARQPLIRTEAPESKPGSSSSLSLRERWTVFKVRMMAGVCPCGACSPPGPPLISSAFSRVCCGTLFPWS

SEQ ID NO: 36727 - protein, 102 aa, Homo sapiens
LCRLAAALFGFRGLLGLCNNFSYVVMLSAAHDILSHKRTSGNQSHVDPGPTPIPHNSSSRFDCNSVSTAPPGSRQWDLCCWKLRPGCLFSFCGDQPVWCGLR

SEQ ID NO: 36728 - protein, 124 aa, Homo sapiens
LLRILHTYYKFDYKAHQRQLTPPEGSSKSEQDQAENEGEDSAVLMERLCKYIYAKDRTDRIRTCAILCHIYHHALHSRWYQARDLMLMSHLQDNIQHADPPVQVGWGGLGGEGVPGPWPLGKLA

SEQ ID NO: 36729 - protein, 154 aa, Homo sapiens
LLKCFSFFPLLSPGTGMVVVCGCCLRVPLEKDNSEEFRQRELRAAQLAREIESSPQYRLRIAMENDDGRTEEEKHSAVQRQGSGRESPSLASREGKYIPLPQRVREGPRGGVRCSSSRGGRPGLSSLPPRGPHHLDNSSPGPGSEARGINGGEL

SEQ ID NO: 36730 - protein, 168 aa, Homo sapiens
LGAPESLTTMPPPRLLFFLLFLTPMEVRPEEPLVVKVEEGDNAVLQCLKGTSDGPTQQLTWSRESPLKPFLKLSLGLPGLGIHMRPLAIWLFIFNVSQQMGGFYLCQPGPPSEKAWQPGWTVNVEGSGEGRAGAGAGGEKGGHHGQKRSAATMELERGAGGIEGETRS

SEQ ID NO: 36731 - protein, 385 aa, Homo sapiens
LSLFISVFESLSLSLSWVSLHLVLGLFPGELFRWNVSDLGGLGCGLKNRSSEGPSSPSGKLMSPKLYVWAKDRPEIWEGEPPCLPPRDSLNQSLSQDLTMAPGSTLWLSCGVPPDSVSRGPLSWTHVHPKGPKSLLSLELKDDRPARDMWVMETGLLLPRATAQDAGKYYCHRGNLTMSFHLEITARPVLWHWLLRTGGWKVSAVTLAYLIFCLCSLVGILHLQRALVLRRKRKRMTDPTRRFFKVTPPPGSGPQNQYGNVLSLPTPTSGLGRAQRWAAGLGGTAPSYGNPSSDVQADGALGSRSPPGVGPEEEEGEGYEEPDSEEDSEFYENDSNLGQDQLSQDGSGYENPEDEPLGPEDEDSFSNGNLGPLWDLRDLGVIAAL

SEQ ID NO: 36732 - protein, 56 aa, Homo sapiens
LVSYVGVVALGGLWLRPQVMLSFAASVTWRCPFTPPLSPPSSFPHGNVCFMKLCTY

SEQ ID NO: 36733 - protein, 89 aa, Homo sapiens
LPIFSWSFLSFLVYSQELLVHSWAIADNSKNAYLGWVWRFTGNPSTLGGPGRRIAAAQEFETSLGNIARPRLYKKKLKRGLWEAKAGRS

SEQ ID NO: 36734 - protein, 64 aa, Homo sapiens
LSSLGFTAVAFVTGSLALWAPAFLLRSRVVLGETPPCLPGDSCSSSDRCPDGAMLGGLRVAGLE

SEQ ID NO: 36735 - protein, 96 aa, Homo sapiens
LENHVATDEDEPALKCQRLEINCQDPSIKSFLYSINQTICLRLDSIEAKLQALEATCKSLEEKLDLVTNKQHSPIQVPMVAGSPLRTTQMCNKVRW

SEQ ID NO: 36736 - protein, 102 aa, Homo sapiens
MFPSVKWGTGNPPILGHRVLEEQTGVGCALRNSAPREVARLSRSLTGVCVAQPGDPRRLLHSLGCFQAQQRWFLSFGLDEGGWLSGDHLSLSPPEAESKRLH

SEQ ID NO: 36737 - protein, 277 aa, Homo sapiens
VECRRERRWDRWVPGLEAGPEVGRCRGLHFSAEAGNEDPALGWDWRGPAAEALGCDRDITVLLLREMVLVVHGFPSSVAALRFEWAWQHPHASRRLAHVGPRLRGETAFAFHLRVLAHMLRAPPWARLPLTLRWVRPDLRQDLCLPPPPHVPLAFGPPPPQAPAPRRRAGPFDDAEPEPDQGDPGACCSLCAQTIQDEEGPLCCPHPGCLLRAHVICLAEEFLQEEPGQLLPLEGQCPCCEKSLLWGDLIWLCQMDTEKEVEDSELEEAHWTDLLET

SEQ ID NO: 36738 - protein, 54 aa, Homo sapiens
LWHLTLYLLPAPLLGSCEKSLLWGDLIWLCQMDTEKEVEDSELEEAHWTDLLET

SEQ ID NO: 36739 - protein, 99 aa, Homo sapiens
MGTGHILGAQGDRPEPRSPGQCSTLSRRASRFWLRAELPGEEEGSSELQKLEAESPVRSYYNYPGKKDSGLDGDVVLKVETSRGTWKCTSYSYQDLLLV

SEQ ID NO: 36740 - protein, 30 aa, Homo sapiens
VLMGFYLGASWLHWSGTGRSWRARDGTGAN

SEQ ID NO: 36741 - protein, 260 aa, Homo sapiens
LGPGWGGGVQGAGGAADAPGRRLRPRCGAGTALASPEQARGSKGGAAMPDENIFLFVPNLIGYARIVFAIISFYFMPCCPLTASSFYLLSGLLDAFDGHAARALNQGTRFGAMLDMLTDRCSTMCLLVNLALLYPGATLFFQISMSLDVASHWLHLHSSVVRGSESHKMIDLSGNPVLRIYYTSRPALFTLCAGNELFYCLLYLFHFSEGPLVGSVGLFRMGLWVTAPIALLKSLISVIHLITAARNMAALDAADRAKKK

SEQ ID NO: 36742 - protein, 215 aa, Homo sapiens
LGPGWGGGVQGAGGAADAPGRRLRPRCGAGTALASPEQARGSKGGAAMPDENIFLFVPNLIGTRFGAMLDMLTDRCSTMCLLVNLALLYPGATLFFQISMSLDVASHWLHLHSSVVRGSESHKMIDLSGNPVLRIYYTSRPALFTLCAGNELFYCLLYLFHFSEGPLVGSVGLFRMGLWVTAPIALLKSLISVIHLITAARNMAALDAADRAKKK

SEQ ID NO: 36743 - protein, 81 aa, Homo sapiens
LGPGWGGGVQGAGGAADAPGRRLRPRCGAGTALASPEQARGSKGGAAMPDENIFLFVPNLIGECCPRPRAEREGEGPWRAP

SEQ ID NO: 36744 - protein, 190 aa, Homo sapiens
LSPSDPGVRGAVRPDVLGVGPQSVAEDLQLRPLGPKFPGFAPPPFSDTRVTVLIVQISGTRVPTSLNLGLCFIEFQISGSGPCVHQYPGFIPRAFKYRIQSPSRSDIRGSDPTIRNPEFGSCRPRRGGGLDREVRLGCHPLPSRGGFPGPPLRKGESRGRGGKGKGLLAPLPAWQSRWRTPGGSGGAGAP

SEQ ID NO: 36745 - protein, 28 aa, Homo sapiens
LHLQQLLLHQPLQCLLLLGLQVAAARVS

SEQ ID NO: 36746 - protein, 500 aa, Homo sapiens
LPSTQAWELEVAAQGLAPCRAGLLAGWTAAPLEGQKREGLVLGQVPWLPFPSTRQRFYLKLGRGVALLTTHKCYRRSLALEYRVRRGASTTLRPRTLRYFRRSLAKDLFLLTTKGLRLDFQGRISSEAPELATTSTMPYQYPALTPEQKKELSDIAHRIVAPGKGILAADESTGSIAKRLQSIGTENTEENRRFYRQLLLTADDRVNPCIGGVILFHETLYQKADDGRPFPQVIKSKGGVVGIKVDKGVVPLAGTNGETTTQGLDGLSERCAQYKKDGADFAKWRCVLKIGEHTPSALAIMENANVLARYASICQQNGIVPIVEPEILPDGDHDLKRCQYVTEKVLAAVYKALSDHHIYLEGTLLKPNMVTPGHACTQKFSHEEIAMATVTALRRTVPPAVTGITFLSGGQSEEEASINLNAINKCPLLKPWALTFSYGRALQASALKAWGGKKENLKAAQEEYVKRALANSLACQGKYTPSGQAGAAASESLFVSNHAY

SEQ ID NO: 36747 - protein, 504 aa, Homo sapiens
LPSTQAWELEVAAQGLAPCRAGLLAGWTAAPLEGQKREGLVLGQVPWLPFPSTRQRFYLKLGRGVALLTTHKCYRRSLALEYRVRRGASTTLRPRTLRYFRRSLAKDLFLLTTKGLRLDFQGRISSEAPELATTSTMPYQYPALTPEQKKELSDIAHRIVAPGKGILAADESTGSIAKRLQSIGTENTEENRRFYRQLLLTADDRVNPCIGGVILFHETLYQKADDGRPFPQVIKSKGGVVGIKVDKGVVPLAGTNGETTTQGLDGLSERCAQYKKDGADFAKWRCVLKIGEHTPSALAIMENANVLARYASICQQVGLQNGIVPIVEPEILPDGDHDLKRCQYVTEKVLAAVYKALSDHHIYLEGTLLKPNMVTPGHACTQKFSHEEIAMATVTALRRTVPPAVTGITFLSGGQSEEEASINLNAINKCPLLKPWALTFSYGRALQASALKAWGGKKENLKAAQEEYVKRALANSLACQGKYTPSGQAGAAASESLFVSNHAY

SEQ ID NO: 36748 - protein, 154 aa, Homo sapiens
LTTKGLRLDFQGRISSEAPELATTSTMPYQYPALTPEQKKELSDIAHRIVAPGKGILAADESTGSIAKRLQSIGTENTEENRRFYRQLLLTADDRVNPCIGGVILFHETLYQKADDGRPFPQVIKSKGGVVGIKVRGGPPDVRFEMEVEEGNPG

SEQ ID NO: 36749 - protein, 392 aa, Homo sapiens
LKHRPPPSAAAPCTPAPLLCQELATTSTMPYQYPALTPEQKKELSDIAHRIVAPGKGILAADESTGSIAKRLQSIGTENTEENRRFYRQLLLTADDRVNPCIGGVILFHETLYQKADDGRPFPQVIKSKGGVVGIKVDKGVVPLAGTNGETTTQGLDGLSERCAQYKKDGADFAKWRCVLKIGEHTPSALAIMENANVLARYASICQQNGIVPIVEPEILPDGDHDLKRCQYVTEKVLAAVYKALSDHHIYLEGTLLKPNMVTPGHACTQKFSHEEIAMATVTALRRTVPPAVTGITFLSGGQSEEEASINLNAINKCPLLKPWALTFSYGRALQASALKAWGGKKENLKAAQEEYVKRALANSLACQGKYTPSGQAGAAASESLFVSNHAY

SEQ ID NO: 36750 - protein, 418 aa, Homo sapiens
VAGKGQGSLEKIGDTCGAGRSCLITSPGTPSSLAADQALPAPSASPQELATTSTMPYQYPALTPEQKKELSDIAHRIVAPGKGILAADESTGSIAKRLQSIGTENTEENRRFYRQLLLTADDRVNPCIGGVILFHETLYQKADDGRPFPQVIKSKGGVVGIKVDKGVVPLAGTNGETTTQGLDGLSERCAQYKKDGADFAKWRCVLKIGEHTPSALAIMENANVLARYASICQQNGIVPIVEPEILPDGDHDLKRCQYVTEKVLAAVYKALSDHHIYLEGTLLKPNMVTPGHACTQKFSHEEIAMATVTALRRTVPPAVTGITFLSGGQSEEEASINLNAINKCPLLKPWALTFSYGRALQASALKAWGGKKENLKAAQEEYVKRALANSLACQGKYTPSGQAGAAASESLFVSNHAY

SEQ ID NO: 36751 - protein, 91 aa, Homo sapiens
LNPLASPPPSAAAPCTPAPLLCQELATTSTMPYQYPALTPEQKKELSDIAHRIVAPGKGILAADESTGAGRRQNGWRVQGWEWQADPLIPM

SEQ ID NO: 36752 - protein, 153 aa, Homo sapiens
LNPLASPPPSAAAPCTPAPLLCQELATTSTMPYQYPALTPEQKKELSDIAHRIVAPGKGILAADESTGSIAKRLQSIGTENTEENRRFYRQLLLTADDRVNPCIGGVILFHETLYQKADDGRPFPQVIKSKGGVVGIKVRGGPPDVRRPPPPG

SEQ ID NO: 36753 - protein, 391 aa, Homo sapiens
LNPLASPPPSAAAPCTPAPLLCQELATTSTMPYQYPALTPEQKKELSDIAHRIVAPGKGILAADESTGSIAKRLQSIGTENTEENRRFYRQLLLTADDRVNPCIGGVILFHETLYQKADDGRPFPQVIKSKGGVVGIKVDKGVVPLAGTNGETTTQGLDGLSERCAQYKKDGADFAKWRCVLKIGEHTPSALAIMENANVLARYASICQQNGIVPIVEPEILPDGDHDLKRCQYVTEKVLAAVYKALSDHHIYLEGTLLKPNMVTPGHACTQKFSHEEIAMATVTALRRTVPPAVTGITFLSGGQSEEEASINLNAINKCPLLKPWALTFSYGRALQASALKAWGGKKENLKAAQEEYVKRALVRIGRRWAGCLGGWDSEKSPSHSTPLPA

SEQ ID NO: 36754 - protein, 398 aa, Homo sapiens
LNPLASPPPSAAAPCTPAPLLCQELATTSTMPYQYPALTPEQKKELSDIAHRIVAPGKGILAADESTGSIAKRLQSIGTENTEENRRFYRQLLLTADDRVNPCIGGVILFHETLYQKADDGRPFPQVIKSKGGVVGIKVDKGVVPLAGTNGETTTQGLDGLSERCAQYKKDGADFAKWRCVLKIGEHTPSALAIMENANVLARYASICQQVGLQNGIVPIVEPEILPDGDHDLKRCQYVTEKVLAAVYKALSDHHIYLEGTLLKPNMVTPGHACTQKFSHEEIAMATVTALRRTVPPAVTGITFLSGGQSEEEASINLNAINKCPLLKPWALTFSYGRALQASALKAWGGKKENLKAAQEEYVKRALANSLACQGKYTPSGQAGAAASESLFVSNHAY

SEQ ID NO: 36755 - protein, 76 aa, Homo sapiens
VLKIGEHTPSALAIMENANVLARYASICQQNGIVPIVEPEILPDGDHDLKRCQYVTEKVNGYLPDQCKVAGRGPWG

SEQ ID NO: 36756 - protein, 192 aa, Homo sapiens
VTLSLALQNGIVPIVEPEILPDGDHDLKRCQYVTEKVLAAVYKALSDHHIYLEGTLLKPNMVTPGHACTQKFSHEEIAMATVTALRRTVPPAVTGITFLSGGQSEEEASINLNAINKCPLLKPWALTFSYGRALQASALKAWGGKKENLKAAQEEYVKRALANSLACQGKYTPSGQAGAAASESLFVSNHAY

SEQ ID NO: 36757 - protein, 187 aa, Homo sapiens [sequence omitted]

SEQ ID NO: 36758 - protein, 44 aa, Homo sapiens
MWLQPGLAARERHWLPATRRELWTLRAPAEDGSSSCIYILLHAL

SEQ ID NO: 36759 - protein, 40 aa, Homo sapiens
MLGNLPKITQLEQAFESSQKYKEGKYIIELNHMIKDNGWD

SEQ ID NO: 36760 - protein, 381 aa, Homo sapiens
VEMAAAAAQGGGGGEPRRTEGVGPGVPGEVEMVKGQPFDVGPRYTQLQYIGEGAYGMVSSAYDHVRKTRVAIKKISPFEHQTYCQRTLREIQILLRFRHENVIGIRDILRASTLEAMRDVYIVQDLMETDLYKLLKSQQLSNDHICYFLYQILRGLKYIHSANVLHRDLKPSNLLINTTCDLKICDFGLARIADPEHDHTGFLTEYVATRWYRAPEIMLNSKGYTKSIDIWSVGCILAEMLSNRPIFPGKHYLDQLNHILGILGSPSQEDLNCIINMKARNYLQSLPSKTKVAWAKLFPKSDSKALDLLDRMLTFNPNKRITVEEALAHPYLEQYYDPTDEPVAEEPFTFAMELDDLPKERLKELIFQETARFQPGVLEAP

SEQ ID NO: 36761 - protein, 337 aa, Homo sapiens
VEMAAAAAQGGGGGEPRRTEGVGPGVPGEVEMVKGQPFDVGPRYTQLQYIGEGAYGMVSSAYDHVRKTRVAIKKISPFEHQTYCQRTLREIQILLRFRHENVIGIRDILRASTLEAMRDVYIVQDLMETDLYKLLKSQQLSNDHICYFLYQILRGLKYIHSANVLHRDLKPSNLLINTTCDLKICDFGLARIADPEHDHTGFLTEYVATRWYRAPEIMLNSKGYTKSIDIWSVGCILAEMLSNRPIFPGKHYLDQLNHILALDLLDRMLTFNPNKRITVEEALAHPYLEQYYDPTDEPVAEEPFTFAMELDDLPKERLKELIFQETARFQPGVLEAP

SEQ ID NO: 36762 - protein, 341 aa, Homo sapiens
VEMAAAAAQGGGGGEPRRTEGVGPGVPGEVEMVKGQPFDVGPRYTQLQYIGEGAYGMVSSAYDHVRKTRVAIKKISPFEHQTYCQRTLREIQILLRFRHENVIGIRDILRASTLEAMRDVYIVQDLMETDLYKLLKSQQLSNDHICYFLYQILRGLKYIHSANVLHRDLKPSNLLINTTCDLKICDFGLARIADPEHDHTGFLTEYVATRWYRAPEIMLNSKGYTKSIDIWSVGCILAEMLSNRPIFPGKHYLDQLNHILGILGSPSQEDLNCIINMKARNYLQSLPSKTKVAWAKLFPKSDSKALDLLDRMLTFNPNKRITWPRSPSPSPWSWMTYLRSG

SEQ ID NO: 36763 - protein, 318 aa, Homo sapiens
VEMAAAAAQGGGGGEPRRTEGVGPGVPGEVEMVKGQPFDVGPRYTQLQYIGEGAYGMVSSAYDHVRKTRVAIKKISPFEHQTYCQRTLREIQILLRFRHENVIGIRDILRASTLEAMRDVYIVQDLMETDLYKLLKSQQLSNDHICYFLYQILRGLKYIHSANVLHRDLKPSNLLINTTCDLKICDFGLARIADPEHDHTGFLTEYVATRWYRAPEIMLNSKGYTKSIDIWSVGCILAEMLSNRPIFPGKHYLDQLNHILGILGSPSQEDLNCIINMKARNYLQSLPSKTKVAWAKLFPKSDSKGSRDMRPLTCWTGC

SEQ ID NO: 36764 - protein, 94 aa, Homo sapiens [sequence omitted]

SEQ ID NO: 36765 - protein, 106 aa, Homo sapiens
VVVGVRAGPAPHMAVTQEALLKQLSPEEAISKPLLLPGASWDRLPGPSPFGRTHPCSPTTHTRSLGSCLHPPSPHTPVLAPGPVVPMEASLGEAGVGVPTLRAETD

SEQ ID NO: 36766 - protein, 195 aa, Homo sapiens
VIMVWDVGTGAAMLTLGPEVHPDTIYSVDWSRDGGLICTSCRDKRVRIIEPRKGTVVAEKDRPHEGTRPVRAVFVSEGKILTTGFSRMSERQVALWDTVSAGAGSRGPPGWEPRLEVSSLLCHSPGRMAMGLSLPRREMVVPTGWSGGPSQVTAQGRPPSQGLGCYLSPVSTEAPGGAAVPAGAGHQQRCPAALL

SEQ ID NO: 36767 - protein, 185 aa, Homo sapiens
VGSPKPTQPDCGPRSPSPSHRFYKLHERRCEPIAMTVPRKVMLPRPTLGSRLGTDFAVLWGVSWHKRFPHYPWPCPQSDLFQEDLYPPTAGPDPALTAEEWLGGRDAGPLLISLKDGYVPPKSRELRVNRGLDTGRRRAAPEASGTPSSVRGLGSQGIKLGGWGGAGVWGTSNSQHWESLWVREW

SEQ ID NO: 36768 - protein, 43 aa, Homo sapiens
LDPTVVGELSMCVALVGSVSYGGLGTGAAGHLGSQVRKGQMSN

SEQ ID NO: 36769 - protein, 199 aa, Homo sapiens
LLLRPHPSSLFLLFSASLLVPGADLRQVPPRLLQCRAGECLEAGCIRGCGVSSRLQAGPCLAPPWPSRLLPTGPASSPLMGAQLTWPSSHGLSHLQEAIQLDGEIFFALLRRASPLAHRHLRRQRIDPVLYMTEWFMCIFARTLPWASVLRVWDMFFCEGTSVALQAMRGWGFCGGYQGFCHISGGPWTKGTCWVEVSP

SEQ ID NO: 36770 - protein, 74 aa, Homo sapiens
VGGMSVAGGEIPRCRVDLPLAVLSKMDINRRRYPAHLARSSSRKYTELPHGAISEDQAVGPADIPCDSTGQTST

SEQ ID NO: 36771 - protein, 59 aa, Homo sapiens [sequence omitted]

SEQ ID NO: 36772 - protein, 136 aa, Homo sapiens
MKDSCITVMAMALLSGFFFFAPASSYNLDVRGARSFSPPRAGRHFGYRVLQVGNGVIVGAPGEGNSTGSLYQCQSGTGHCLPVTLRGSNYTSKYLGMTLATDPTDGSILDRGVPGGAGGPARCHQSAYHHHGWGGH

SEQ ID NO: 36773 - protein, 67 aa, Homo sapiens
MSFFLCVFQVFFKTRPQDSPDSIMSLGLVDCCRSLKEPCANARVTHLPTLNPRIDATEKYYFLHGMC

SEQ ID NO: 36774 - protein, 244 aa, Homo sapiens
LSISSEGVPSAWRGMPSSHDGLSGPRCDPCSLPGFPGPKPALISWMEQESEAWSPAAQDPEKGERLGGARRGDVPNRKEEEPEEVPRAKGPRKAPVKESPEVLVERNPDPAISVAPARAQPPKNAAWDPTTGAQPPAPIPSMDAQAGQRRHVCTDCGRRFTYPSLLVSHRRMHSGERPFPCPECGMRFKRKFAVEAHQWIHRSCSGGRRGRRPGIRAVPRAPVRGDRDPPVLFRHYPDIFEECG

SEQ ID NO: 36775 - protein, 46 aa, Homo sapiens
MALRSIKSIAGSCLCSRQRRCGSSAAIFPEGIFRCLSPKFGQEFPE

SEQ ID NO: 36776 - protein, 77 aa, Homo sapiens
LNHLVPGRGRPLGGDARREGASVGGTSRDWSEEGICLTVDPWGSTLSSEMLQLGPPLSERSFAALKLTGEGKASPGV

SEQ ID NO: 36777 - protein, 39 aa, Homo sapiens
LSLSLDLLGRLGSTKGKEPRASKDQVLSEPETKVGIQIG

SEQ ID NO: 36778 - protein, 1046 aa, Homo sapiens
LSPRGRRRLPGPWPWGKLGASRSGFKGEAVALSSLCSRQRRACDPGPADRPLRAPPPPDAALRAVAMETAAAAAPGPGWAAEGERRRRRCSRRDRDREQRRRRGPGGDAPRALLAAPRGSSSSSSPPPPARPWSSASSGERPGGPRRRRPRPRPRPPRPRARKRPAGSGSRGEEEEEEEEEGGADDGEAEEEPEEEEEEEEDLIDGFAIASFATLEALQKDASLQPPERLEHRLKHSGKRKRGGSSGATGEPGDSSDREPGRPPGDRARKWPNKRRRKEASSRHSLEAGYICDAESDLDERVSDDDLDPSFTVSTSKASGPHGAFNGNCEAKLSVVPKVSGLERSQEQPPGPDPLLVPFPPKEPPPPPVPRPPVSPPAPLPATPSLPPPPQPQLQLRVSPFGLRTSPYGSSLDLSTGSSSRPPPKAPAPPVAQPPPSSSSSSSSSSSASSSSAQLTHRPPTPSLPLPLSTHSFPPPGLRPPPPPHHPSLFSPGPTLPPPPPLLQVPGHPGASAANALSEQDLIGQDLNSRYLNAQGGPEVVGAGGSARPLAFQFHQHNHQHQHTHQHTHQHFTPYPPGLLPPHGPHMFEKYPGKMEGLFRHNPYTAFPPAVPGLPPGLPPAVSFGSLQGAFQPKSTNPELPPRLGPVPSGLSQKGTQIPDHFRPPLRKPGKWCAMHVRVAYMILRHQEKMKGDSHKLDFRNDLLPCLPGPYGALPPGQELSHPASLFTATGAVHAAANPFTAAPGAHGPFLSPSTHIDPFGRPTSFASLAALSNGAFGGLGSPTFNSGAVFAQKESPGAPPAFASPPDPWGRLHRSPLTFPAWVRPPEAARTPGSDKERPVERREPSITKEEKDRDLPFSRPQLRVSPATPKARAGEEGPRPTKESVRVKEERKEEAAAAAAAAAAAAAAAAAAATGPQGLHLLFERPRPPPFLGPSPPDRCAGFLEPTWLAAPPRLARPPRFYEAGEELTGPGAVAAARLYGLEPAHPLLYSRLAPPPPPAAAPGTPHLLSKTPPGALLGAPPPLVPAPRPSSPPRGPGPARADR

SEQ ID NO: 36779 - protein, 420 aa, Homo sapiens
LPPQAPASFRMTLDVGPEDELPDWAAAKEFYQKYDPKDVIGRGVSSVVRRCVHRATGHEFAVKIMEVTAERLSPEQLEEVREATRRETHILRQVAGHPHIITLIDSYESSSFMFLVFDLMRKGELFDYLTEKVALSEKETRSIMRSLLEAVSFLHANNIVHRDLKPENILLDDNMQIRLSDFGFSCHLEPGEKLRELCGTPGYLAPEILKCSMDETHPGYGKEVDLLFPSWACGVILFTLLAGSPPFWHRRQILMLRMIMEGQYQFSSPEWDDRSSTVKDLISRLLQVDPEARLTAEQALQHPFFERCEGSQPWNLTPRQRFRVAVWTVLAAGRVALSTHRVRPLTKNALLRDPYALRSVRHLIDNCAFRLYGHWVKKGEQQNRAALFQHRPPGPFPIMGPEEEGDSAAITEDEAVLVLG

SEQ ID NO: 36780 - protein, 923 aa, Homo sapiens
LESPLEKDPRVLGAQSVPRGRALKGLSPLGLDSAFRLFPDPRAGPWNTAVLSSGMEPETALWGPDLQGPEQSPNDAHRGAESENEEESPRQESSGEEIIMGDPAQSPESKDSTEMSLERSSQDPSVPQNPPTPLGHSNPLDHQIPLDPPAPEVVPTPSDWTKACEASWQWGALTTWNSPPVVPANEPSLRELVQGRPAGAEKPYICNECGKSFSQWSKLLRHQRIHTGERPNTCSECGKSFTQSSHLVQHQRTHTGEKPYKCPDCGKCFSWSSNLVQHQRTHTGEKPYKCTECEKAFTQSTNLIKHQRSHTGEKPYKCGECRRAFYRSSDLIQHQATHTGEKPYKCPECGKRFGQNHNLLKHQKIHAGEKPYRCTECGKSFIQSSELTQHQRTHTGEKPYECLECGKSFGHSSTLIKHQRTHLREDPFKCPVCGKTFTLSATLLRHQRTHTGERPYKCPECGKSFSVSSNLINHQRIHRGERPYICADCGKSFIMSSTLIRHQRIHTGEKPYKCSDCGKSFIRSSHLIQHRRTHTGEKPYKCPECGKSFSQSSNLITHVRTHMDENLFVCSDCGKAFLEAHELEQHRVIHERGKTPARRAQGDSLLGLGDPSLLTPPPGAKPHKCLVCGKGFNDEGIFMQHQRIHIGENPYKNADGLIAHAAPKPPQLRSPRLPFRGNSYPGAAEGRAEAPGQPLKPPEGQEGFSQRRGLLSSKTYICSHCGESFLDRSVLLQHQLTHGNEKPFLFPDYRIGLGEGAGPSPFLSGKPFKCPECKQSFGLSSELLLHQKVHAGGKSSQKSPELGKSSSVLLEHLRSPLGARPYRCSDCRASFLDRVALTRHQETHTQEKPPNPEDPPPEAVTLSTDQEGEGETPTPTESSSHGEGQNPKTLVEEKPYLCPECGAGFTEVAALLLHRSCHPGVSL

SEQ ID NO: 36781 - protein, 320 aa, Homo sapiens
LGSGRPRHRAAPGTGRGGARRQETGRGLAEALGTREGAANSRGDGRPRARRPGLARSLSPPDGRRPRRGLGPGPSPASMAGRTVRAETRSRAKDDIKKVMATIEKVRRWEKRWVTVGDTSLRIFKWVPVVDPQEEERRRAGGGAERSRGRERRGRGASPRGGGPLILLDLNDENSNQSFHSEGSLQKGTEPSPGGTPQPSRPVSPAGPPEGVPEEAQPPRLGQERDPGGITAGSTDEPPMLTKEEPVPELLEAEDSGVRMTRRALHEKGLKTEPLRRLLPRRGLRTNVRPSSMAVPDTRAPGGGSKAPRAPRTIPQGKGR

SEQ ID NO: 36782 - protein, 9 aa, Homo sapiens
LLLMWLKDG

SEQ ID NO: 36783 - protein, 391 aa, Homo sapiens
LARADTRTHSTHSVSRTPTAAHAAQDTDPVAHPAPTWSEHTASALPRASGRNSRSPSPTRASVPNSRSRRRAGGAERPGAPRGRARVGAGPAGLPGLGSGRPRHRAAPGTGRGGARRQETGRGLAEALGTREGAANSRGDGRPRARRPGLARSLSPPDGRRPRRGLGPGPSPASMAGRTVRAETRSRAKDDIKKVMATIEKVRRWEKRWVTVGDTSLRIFKWVPVVDPQEEERRRAGGGAERSRGRERRGRGASPRGGGPLILLDLNDENSNQSFHSEGSLQKGTEPSPGGTPQPSRPVSPAGPPEGVPEEAQPPRLGQERDPGGITAGSTDEPPMLTKEEPVPELLEAEAPEAYPVFEPVPPVPEAAQGDTEDSEGAPPLKRICPNAPDP

SEQ ID NO: 36784 - protein, 182 aa, Homo sapiens
LGSGRPRHRAAPGTGRGGARRQETGRGLAEALGTREGAANSRGDGRPRARRPGLARSLSPPDGRRPRRGLGPGPSPASMAGRTVRAETRSRAKDDIKKVMATIEKVRRWEKRWVTVGDTSLRIFKWVPVVDPQEEVPCKRAQSPVLGAPPSPAALCHLPDPQKGSLRRLSPHGWAKREIPGA

SEQ ID NO: 36785 - protein, 15 aa, Homo sapiens
VSFLCPLIPVLMAAW

SEQ ID NO: 36786 - protein, 108 aa, Homo sapiens
VGCPELGACLSLPRTPLCRTGSLPQVWPRPSCSHLGLLGRHQSRPQPPVPSSGRLDRTPIQPRCFRKSHGLGATGEGLKRGWGTTPPTWSGIGPTAAHLWASGGPGDL

SEQ ID NO: 36787 - protein, 361 aa, Homo sapiens
LGGPRGRRLPIDCGRCKGRSLWRLVGVLGSAGGGRGVSECERGTGIPNLRASRLWRRGGRAQAAMRDRTHELRQGDDSSDEEDKERVALVVHPGTARLGSPDEEFFHKVRTIRQTIVKLGNKVQELEKQQVTILATPLPEESMKQELQNLRDEIKQLGREIRLQLKAIEPQKEEADENYNSVNTRMRKTQHGVLSQQFVELINKCNSMQSEYREKNVERIRRQLKITNAGMVSDEELEQMLDSGQSEVFVSNILKDTQVTRQALNEISARHSEIQQLERSIRELHDIFTFLATEVEMQGEMINRIEKNILSSADYVERGQEHVKTALENQKKARKKKVLIAICVSITVVLLAVIIGVTVVG

SEQ ID NO: 36788 - protein, 111 aa, Homo sapiens
LSLIRPSVHSFVHLLILRSVLLATSSEATFSEAYNRGPALQGLPGWRGRRVQTVARSEELRVSATLGSSARFVGPTALQTPTNLRDPILLMRKLRSRAAWGPYLSTAIKYS

SEQ ID NO: 36789 - protein, 96 aa, Homo sapiens
MVSRHVAQAGLKQSVCLSLPKCWGDYRRCLRTRWASVLMLLSSLVSLAGSVYLAWILFFVLYDFCIVCITTYAINVSLMWLSFRKVQEPQGKAKRH

SEQ ID NO: 36790 - protein, 121 aa, Homo sapiens
LGAGLALRWATILLPHTLSPSWPDPTRAPGLAFALIPFCSQMTSITQNDIISTLQSLNMVKYWKGQHVICVTPKLVEEHLKSAQYKKPPITGGWGAAVCRGRWGSVSIWTGRSQGLLIAVT

SEQ ID NO: 36791 - protein, 112 aa, Homo sapiens
LGAGLALRWATILLPHTLSPSWPDPTRAPGLAFALIPFCSQMTSITQNDIISTLQSLNMVKYWKGQHVICVTPKLVEEHLKSAQYKKPPITVDSVCLKWAPPKHKQVKLSKK

SEQ ID NO: 36792 - protein, 533 aa, Homo sapiens
LPVRACADMASNDYTQQATQSYGAYPTQPGQGYSQQSSQPYGQQSYSGYSQSTDTSGYGQSSYSSYGQSQNSYGTQSTPQGYGSTGGYGSSQSSQSSYGQQSSYPGYGQQPAPSSTSGSYGSSSQSSSYGQPQSGSYSQQPSYGGQQQSYGQQQSYNPPQGYGQQNQYNSSSGGGGGGGGGGNYGQDQSSMSSGGGSGGGYGNQDQSGGGGSGGYGQQDRGGRGRGGSGGGGGGGGGGYNRSSGGYEPRGRGGGRGGRGGMGGSDRGGFNKFGGPRDQGSRHDSEQDNSDNNTIFVQGLGENVTIESVADYFKQIGIIKTNKKTGQPMINLYTDRETGKLKGEATVSFDDPPSAKAAIDWFDGKEFSGNPIKVSFATRRADFNRGGGNGRGGRGRGGPMGRGGYGGGGSGGGGRGGFPSGGGGGGGQQRAGDWKCPNPTCENMNFSWRNECNQCKAPKPDGPGGGPGGSHMGGNYGDDRRGGRGGYDRGGYRGRGGDRGGFRGGRGGGDRGGFGPGKMDSRGEHRQDRRERPY

SEQ ID NO: 36793 - protein, 1170 aa, Homo sapiens
VVPATPGSPPSRFWLLPAMALRVLLLTALTLCHGFNLDTENAMTFQENARGFGQSVVQLQGSRVVVGAPQEIVAANQRGSLYQCDYSTGSCEPIRLQVPVEAVNMSLGLSLAATTSPPQLLACGPTVHQTCSENTYVKGLCFLFGSNLRQQPQKFPEALRGCPQEDSDIAFLIDGSGSIIPHDFRRMKEFVSTVMEQLKKSKTLFSLMQYSEEFRIHFTFKEFQNNPNPRSLVKPITQLLGRTHTATGIRKVVRELFNITNGARKNAFKILVVITDGEKFGDPLGYEDVIPEADREGVIRYVIGVGDAFRSEKSRQELNTIASKPPRDHVFQVNNFEALKTIQNQLREKIFAIEGTQTGSSSSFEHEMSQEGFSAAITSNGPLLSTVGSYDWAGGVFLYTSKEKSTFINMTRVDSDMNDAYLGYAAAIILRNRVQSLVLGAPRYQHIGLVAMFRQNTGMWESNANVKGTQIGAYFGASLCSVDVDSNGSTDLVLIGAPHYYEQTRGGQVSVCPLPRGRARWQCDAVLYGEQGQPWGRFGAALTVLGDVNGDKLTDVAIGAPGEEDNRGAVYLFHGTSGSGISPSHSQRIAGSKLSPRLQYFGQSLSGGQDLTMDGLVDLTVGAQGHVLLLRSQPVLRVKAIMEFNPREVARNVFECNDQVVKGKEAGEVRVCLHVQKSTRDRLREGQIQSVVTYDLALDSGRPHSRAVFNETKNSTRRQTQVLGLTQTCETLKLQLPNCIEDPVSPIVLRLNFSLVGTPLSAFGNLRPVLAEDAQRLFTALFPFEKNCGNDNICQDDLSITFSFMSLDCLVVGGPREFNVTVTVRNDGEDSYRTQVTFFFPLDLSYRKVSTLQNQRSQRSWRLACESASSTEVSGALKSTSCSINHPIFPENSEVTFNITFDVDSKASLGNKLLLKANVTSENNMPRTNKTEFQLELPVKYAVYMVVTSHGVSTKYLNFTASENTSRVMQHQYQVSNLGQRSLPISLVFLVPVRLNQTVIWDRPQVTFSENLSSTCHTKERLPSHSDFLAELRKAPVVNCSIAVCQRIQCDIPFFGIQEEFNATLKGNLSFDWYIKTSHNHLLIVSTAEILFNDSVFTLLPGQGAFVRSQTETKVEPFEVPNPLPLIVGSSVGGLLLLALITAALYKLGFFKRQYKDMMSEGGPPGAEPQ

SEQ ID NO: 36794 - protein, 1171 aa, Homo sapiens
VVPATPGSPPSRFWLLPAMALRVLLLTALTLCHGFNLDTENAMTFQENARGFGQSVVQLQGSRVVVGAPQEIVAANQRGSLYQCDYSTGSCEPIRLQVPVEAVNMSLGLSLAATTSPPQLLACGPTVHQTCSENTYVKGLCFLFGSNLRQQPQKFPEALRGCPQEDSDIAFLIDGSGSIIPHDFRRMKEFVSTVMEQLKKSKTLFSLMQYSEEFRIHFTFKEFQNNPNPRSLVKPITQLLGRTHTATGIRKVVRELFNITNGARKNAFKILVVITDGEKFGDPLGYEDVIPEADREGVIRYVIGVGDAFRSEKSRQELNTIASKPPRDHVFQVNNFEALKTIQNQLREKIFAIEGTQTGSSSSFEHEMSQEGFSAAITSNGPLLSTVGSYDWAGGVFLYTSKEKSTFINMTRVDSDMNDAYLGYAAAIILRNRVQSLVLGAPRYQHIGLVAMFRQNTGMWESNANVKGTQIGAYFGASLCSVDVDSNGSTDLVLIGAPHYYEQTRGGQVSVCPLPRGQRARWQCDAVLYGEQGQPWGRFGAALTVLGDVNGDKLTDVAIGAPGEEDNRGAVYLFHGTSGSGISPSHSQRIAGSKLSPRLQYFGQSLSGGQDLTMDGLVDLTVGAQGHVLLLRSQPVLRVKAIMEFNPREVARNVFECNDQVVKGKEAGEVRVCLHVQKSTRDRLREGQIQSVVTYDLALDSGRPHSRAVFNETKNSTRRQTQVLGLTQTCETLKLQLPNCIEDPVSPIVLRLNFSLVGTPLSAFGNLRPVLAEDAQRLFTALFPFEKNCGNDNICQDDLSITFSFMSLDCLVVGGPREFNVTVTVRNDGEDSYRTQVTFFFPLDLSYRKVSTLQNQRSQRSWRLACESASSTEVSGALKSTSCSINHPIFPENSEVTFNITFDVDSKASLGNKLLLKANVTSENNMPRTNKTEFQLELPVKYAVYMVVTSHGVSTKYLNFTASENTSRVMQHQYQVSNLGQRSLPISLVFLVPVRLNQTVIWDRPQVTFSENLSSTCHTKERLPSHSDFLAELRKAPVVNCSIAVCQRIQCDIPFFGIQEEFNATLKGNLSFDWYIKTSHNHLLIVSTAEILFNDSVFTLLPGQGAFVRSQTETKVEPFEVPNPLPLIVGSSVGGLLLLALITAALYKLGFFKRQYKDMMSEGGPPGAEPQ

SEQ ID NO: 36795 - protein, 104 aa, Homo sapiens
LVKPITQLLGRTHTATGIRKVVRELFNITNGARKNAFKILVVITDGEKFGDPLGYEDVIPEADREGVIRYVIGVGNAALRLMLLWRVSMWIHPPFNLQILLKSK

SEQ ID NO: 36796 - protein, 58 aa, Homo sapiens
MMLTWIGAYFGASLCSVDVDSNGSTDLVLIGAPHYYEQTRGGQVSVCPLPRGDRSRVL

SEQ ID NO: 36797 - protein, 48 aa, Homo sapiens
MTRTRAALLLFTALATSLGFNLDTEELTAFRVDSAGFGDSVVQYANSW

SEQ ID NO: 36798 - protein, 132 aa, Homo sapiens
MTRTRAALLLFTALATSLGFNLDTEELTAFRVDSAGFGDSVVQYANSWVVVGAPQKITAANQTGGLYQCGYSTGACEPIGLQVPPEAVNMSLGLSLASTTSPSQLLVSGPGSQEASEGGREEPGPRGAGSLL

SEQ ID NO: 36799 - protein, 130 aa, Homo sapiens
LGRGLRTPGQDASSSQGPLRGPCFPTGPAAAGSSPRPLPGATRPAGFRSAVSLGGGSRGRGAPGSAARPSVMREVRGHGTSPERMMALGSEIFPSAGTGHGSEDQRIQEDGLSDGEHPGTCPRASRNTFR

SEQ ID NO: 36800 - protein, 595 aa, Homo sapiens
VRRLGGILPLVTILQCMKTDSIQNRTARALGNLAMEPESCGDIHCAGAVPLLVESLTACQDSQCLQSVALGLVPLLAGQLCGEAGEEEEEGREAASWDFPEERTPERAQGGSFRSLRSWLISEGYATGPDDISPDWSPEQCPPEPMEPASPAPTPTSLRAPRTQRTPGRSPAAAIEEPWGREGPALLLLSRFSQAPDPSGALVTGPALYGLLTYVTGAPGPPSPRALRILSRLTCNPACLEAFVRSYGAALLRAWLVLGVAPDDWPAPRARPTLHSRHRELGERLLQNLTVQAESPFGVGALTHLLLSGSPEDRVACALTLPFICRKPSLWRRLLLEQGGLRLLLAALTRPAPHPLFLFFAADSLSCLQDLVSPTVSPAVPQAVPMDLDSPSPCLYEPLLGPAPVPAPDLHFLLDSGLQLPAQRAASATASPFFRALLSGSFAEAQMDLVPLRGLSPGAAWPVLHHLHGCRGCGAALGPVPPPGQPLLGSEAEEALEAAGRFLLPGLEEELEEAVGRIHLGPQGGPESVGEVFRLGRPRLAAHCARWTLGSEQCPRKRGLALVGLVEAAGEEAGPLTEALLAVVMGIELGARVPA

SEQ ID NO: 36801 - protein, 457 aa, Homo sapiens
MVTAGLPAPGRPPPPAPTGHGPRPVRPAPPARAPPWRTWTGSGESSGASGDKDHLYSTVCKPRSPKPAAPAAPPFSSSSGVLGTGLCELDRLLQELNATQFNITDEIMSQFPSSKVASGEQKEDQSEDKKRPSLPSSPSPGLPKASATSATLELDRLMASLSDFRVQNHLPASGPTQPPVVSSTNEGSPSPPEPTGKGSLDTMLGLLQSDLSRRGVPTQAKGLCGSCNKPIAGQVVTALGRAWHPEHFVCGGCSTALGGSSFFEKDGAPFCPECYFERFSPRCGFCNQPIRHKMVTALGTHWHPEHFCCVSCGEPFGDEGFHEREGRPYCRRDFLQLFAPRCQGCQGPILDNYISALSALWHPDCFVCRECFAPFSGGSFFEHEGRPLCENHFHARRGSLCATCGLPVTGRCVSALGRRFHPDHFTCTFCLRPLTKGSFQERAGKPYCQPCFLKLFG

SEQ ID NO: 36802 - protein, 143 aa, Homo sapiens
LCGYLKLTPMFLMVMPGMISRILYPDEVACVVPEVCRRVCGTEVGCSNIAYPRLVVKLMPNGRLLGTHRGPADGPGTPDSRVLLRLGQLCAALGVPSFPLRRALPLLRHCAVLLLWPPHPHGLPVHRAHPQKAPPPPGLQSPA

SEQ ID NO: 36803 - protein, 126 aa, Homo sapiens
VAAAAAPQDPATKSRVGSGAPQAAAPAPAALVAGNPGGDGAPAATGTAAAASLATAADSEDAEKKVLATKVLGTVKWFNVRNGYGFINRNDTKEDLFIHQTAIKKNNPQKYLRSVGDGETVEFDVV

SEQ ID NO: 36804 - protein, 19 aa, Homo sapiens
LLDLCTLLFLLHSAASFAL

SEQ ID NO: 36805 - protein, 131 aa, Homo sapiens
MFKVPESPGTQQLQNGSHMGRHGSQGGIVMAISPSEETKLQMFMWSRIIFSLGFVISGHYKDFARDVAASIAFTNDLNGEHPHKAADMEGLYTLDTAEVDDRSYWVRFQSSSLASWSGTRSRVSSMAPLTL

SEQ ID NO: 36806 - protein, 250 aa, Homo sapiens
MCQGLLTFRDVAIEFSREEWEHLDSDQKLLYGDVMLENYGNLVSLGLAVSKPDLITFLEQRKEPWNVKSAETVAIQPDIFSHDTQGLLRKKLIEASFQKVILDGYGSCGPQNLNLRKEWESEGKCEGHNGYYDGHTKCKTTTYNKNLTVTGGQKHEKTQFMSVAFSKPCVSVSKCQHQFLKLTFSFKGNLDNPNSDLVHVSNNHLNQLKYRTGVNVQSNISEKERFKNEEVISKYDQFDGSLLKVCFTNK

SEQ ID NO: 36807 - protein, 543 aa, Homo sapiens
MCQGLLTFRDVAIEFSREEWEHLDSDQKLLYGDVMLENYGNLVSLGLAVSKPDLITFLEQRKEPWNVKSAETVAIQPDIFSHDTQGLLRKKLIEASFQKVILDGYGSCGPQNLNLRKEWESEEKNQYNKSDTTLSQGISPRRHQKTHFLHNHCKRKKCEKAFHECTNHVHQSIFIQEKSAKCNKCIETFIQSSKHTQPQRIHIGEKSHRCNNGEKILSKLSSLRKHKIIHNEEKPYKCKECDKAFNHRSHLTQHQIIHTGEKPYKCKECGKAFNSSSYFTRHQRIHTGEKLYKCKACSKCFTHSSNLLVHQRIHTGEKPYKCKECGKSFKVSSALTQHERIHTGEKPYKCKECSKAFNCRSYLTKHQRIHTGEKLYKCKSCSKSFSRSSSLIVHQRIHTGEKPYKCKECGKAFNCSSRLTQHQRIHTGEKPYICKECGKAFNCSSSLTKHQRIHTGVKLYKCKACSKSFSHSSCLSVHQITHTGMKPYICKDCGISFNRSSNLRRHQMIHTGEKPYKCKECGKLFNRCSTLTRHKSIHTREFL

SEQ ID NO: 36808 - protein, 21 aa, Homo sapiens
LQYGLGMVLFVLLWGIRGSLD

SEQ ID NO: 36809 - protein, 201 aa, Homo sapiens
MIPAMLSVLVKMMLAQTQESVFEKISLPGIWNEFFMLVKVAQEVGEVCRQLHAAMSQVLVKENIPYSWASLACVKAHHYAALAHYFTAILLIDHQGKKCLSQLYDHMPEGLTPLATLKNDQQRQQLGKSHLCRAMAHHEESVQEASLCKKLQSIEVLQKVLCAAQERSRLMYAQHQEDDDLLNLIDAPSVGPLSVFLANKQ

SEQ ID NO: 36810 - protein, 87 aa, Homo sapiens [sequence omitted]

SEQ ID NO: 36811 - protein, 614 aa, Homo sapiens
LLHKNCMLQEEIARLRLEIDALKNWNQQKEKNFLEDIKIAKEKNDFLQNALMLKEETFATMIFQDSIQPEVLKAENEMSSFKLKDKSQNQERLEREIESYRCRLAAALQDRDQSQASKRDVECDFQRTREEWFHLKEKMNFDMSNLKDKNELLSEKLSNAENKIRSLKMKWHQTKDALKEKTLVLEDVQRDLTQSQCRRKEIEQMFQNEEDKVSKYIQKQESLEERLSQIQNENLLLRQQLDEAYKKADNQEETIINIQEQFNAIVKNQAQSEEQSLLLEQKNNNLINKCDFIKKRLYKYEKEKAERNEIMRQLQQELADTVKKQPISEPPLEATPCYVNLDETQASKRKSDQIRSQADLTEAVETASSEGLHVNAEIEVLQQALLYMKTMQEKRETLQKDQEKLEEELVNLKSHMEMNMLECGQLEHYKQEVEERARQEIAEQLENIGLLLQSQKIAHDQLQLKEESNATMKSQMELRIKDLEFKLYKARTSQADCNTTELEKYKELYLEELKLRESLSDELNKRKEILADVSTKLLQEKEWSRSLFTSHTTRPVLESACNGNLNENLGLSRIHIPREALRIPTLNSLSSNIRMESDLSKEDKNGGHFLELQA

SEQ ID NO: 36812 - protein, 158 aa, Homo sapiens
LERKPSSKDMQVLWYKWSWIMPIIPALWEAVAGGLPEPRSLRLRLSGLSPFLGETDAETMNFIVNCSWDFDADTFEGLSEEAKDFVSRLLVKEKSCRMSATQCLKHEWLNNLPAKASRSKTRLKSQLLLQKYIAQRKWKKHFYVVTAANRLRKFPTSP

SEQ ID NO: 36813 - protein, 479 aa, Homo sapiens
VAAPRALGGGLCTATSRRTVRWVKVQPRPRFPLAVSLGLCRRRRRLWARLRSVCFATFSPSTARPAAMANVADTKLYDILGVPPGASENELKKAYRKLAKEYHPDKNPNAGDKFKEISFAYEVLSNPEKRELYDRYGEQGLREGSGGGGGMDDIFSHIFGGGLFGFMGNQSRSRNGRRRGEDMMHPLKVSLEDLYNGKTTKLQLSKNVLCSACSGQGGKSGAVQKCSACRGRGVRIMIRQLAPGMVQQMQSVCSDCNGEGEVINEKDRCKKCEGKKVIKEVKILEVHVDKGMKHGQRITFTGEADQAPGVEPGDIVLLLQEKEHEVFQRDGNDLHMTYKIGLVEALCGFQFTFKHLDGRQIVVKYPPGKVIEPGCVRVVRGEGMPQYRNPFEKGDLYIKFDVQFPENNWINPDKLSELEDLLPSRPEVPNIIGETEEVELQEFDSTRGSGGGQRREAYNDSSDEESSSHHGPGVQCAHQ

SEQ ID NO: 36814 - protein, 56 aa, Homo sapiens
LFLWGQALYIIAKLLADELISPKDIDPVQRYVPLKDQRNVSMRFSNQVDNVSLREV

SEQ ID NO: 36815 - protein, 22 aa, Homo sapiens
MLLIKQEKVLMIMPTIIVILTE

SEQ ID NO: 36816 - protein, 298 aa, Homo sapiens
MVIIIFLLPPYVFISEMSRQTATALPTGTSKCPPSQRVPALTGTTASNNDLASLFECPVCFDYVLPPILQCQSGHLVCSNCRPKLTCCPTCRGPLGSIRNLAMEKVANSVLFPCKYASSGCEITLPHTEKADHEELCEFRPYSCPCPGASCKWQGSLDAVMPHLMHQHKSITTLQGEDIVFLATDINLPGAVDWVMMQSCFGFHFMLVLEKQEKYDGHQQFFAIVQLIGTRKQAENFAYRLELNGHRRRLTWEATPRSIHEGIATAIMNSDCLVFDTSIAQLFAENGNLGINVTISMC

SEQ ID NO: 36817 - protein, 363 aa, Homo sapiens
VVFSGGARRARGRAKRRRRRRPGGSRGGRCGARSREAAAAQGVPSVSAPGRGGGAARGGGGWRRSALVPGPGSEARSPPTEMSRQTATALPTGTSKCPPSQRVPALTGTTASNNDLASLFECPVCFDYVLPPILQCQSGHLVCSNCRPKLTCCPTCRGPLGSIRNLAMEKVANSVLFPCKYASSGCEITLPHTEKADHEELCEFRPYSCPCPGASCKWQGSLDAVMPHLMHQHKSITTLQGEDIVFLATDINLPGAVDWVMMQSCFGFHFMLVLEKQEKYDGHQQFFAIVQLIGTRKQAENFAYRLELNGHRRRLTWEATPRSIHEGIATAIMNSDCLVFDTSIAQLFAENGNLGINVTISMC

SEQ ID NO: 36818 - protein, 14 aa, Homo sapiens
LVLLITCVSVLVSL

SEQ ID NO: 36819 - protein, 58 aa, Homo sapiens
LGGQTTERGGQQQAVEAAAPLTRVSLCCPGWSAMVRSRLIVTSALEFKQSSCLSLLSS

SEQ ID NO: 36820 - protein, 68 aa, Homo sapiens
VGCLGFFFFIFPFLFCYLRQSCSVTQTEVQWLNYVSLQPQTPGHKQSSHLSLPSSWDYRCTPPHQANF

SEQ ID NO: 36821 - protein, 47 aa, Homo sapiens
LGPRGWVTCVGSLFKMSPVLPKAELVFWEHHRSPLFWQRREHQCPPG

SEQ ID NO: 36822 - protein, 54 aa, Homo sapiens
LHTLLPLRLKFRILVTSALIFHLQHPQPWHPGWEGLHLSLPSFPVFKTFLEGDT

SEQ ID NO: 36823 - protein, 47 aa, Homo sapiens
LGRLLFPNLCCHLSQFGGNFPKDGEEGISTRRLTQPRTPGHQPGLRV

SEQ ID NO: 36824 - protein, 28 aa, Homo sapiens
LELEIFLFNLQMDLSEKTSEQPMETNMK

SEQ ID NO: 36825 - protein, 68 aa, Homo sapiens
VWTRKIKWMQLLQECLCYPKRNRCTKRRNEMLGDILSRKPANRLFPEDLLRLGQAAVYKSRTVLRFEL

SEQ ID NO: 36826 - protein, 16 aa, Homo sapiens
LSLLLFPRVLVICYSL

SEQ ID NO: 36827 - protein, 32 aa, Homo sapiens
VMRILTLTLISANWNSRARCKTQDMENQEKSP

SEQ ID NO: 36828 - protein, 299 aa, Homo sapiens
LFGIHVMNPFWSMSTSSVRKRSEGEEKTLTGDVKTSPPRTAPKKQLPSIPKNALPITKPTSPAPAAQSTNGTHASYGPFYLEYSLLAEFTLVVKQKLPGVYVQPSYRSALMWFGVIFIRHGLYQDGVFKFTVYIPDNYPDGDCPRLVFDIPVFHPLVDPTSGELDVKRAFAKWRRNHNHIWQVLMYARRVFYKIDTASPLNPEAAVLYEKDIQLFKSKVVDSVKVCTARLFDQPKIEDPYAISFSPWNPSVHDEAREKMLTQKKKPEEQHNKSVHVAGLSWVKPGSVQPFSKEEKTVAT

SEQ ID NO: 36829 - protein, 510 aa, Homo sapiens
VSPRCILGVVVFSTQRENSSRREQDAERTTCRRRGPGRGIYAACGGEGGFSGSMKRTPTAEEREREAKKLRLLEELEDTWLPYLTPKDDEFYQQWQLKYPKLILREASSVSEELHKEVQEAFLTLHKHGCLFRDLVRIQGKDLLTPVSRILIGNPGCTYKYLNTRLFTVPWPVKGSNIKHTEAEIAAACETFLKLNDYLQIETIQALEELAAKEKANEDAVPLCMSADFPRVGMGSSYNGQDEVDIKSRAAYNVTLLNFMDPQKMPYLKEEPYFGMGKMAVSWHHDENLVDRSAVAVYSYSCEGPEEESEDDSHLEGRDPDIWHVGFKISWDIETPGLAIPLHQGDCYFMLDDLNATHQHCVLAGSQPRFSSTHRVAECSTGTLDYILQRCQLALQNVCDDVDNDDVSLKSFEPAVLKQGEEIHNEVEFEWLRQFWFQGNRYRKCTDWWCQPMAQLEALWKKMEGVTNAVLHEVKREGLPVEQRNEILTAILASLTARQNLRREWHARVE

SEQ ID NO: 36830 - protein, 558 aa, Homo sapiens
VSPRCILGVVVFSTQRENSSRREQDAERTTCRRRGPGRGIYAACGGEGGFSGSMKRTPTAEEREREAKKLRLLEELEDTWLPYLTPKDDEFYQQWQLKYPKLILREASSVSEELHKEVQEAFLTLHKHGCLFRDLVRIQGKDLLTPVSRILIGNPGCTYKYLNTRLFTVPWPVKGSNIKHTEAEIAAACETFLKLNDYLQIETIQALEELAAKEKANEDAVPLCMSADFPRVGMGSSYNGQDEVDIKSRAAYNVTLLNFMDPQKMPYLKEEPYFGMGKMAVSWHHDENLVDRSAVAVYSYSCEGPEEESEDDSHLEGRDPDIWHVGFKISWDIETPGLAIPLHQGDCYFMLDDLNATHQHCVLAGSQPRFSSTHRVAECSTGTLDYILQRCQLALQNVCDDVDNDDVSLKSFEPAVLKQGEEIHNEVEFEWLRQFWFQGNRYRKCTDWWCQPMAQLEALWKKMEGVTNAVLHEVKREGLPVEQRNEILTAILASLTARQNLRREWHARCQSRIARTLPADQKPECRPYWEKDDASMPLPFDLTDIVSELRGQLLEAKP

SEQ ID NO: 36831 - protein, 570 aa, Homo sapiens
LTWLLAAALAAAVAAAEQINRRTRSTAQRGRQRGPKPGPAPDARRSPRAALSWAARGSAPLSVRAPRATMSFPQLGYQYIRPLYPSERPGAAGGSGGSAGARGGLGAGASELNASGSLSNVLSSVYGAPYAAAAAAAAAQGYGAFLPYAAELPIFPQLGAQYELKDSPGVQHPAAAAAFPHPHPAFYPYGQYQFGDPSRPKNATRESTSTLKAWLNEHRKNPYPTKGEKIMLAIITKMTLTQVSTWFANARRRLKKENKMTWAPRSRTDEEGNAYGSEREEEDEEEDEEDGKRELELEEEELGGEEEDTGGEGLADDDEDEEIDLENLDGAATEPELSLAGAARRDGDLGLGPISDSKNSDSEDSSEGLEDRPLPVLSLAPAPPPVAVASPSLPSPPVSLDPCAPAPAPASALQKPKIWSLAETATSPDNPRRSPPGAGGSPPGAAVAPSALQLSPAAAAAAAHRLVSAPLGKFPAWTNRPFPGPPPGPRLHPLSLLGSAPPHLLGLPGAAGHPAAAAAFARPAEPEGGTDRCSALEVEKKLLKTAFQPVPRRPQNHLDAALVLSALSSS

SEQ ID NO: 36832 - protein, 84 aa, Homo sapiens
MLAEIHPKAGLQSLQFIMELLYWLLEGGDSEDKEDATGNVEMKNIQPLVFEISCDVFQSRCKEHGKIKVLEWFKYVLGIPVYRL

SEQ ID NO: 36833 - protein, 41 aa, Homo sapiens
VVQKMKLTIPVFLFKSLQFIMELLYWLLEGGDSEDKEVKPV

SEQ ID NO: 36834 - protein, 67 aa, Homo sapiens
MLAEIHPKAGLQLPISFKNKFSGNISSSHGYQTFLVTEYTQSLQFIMELLYWLLEGGDSEDKEVKPV

SEQ ID NO: 36835 - protein, 169 aa, Homo sapiens
LFSPLAPNVRPLPRRARSRLSCPGLYLHGGPGRRGQICARGLSLRPPCPGPIAGQALGGSRASPAPAPSRSPSAQCPFPGGTVLSRPLYYTAPFYPGYTNYGSFGHLHGHPGPGPGPTTGPGSHFNGLNQTVLNRADALAKDPKMLRSQSQLDLCKDSPYELKKGMSDI

SEQ ID NO: 36836 - protein, 634 aa, Homo sapiens
MLLLSAPHVPRARREDSCWLTVWSWQYLNTFYGCPKESCNLFVLKDTLKKMQKFFGLPQTGDLDQNTIETMRKPRCGNPDVANYNFFPRKPKWDKNQITYRIIGYTPDLDPETVDDAFARAFQVWSDVTPLRFSRIHDGEADIMINFGRWEHGDGYPFDGKDGLLAHAFAPGTGVGGDSHFDDDELWTLGEGQVVRVKYGNADGEYCKFPFLFNGKEYNSCTDTGRSDGFLWCSTTYNFEKDGKYGFCPHEALFTMGGNAEGQPCKFPFRFQGTSYDSCTTEGRTDGYRWCGTTEDYDRDKKYGFCPETAMSTVGGNSEGAPCVFPFTFLGNKYESCTSAGRSDGKMWCATTANYDDDRKWGFCPDQGYSLFLVAAHEFGHAMGLEHSQDPGALMAPIYTYTKNFRLSQDDIKGIQELYGASPDIDLGTGPTPTLGPVTPEICKQDIVFDGIAQIRGEIFFFKDRFIWRTVTPRDKPMGPLLVATFWPELPEKIDAVYEAPQEEKAVFFAGNEYWIYSASTLERGYPKPLTSLGLPPDVQRVDAAFNWSKNKKTYIFAGDKFWRYNEVKKKMDPGFPKLIADAWNAIPDNLDAVVDLQGGGHSYFFKGAYYLKLENQSLKSVKFGSIKSDWLGC

SEQ ID NO: 36837 - protein, 87 aa, Homo sapiens
MSHSHPSLSPPPLALFTMGGNAEGQPCKFPFRFQGTSYDSCTTEGRTDGYRWCGTTEDYDRDKKYGFCPETGGCHSLSLPQGPAPAV

SEQ ID NO: 36838 - protein, 120 aa, Homo sapiens [sequence omitted]

SEQ ID NO: 36839 - protein, 104 aa, Homo sapiens
MWLPALVLATLAASAAWAGHLSSPPLVDTLHGKVLGKFVSLEGFAQPVAVFLGIPFAKPPLGPLRFTLPQPAEPWNFVKNATSYPPMFTQDPKAGQLISELFTN

SEQ ID NO: 36840 - protein, 223 aa, Homo sapiens
LSPFHDVAPCLYPGHSLCFRGLGCTQDPKAGQLLSELFTNRKENIPLKLSEDCLYLNIYTPADLTKKNRLPVMVWIHGGGLMVGAASTYDGLALAAHENVVVVTIQYRLGIWGFFSTGDEHSRGNWGHLDQVAALRWVQDNIASFGGNPGSVTIFGESAGGESVSVLVLSPLAKNLFHRAISESGVALTSVLVKKGDVKPLAEVGLRLVRLRLDTPTSLALCS

SEQ ID NO: 36841 - protein, 35 aa, Homo sapiens
MWLRAFILATLSASAAWGDGVDPRRGADGGCGINL

SEQ ID NO: 36842 - protein, 130 aa, Homo sapiens
LGGWGALQAGEPCQPSRAGCGREGATMGCTLSAEERAALERSKAIEKNLKEDGISAAKDVKLLLLGAGESGKSTIVKQMKIIHEDGFSGEDVKQYKPVVYSNTIQSLAAIVRAMDTLGIEYGDKERKVGP

SEQ ID NO: 36843 - protein, 380 aa, Homo sapiens
LGGWGALQAGEPCQPSRAGCGREGATMGCTLSAEERAALERSKAIEKNLKEDGISAAKDVKLLLLGAGESGKSTIVKQMKIIHEDGFSGEDVKQYKPVVYSNTIQSLAAIVRAMDTLGIEYGDKERKADAKMVCDVVSRMEDTEPFSAELLSAMMRLWGDSGIQECFNRSREYQLNDSAKYYLDSLDRIGAADYQPTEQDILRTRVKTTGIVETHFTFKNLHFRLFDVGGQRSERKKWIHCFEDVTAIIFCVALSGYDQVLHEDETTNRMHESLKLFDSICNNKWFTDTSIILFLNKKDIFEEKIKKSPLTICFPEYTGPSAFTEAVAYIQAQYESKNKSAHKEIYTHVTCATDTNNIQFVFDAVTDVIIAKNLRGCGLY

SEQ ID NO: 36844 - protein, 380 aa, Homo sapiens
LGGWGALQAGEPCQPSRAGCGREGATMGCTLSAEERAALERSKAIEKNLKEDGISAAKDVKLLLLGAGESGKSTIVKQMKIIHEDGFSGEDVKQYKPVVYSNTIQSLAAIVRAMDTLGIEYGDKERKADAKMVCDVVSRMEDTEPFSAELLSAMMRLWGDSGIQECFNRSREYQLNDSAKYYLDSLDRIGAADYQPTEQDILRTRVKTTGIVETHFTFKNLHFRLFDVGGQRSERKKWIHCFEDVTAIIFCVALSGYDQVLHEDETTNRMHESLMLFDSICNNKFFIDTSIILFLNKKDLFGEKIKKSPLTICFPEYTGPNTYEDAAAYIQAQFESKNRSPNKEIYCHMTCATDTNNIQVVFDAVTDIIIANNLRGCGLY

SEQ ID NO: 36845 - protein, 203 aa, Homo sapiens
LGPALFGRGQHPPTLPGPAPPRPACVWNETGPRPVCPCGSSRLRPGGLRPGGASSHIGGPSLCLSRCVIGRGGSGPWMLPPLTHPSTLLQNRMHESLKLFDSICNNKWFTDTSIILFLNKKDIFEEKIKKSPLTICFPEYTGPSAFTEAVAYIQAQYESKNKSAHKEIYTHVTCATDTNNIQFVFDAVTDVIIAKNLRGCGLY

SEQ ID NO: 36846 - protein, 16 aa, Homo sapiens
MEPYILIMLGLRILTQ

SEQ ID NO: 36847 - protein, 227 aa, Homo sapiens
LYLKNGGHFIVFIFKVVVWLGQNFLLPEDTHIQNAPFQVCFTSLRNGGHLHIKIKLSGEITINTDDIDLAGDIIQSMASFFAIEDLQVEADFPVYFEELRKVLVKVDEYHSVHQKLSADMADHSNLIRSLLVGAEDARLMRDMKTMKSRYMELYDLNRDLLNGYKIRCNNHTELLGNLKAVNQAIQRAGRLRVGKPKNQVITACRDAIRSNNINTLFKIMRVGTASS

SEQ ID NO: 36848 - protein, 119 aa, Homo sapiens
LYLKNGGHFIVFIFKVVVWLGQNFLLPEDTHIQNAPFQVCFTSLRNGGHLHIKIKLSGEITINTDDIDLAGDIIQSMASFFAIEDLQVEADFPVYFEELRKVLVKVRECGRCICENVVV

SEQ ID NO: 36849 - protein, 67 aa, Homo sapiens
LVILAVFSFCSVRGYLPGTAEMRGNLMDTSAEQDLIRELSQKKQNLLLELRNYEENAKVGVGPNVTR

SEQ ID NO: 36850 - protein, 49 aa, Homo sapiens
VCIREWSSSILSAGCCSCCPAECEKCAKDCVCKGGEAAEAEAEKCSCCQ

SEQ ID NO: 36851 - protein, 58 aa, Homo sapiens
LSFLLAGDSCTCAGSCKCKECKCTSCKKSCCSCCPVGCAKCAQGCICKGASDKCSCCA

SEQ ID NO: 36852 - protein, 64 aa, Homo sapiens
LLEMDPNCSCATGGSCTCAGSCKCKECKCTSCKKSCCSCCPVGCAKCAQGCVCKGASEKCSCCA

SEQ ID NO: 36853 - protein, 54 aa, Homo sapiens
LESPVSPRLAMDPNCSCAAGVSCTCAGSCKCKECKCTSCKKSECEAISMVWGCG

SEQ ID NO: 36854 - protein, 528 aa, Homo sapiens
LLPGRASCSVGAGRTYIYGLQAERLGPLTHHCLITMLAATVLTLALLGNAHACSKGTSHEAGIVCRITKPALLVLNHETAKVIQTAFQRASYPDITGEKAMMLLGQVKYGLHNIQISHLSIASSQVELVEAKSIDVSIQNVSVVFKGTLKYGYTTAWWLGIDQSIDFEIDSAIDLQINTQLTCDSGRVRTDAPDCYLSFHKLLLHLQGEREPGWIKQLFTNFISFTLKLVLKGQICKEINVISNIMADFVQTRAASILSDGDIGVDISLTGDPVITASYLESHHKGHFIYKNVSEDLPLPTFSPTLLGDSRMLYFWFSERVFHSLAKVAFQDGRLMLSLMGDEFKAVLETWGFNTNQEIFQEVVGGFPSQAQVTVHCLKMPKISCQNKGVVVNSSVMVKFLFPRPDQQHSVAYTFEEDIVTTVQASYSKKKLFLSLLDFQITPKTVSNLTESSSESVQSFLQSMITAVGIPEVMSRLEVVFTALMNSKGVSLFDIINPEIITRDGFLLLQMDFGFPEHLLVDFLQSLS

SEQ ID NO: 36855 - protein, 436 aa, Homo sapiens
LITMLAATVLTLALLGNAHACSKGTSHEAGIVCRITKPALLVLNHETAKVIQTAFQRASYPDITGEKAMMLLGQVKYGLHNIQISHLSIASSQVELVEAKSIDVSIQNVSVVFKGTLKYGYTTAWWLGIDQSIDFEIDSAIDLQINTQLTCDSGRVRTDAPDCYLSFHKLLLHLQGEREPGWIKQLFTNFISFTLKLVLKGQICKEINVISNIMADFVQTRAASILSDGDIGVDISLTGDPVITASYLESHHKAVLETWGFNTNQEIFQEVVGGFPSQAQVTVHCLKMPKISCQNKGVVVNSSVMVKFLFPRPDQQHSVAYTFEEDIVTTVQASYSKKKLFLSLLDFQITPKTVSNLTESSSESVQSFLQSMITAVGIPEVMSRLEVVFTALMNSKGVSLFDIINPEIITRDGFLLLQMDFGFPEHLLVDFLQSLS

SEQ ID NO: 36856 - protein, 10 aa, Homo sapiens
VSPPAWWKLG

SEQ ID NO: 36857 - protein, 615 aa, Homo sapiens
LGAHASGPWPRGQRPEPVPRPRARPSRSSSRGCPGGSERGQRQPCGEGGGARGTCDCQELLPPPPAPMAHIPSGGAPAAGAAPMGPQYCVCKVELSVSGQNLLDRDVTSKSDPFCVLFTENNGRWIEYDRTETAINNLNPAFSKKFVLDYHFEEVQKLKFALFDQDKSSMRLDEHDFLGQFSCSLGTIVSSKKITRPLLLLNDKPAGKGLITIAAQELSDNRVITLSLAGRRLDKKDLFGKSDPFLEFYKPGDDGKWMLVHRTEVIKYTLDPVWKPFTVPLVSLCDGDMEKPIQVMCYDYDNDGGHDFIGEFQTSVSQMCEARDSVPLEFECINPKKQRKKKNYKNSGIIILRSCKINRDYSFLDYILGGCQLMFTVGIDFTASNGNPLDPSSLHYINPMGTNEYLSAIWAVGQIIQDYDSDKMFPALGFGAQLPPDWKVSHEFAINFNPTNPFCSGVDGIAQAYSACLPHIRFYGPTNFSPIVNHVARFAAQATQQRTATQYFILLIITDGVISDMEETRHAVVQASKLPMSIIIVGVGNADFAAMEFLDGDSRMLRSHTGEEAARDIVQFVPFREFRNAAKETLAKAVLAELPQQVVQYFKHKNLPPTNSEPA

SEQ ID NO: 36858 - protein, 53 aa, Homo sapiens
LPKGLGFIAFCFFFSRQHKEVRAVIGQVLFKHSIVNECVVWFYCIVEHAGEEN

SEQ ID NO: 36859 - protein, 68 aa, Homo sapiens
LPASCVQHDIFNQSNLKMCQNPPVARIVFGSSFYSTADDQTCPAATFLTDIGRRARPSRSSTKNAPGE

SEQ ID NO: 36860 - protein, 40 aa, Homo sapiens
LIMLGISSATFFGIQLLKTNRMQIPQLQVMKTVLGKLKTT

SEQ ID NO: 36861 - protein, 117 aa, Homo sapiens
MIVFGWAVFLASRSLGQGLLLTLEEHIAHFLGTGGAATTMGNSCICRDDSGTDDSVDTQQQQAENSAVPTADTRSQPRDPVRPPRRGRGPHEPRRKKQNVDGLVLDTLAVIRTLVDK

SEQ ID NO: 36862 - protein, 283 aa, Homo sapiens [sequence omitted]

SEQ ID NO: 36863 - protein, 105 aa, Homo sapiens
LQTPGLRHTGQSMDRLQTALLVVLVLLAVALQATEAGPYGANMEDSVCCRDYVRYRLPLRVVKHFYWTSDSCPRPGVVLLTFRDKEICADPRVPWVKMILNKLSQ

SEQ ID NO: 36864 - protein, 151 aa, Homo sapiens
LFFILILLELKLSRRKFAGDYRGREKVEIQCKQLQMFISNSWVYLSCPGVSLWFHVTLSYCLPLPPHSAPTLFIPSISNPPPYSSCSRNFKCLFPPRQDDSVPFSNCSRAHSGSQQQNKGSSIQQTPPSLESSCTYIFFKKFIAGHSGLHL

SEQ ID NO: 36865 - protein, 193 aa, Homo sapiens
VPASKMAAAAVSGALGRAGWRLLQLRCLPVARCRQALVPRAFHASAVGLRSSDEQKQQPPNSFSQQHSETQGAEKPDPESSHSPPRYTDQGGEEEEDYESEEQLQHRILTAALEFVPAHGWTAEAIAEGAQSLGLSSAAASMFGKDGSELILHFVTQCNTRLTRVLEEEQKLVQLGQAEPSASSCSLTTSRPA

SEQ ID NO: 36866 - protein, 107 aa, Homo sapiens
LPQELEAEEWYKTLSVECLGSRLNDISLGEPDLLAPGVQCEQTDRFNVFLLPCPNLDVYGECKLQITHENIYLWDIHNPRVKLVSWPLCSLRRYGRDATRFTFEAGR

SEQ ID NO: 36867 - protein, 47 aa, Homo sapiens
MDHCGALFLCLCLLTLQNATTETWEELLSYMENMQVSRGRSSVFSSR

SEQ ID NO: 36868 - protein, 451 aa, Homo sapiens
MDHCGALFLCLCLLTLQNATTETWEELLSYMENMQVSRGRSSVFSSRQLHQLEQMLLNTSFPGYNLTLQTPTIQSLAFKLSCDFSGLSLTSATLKRVPQAGGQHARGQHAMQFPAELTRDACKTRPRELRLICIYFSNTHFFKDENNSSLLNNYVLGAQLSHGHVNNLRDPVNISFWHNQSLEGYTLTCVFWKEGARKQPWGGWSPEGCRTEQPSHSQVLCRCNHLTYFAVLMQLSPALVPAELLAPLTYISLVGCSISIVASLITVLLHFHFRKQSDSLTRIHMNLHASVLLLNIAFLLSPAFAMSPVPGSACTALAAALHYALLSCLTWMAIEGFNLYLLLGRVYNIYIRRYVFKLGVLGWDAGCGAPWCTVSWSWATAASRPSSTWWCWPGRCGPCAGCGSGRMHQVSGPAMTLSLCWASPCCWEPPGPWPSFLLASSCCPSCSSSPS

SEQ ID NO: 36869 - protein, 81 aa, Homo sapiens
LSPLFEAPVREQWLGWPSFKVSVLLKKGGRGTLTHQPRRLLPANKNPSSATHVLNVSIVCLMPQRSPDRVSLCHTGWSAVV

SEQ ID NO: 36870 - protein, 214 aa, Homo sapiens
MTPQSLLQTTLFLLSLLFLVQGAHGRGHREDFRFCSQRNQTHRSSLHYKPTPDLRISIENSEEALTVHAPFPAAHPASRSFPDPRGLYHFCLYWNRHAGRLHLLYGKRDFLLSDKASSLLCFQHQEESLAQGPPLLATSVTSWWSPQNISLPSAASFTFSFHSPPHTAAHNASVDMCELKRDLQLLSQFLKHPQKASRRPSAAPASHCRAWSRN

SEQ ID NO: 36871 - protein, 73 aa, Homo sapiens
MATPRGLGALLLLLLLPTSGQEKPTEGPRNTCLGSNNMYDIFNLNDKALCFTKCRQSGSDSCNVENLQRFRGR

SEQ ID NO: 36872 - protein, 175 aa, Homo sapiens [sequence omitted]

SEQ ID NO: 36873 - protein, 281 aa, Homo sapiens
LTLPVKKKKIKREVKILENLRGGTNIIKLIDTVKDPVSKTPALVFEYINNTDFKQLYQILTDFDIRFYMYELLKALDYCHSKGIMHRDVKPHNVMIDHQQKKLRLIDWGLAEFYHPAQEYNVRVASRYFKGPELLVDYQMYDYSLDMWSLGCMLASMIFRREPFFHGQDNYDQLVRIAKVLGTEELYGYLKKYHIDLDPHFNDILGQHSRKRWENFIHSENRHLVSPEALDLLDKLLRYDHQQRLTAKEAMEHPYFYPVVKEQSQPCADNAVLSSGLTAAR

SEQ ID NO: 36874 - protein, 399 aa, Homo sapiens
LARPPAAALLLLLLQRPAARCLLRPTPRVPRRAAAATLCAPRRPPVPPAMPGPAAGSRARVYAEVNSLRSREYWDYEAHVPSWGNQDDYQLVRKLGRGKYSEVFEAINITNNERVVVKILKPVKKKKIKREVKILENLRGGTNIIKLIDTVKDPVSKTPALVFEYINNTDFKQLYQILTDFDIRFYMYELLKALDYCHSKGIMHRDVKPHNVMIDHQQKKLRLIDWGLAEFYHPAQEYNVRVASRYFKGPELLVDYQMYDYSLDMWSLGCMLASMIFRREPFFHGQDNYDQLVRIAKVLGTEELYGYLKKYHIDLDPHFNDILGQHSRKRWENFIHSENRHLVSPEALDLLDKLLRYDHQQRLTAKEAMEHPYFYPVVKEQSQPCADNAVLSSGLTAAR

SEQ ID NO: 36875 - protein, 392 aa, Homo sapiens
LDPSDSGLCLSFLVEAGSLPRQDAGVLGWGLTGTRLRHLIPQRSQERRLPRVSSTVSPLQEHDIETPYGLLHVVIRGSPKGNRPAILTYHDVGLNHKLCFNTFFNFEDMQEITKHFVVCHVDAPGQQVGASQFPQGYQFPSMEQLAAMLPSVVQHFGFKYVIGIGVGAGAYVLAKFALIFPDLVEGLVLVNIDPNGKGWIDWAATKLSGLTSTLPDTVLSHLFSQEELVNNTELVQSYRQQIGNVVNQANLQLFWNMYNSRRDLDINRPGTVPNAKTLRCPVMLVVGDNAPAEDGVVECNSKLDPTTTTFLKMADSGGLPQVTQPGKLTEAFKYFLQGMGYMPSASMTRLARSRTASLTSASSVDGSRPQACTHSESSEGLGQVNHTMEVSC

SEQ ID NO: 36876 - protein, 194 aa, Homo sapiens
LHFKNILRADSVERACVCVCVCVCVCVGVETMIEILNKSKNCEGFSERRTGRGIWTWVCMHRPGCSRVADQQHLEDFTECFCHLHPSWPRPALFPLLLQLIFPDLVEGLVLVNIDPNGKGWIDWAATKLSGLTSTLPDTVLSHLFSQEELVNNTELVQSYRQQIGNVVNQANLQLFWNMYNSHFPGALWAQLVL

SEQ ID NO: 36877 - protein, 231 aa, Homo sapiens
VEIIFMGLARERHGPSFSLSPQNCLRMVATQPIPKGHEIFNTYGQMANWQLIHMYGFVEPYPDNTDDTADIQMVTVREAALQGTKTEAERHLVYERWDFLCKLEMVGEEGAFVIGREEVLTEEELTTTLKVLCMPAEEFRELKDQDGGGDDKREEGSLTITNIPKLKASWRQLLQNSVLLTLQTYATDLKTDQGLLSNKEVYAKLSWREQQALQVRYGQKMILHQLLELTS

SEQ ID NO: 36878 - protein, 19 aa, Homo sapiens
MVILRRARPPASAPTSNES

SEQ ID NO: 36879 - protein, 94 aa, Homo sapiens
VSARPLLRPAAAHCPPTVHHGPAALRPRPPRDRRRLPPGPRRRGLCQSQAEAQIAAKNLDKEYLPIGGLAEFCKASAELALGENSEVLKSGRVS

SEQ ID NO: 36880 - protein, 159 aa, Homo sapiens
LSLPSAGAGSLCVCPLALCSVLRLPTALLRSTMALLHSGRVLPGIAAAFHPGLAAAASARASSWWTHVEMGPPDPILGVTEAFKRDTNSKKMNLGVGAYRDDNGKPYVLPSVRKAEAQIAAKNLDKEYLPIGGLAEFCKASAELALGENSEVLKSGRVS

SEQ ID NO: 36881 - protein, 15 aa, Homo sapiens
VAEEETPVKKKKKKR

SEQ ID NO: 36882 - protein, 19 aa, Homo sapiens
VTNQMGGVCYRNWQQVSNG

SEQ ID NO: 36883 - protein, 51 aa, Homo sapiens
MGPGLGPGLTPQRLPCARDWRLGGCVHPQGPQKSLCFQLSGPVTFLRVVIC

SEQ ID NO: 36884 - protein, 390 aa, Homo sapiens
LFSSESASDGLRYSIRRTSDKGQFFRVTKKGDIYNEKELDREVYPWYNLTVEAKELDSTGTPTGKESIVQVHIEVLDENDNAPEFAKPYQPKVCENAVHGQLVLQISAIDKDITPRNVKFKFILNTENNFTLTDNHDNTANITVKYGQFDREHTKVHFLPVVISDNGMPSRTGTSTLTVAVCKCNEQGEFTFCEDMAAQVGVSIQAVVAILLCILTITVITLLIFLRRRLRKQARAHGKSVPEIHEQLVTYDEEGGGEMDTTSYDVSVLNSVRRGGAKPPRPALDARPSLYAQVQKPPRHAPGAHGGPGEMAAMIEVKKDEADHDGDGPPYDTLHIYGYEGSESIAESLSSLGTDSSDSDVDYDFLNDWGPRFKMLAELYGSDPREELLY

SEQ ID NO: 36885 - protein, 36 aa, Homo sapiens
LEKLAPRRALCLASLIFLMVSSPLLVSLSCVSGPRG

SEQ ID NO: 36886 - protein, 188 aa, Homo sapiens
LERSVGSGSQAALGTTCSKSVLSLRAGIQPTPHLPCQGPQAASTSPKATGLGKADVLLGWLPGTSDSRKGDLLFPTLLRNHLILPQMNHLPEPQILLQEYGGHLVMGTILFSSFLPTLNTLRLNCRFSVILPSQVKAMKETSLLHQPKHLPICWLHEPQVGGVCVKKQHAHACAHTCTHTPLYFRDVC

SEQ ID NO: 36887 - protein, 56 aa, Homo sapiens
VPESGGADPGVGTMAAAQDPCAWPRLCPRERYWGPRICVVGQTVTVGCLQSQQLQN

SEQ ID NO: 36888 - protein, 32 aa, Homo sapiens
MSDPLLRITLGLWGMWLFCGRQAHLGFLWRGR

SEQ ID NO: 36889 - protein, 20 aa, Homo sapiens
VRGLLIRILVLSVSVCEWIP

SEQ ID NO: 36890 - protein, 48 aa, Homo sapiens
LLGPGNMMVAGAEGAEKGPRRRWVVRASSGLKRRGQNQVSGGTKGGRR

SEQ ID NO: 36891 - protein, 80 aa, Homo sapiens
LLGPGNMMVAGAEGAEKGPRRRWVVRASSGLKRRGQNQVSGGTKGGRRPGSTASPQLGPAGAREMFVKWINDHGRGLRGR

SEQ ID NO: 36892 - protein, 691 aa, Homo sapiens
LGDPERAHPQRSPPGVSNSSLLPPPIDPPARSSGLWTRTGLKRGFPGSRKGCRNGTAPSEDAKGARAKESGRARACLPLDPHPPMTAQSRSPTTPTFPGPSQRTPLTPCPVQTPRLGKALIHCWTDPGQPLGEQQRVRRQRTETSEPTMRLHRLRARLSAVACGLLLLLVRGQGQDSASPIRTTHTGQVLGSLVHVKGANAGVQTFLGIPFAKPPLGPLRFAPPEPPESWSGVRDGTTHPAMCLQDLTAVESEFLSQFNMTFPSDSMSEDCLYLSIYTPAHSHEGSNLPVMVWIHGGALVFGMASLYDGSMLAALENVVVVIIQYRLGVLGFFSTGDKHATGNWGYLDQVAALRWVQQNIAHFGGNPDRVTIFGESAGGTSVSSLVVSPISQGLFHGAIMESGVALLPGLIASSADVISTVVANLSACDQVDSEALVGCLRGKSKEEILAINKPFKMIPGVVDGVFLPRHPQELLASADFQPVPSIVGVNNNEFGWLIPKVMRIYDTQKEMDREASQAALQKMLTLLMLPPTFGDLLREEYIGDNGDPQTLQAQFQEMMADSMFVIPALQVAHFQCSRAPVYFYEFQHQPSWLKNIRPPHMKADHVKFTEEEEQLSRKMMKYWANFARNGNPNGEGLPHWPLFDQEEQYLQLNLQPAVGRALKAHRLQFWKKALPQKIQELEEPEERHTEL

SEQ ID NO: 36893 - protein, 707 aa, Homo sapiens
LGDPERAHPQRSPPGVSNSSLLPPPIDPPARSSGLWTRTGLKRGFPGSRKGCRNGTAPSEDAKGARAKESGRARACLPLDPHPPMTAQSRSPTTPTFPGPSQRTPLTPCPVQTPRLGKALIHCWTDPGQPLGEQQRVRRQRTETSEPTMRLHRLRARLSAVACGLLLLLVRGQGQDSASPIRTTHTGQVLGSLVHVKGANAGVQTFLGIPFAKPPLGPLRFAPPEPPESWSGVRDGTTHPAMCLQDLTAVESEFLSQFNMTFPSDSMSEDCLYLSIYTPAHSHEGSNLPVMVWIHGGALVFGMASLYDGSMLAALENVVVVIIQYRLGVLGFFSTGDKHATGNWGYLDQVAALRWVQQNIAHFGGNPDRVTIFGESAGGTSVSSLVVSPISQGLFHGAIMESGVALLPGLIASSADVISTVVANLSACDQVDSEALVGCLRGKSKEEILAINKPFKMIPGVVDGVFLPRHPQELLASADFQPVPSIVGVNNNEFGWLIPKVMRIYDTQKEMDREASQAALQKMLTLLMLPPTFGDLLREEYIGDNGDPQTLQAQFQEMMADSMFVIPALQVAHFQCSRAPVYFYEFQHQPSWLKNIRPPHMKADHGDELPFVFRSFFGGNYIKFTEEEEQLSRKMMKYWANFARNGNPNGEGLPHWPLFDQEEQYLQLNLQPAVGRALKAHRLQFWKKALPQKIQELEEPEERHTEL

SEQ ID NO: 36894 - protein, 96 aa, Homo sapiens
MERAVRVESGVLVGVVCLLLACPATATGPEVAQPEVDTTLGRVRGRQVGVKGTDRLVNVFLGIPFAQPPLGPDRFSAPHPAQPWEGVRDASTAPPM

SEQ ID NO: 36895 - protein, 11 aa, Homo sapiens
VLLSLYIGLIS

SEQ ID NO: 36896 - protein, 18 aa, Homo sapiens
LSFSTMLLLSVLMLALRS

SEQ ID NO: 36897 - protein, 74 aa, Homo sapiens
LIECGVGGTCFGDQPHLLPSQKRGLQPALTVSLMKHLDLWCPGLHPGCCRYCSEVKQESILPAPSSHSAWDPEC

SEQ ID NO: 36898 - protein, 166 aa, Homo sapiens
LAGVGTQAPPRRPGGEMAAGQNGHEEWVGSAYLFVESSLDKVVLSDAYAHPQQKVAVYRALQAALAALLAQDPSPVPTLPGPPFPSQGRGHRRLKRVGGSVRGLRAARAPLLPEQWESRLVEAEDLRPLALLCPAGRLPRRLVCPGHTPPFLCFEVPLFCQPSFGA

SEQ ID NO: 36899 - protein, 133 aa, Homo sapiens
LPGAATLCPAYRGRAGPRLGLAARYRDRSYDPPCPGHWTPEAPGSGTTCPGLPRASDPDEAGGPEGSEAVQSGTPEEPEPELEAEASKEAEPEPEPEPELEPEAEAEPEPELEPEPDPEPEPDFEERDESEDS

SEQ ID NO: 36900 - protein, 330 aa, Homo sapiens
LLLWARVIFTGGISMTVQDDMGTQDVGQGGICILVPRRAGGNVSLGEFVHVCGCVGVGWGADGWERIHVCEPLWILGCESTGGGASRCLGLGEPVCEPEFRSMRMEVSRPEPRPDGTGPGLGSQAGPRTPRPAPPPLAFPAGTHYLRGVNNARQPWHNAEGRLRYGLRPANPTEEGLASLHSVLFRKQPFLWRAALLYYTIHRAARMSFRQLFQDLERYVQDADVRWEYCVRAKRGQTDTSLPGCFSKDQVYLDGIVRILRHRQTIDFPLLTSLGKVSYEDVDHLRPHGVLDNTRVPHFMQDLARYRQQLEHIMATNRLDEAELGRLLPD

SEQ ID NO: 36901 - protein, 36 aa, Homo sapiens
VHELPMWCLVIAVSVALPCFPGWVFASHHGGRARGD

SEQ ID NO: 36902 - protein, 44 aa, Homo sapiens
VHELPMWCLVIAVSVALPCFPGWVFASHHGAQGQSGHEREEADI

SEQ ID NO: 36903 - protein, 83 aa, Homo sapiens
VHELPMWCLVIAVSVALPCFPGWVFASHHGGFCTTGTWLSCGWSSIAHQAGGENEEDRGLLTASHHSSAAQGQSGHEREEADI

SEQ ID NO: 36904 - protein, 57 aa, Homo sapiens
LAFDTLILALQLALGFSLAVYGASYHSMSSMARAAFSEDGALMDGGMDLNMEQGMAE

SEQ ID NO: 36905 - protein, 102 aa, Homo sapiens
MPSQQAGLLDFLLFGSLISAVDPVAVLAVFEEVHVNETLFIIVFGESLLNDAVTVVLYKVCNSFVEMGSANVQATDYLKGVAGPHHRAAAGLPPRLRSLPHC

SEQ ID NO: 36906 - protein, 251 aa, Homo sapiens
LGCSPTREPAGSGAAEPPGLPRPSVHSCVVLSFRTHTSGAAARSEHCTQDPPSAWAKHPVASKLPWTLPLVNQGGMAASTDMAGLEESFRKFAIHGDPKASGQEMNGKNWAKLCKDCKVADGKSVTGTDVDIVFSKVKGKSARVINYEEFKKALEELATKRFKGKSKEEAFDAICQLVAGKEPANVGVTKAKTGGAVDRLTDTSRYTGSHKERFDESGKGKGIAGRQDILDDSGYVSAYKNAGTYDAKVKK

SEQ ID NO: 36907 - protein, 127 aa, Homo sapiens
VPRLAGQRLDVLSPSTPTQNPHACASPHPPGQEYKLLFEGAGSNPGDKTLEDRFFEHEVSLQGLLVRGRPTWWFRPDSVAMATWTPHLPVSTGKAEQVGLPEPVPLWCLLCLREAQGAGVSQHRVDR

SEQ ID NO: 36908 - protein, 26 aa, Homo sapiens
MEPRADSLYDVPVGAAAAPSAQRPGQ

SEQ ID NO: 36909 - protein, 91 aa, Homo sapiens
MAQTPDGISCELRGEITRFLWPKEVELLLKTWLPGEGAVQNHVLVWGRGQSRGGGCGPTERASCSAQDIRLSFPRHCYDGEPTCCTPPASR

SEQ ID NO: 36910 - protein, 177 aa, Homo sapiens
VLRGGMDDRQGGLEGGTGRARSPRGCSQQPPPAALRSGIPRLLHQPYPPRRFEERLLPHVRGTCRGRGRLLEAASLRPQAHLPTSPRKSRAAPAALQLFLSRARTLRHLGLAGCKLPPDALRSVSDPGHAPAGAPTLPWPSPLPAPASVAPTTSPRSWPCLLRSHPGAPCPSSRHPV

SEQ ID NO: 36911 - protein, 123 aa, Homo sapiens
LPGNNKSRRVAAAGGKTSRVSPCPSAAGERPRAGPRSGLGAEVAEVASEAGAQAGTGRGPGVAGTPGSGCRAREGARGWGRGPGEGGKQPCRPRGTVAGRRRRHVRGPVPHLGAHPPRPDALS

SEQ ID NO: 36912 - protein, 302 aa, Homo sapiens
LLLGIGKNVVCEKAATSVDAFRMVTASRYYPQLMSLVGNVLRFLPAFVRMKQLISEHYVGAVMICDARIYSGSLLSPSYGWICDELMGGGGLHTMGTYIVDLLTHLTGRRAEKVHGLLKTFVRQNAAIRGIRHVTSDDFCFFQMLMGGGVCSTVTLNFNMPGAFVHEVMVVGSAGRLVARGADLYGQKNSATQEELLLRDSLAVGAGLPEQGPQDVPLLYLKGMVYMVQALRQSFQGQGDRRTWDRTPVSMAASFEDGLYMQSVVDAIKRSSRSGEWEAVEVLTEEPDTNQNLCEALQRNNL

SEQ ID NO: 36913 - protein, 50 aa, Homo sapiens [sequence omitted]

SEQ ID NO: 36914 - protein, 72 aa, Homo sapiens
LRPLLLLPLVLLPPLAAAAAGPNRCDTIYQGFAECLIRLGDSMGRGGELETICSTVDKEYLIVLREPGGWMS

SEQ ID NO: 36915 - protein, 33 aa, Homo sapiens
MAAAAAAAAAAAIARRWPAEPPRRRRARRPREV

SEQ ID NO: 36916 - protein, 1087 aa, Homo sapiens
LLDPRKLGQLLPLPPFLFLLLLLLSSQTLAVYRMGDTLSPGHGNHRESSPFLSPLEASRGIDYYDRNLALFEEELDIRPKVSSLLGKLVSYTNLTQGAKEHEEAESGEGTRRRAAEAPSMGTLMGVYLPCLQNIFGVILFLRLTWMVGTAGVLQALLIVLICCCCTLLTAISMSAIATNGVVPAGGSYFMISRSLGPEFGGAVGLCFYLGTTFAAAMYILGAIEILLTYIAPPAAIFYPSGAHDTSNATLNNMRVYGTIFLTFMTLVVFVGVKYVNKFASLFLACVIISILSIYAGGIKSIFDPPVFPVCMLGNRTLSRDQFDICAKTAVVDNETVATQLWSFFCHSPNLTTDSCDPYFMLNNVTEIPGIPGAAAGVLQENLWSAYLEKGDIVEKHGLPSADAPSLKESLPLYVVADIATSFTVLVGIFFPSVTGIMAGSNRSGDLRDAQKSIPVGTILAIITTSLVYFSSVVLFGACIEGVVLRDKYGDGVSRNLVVGTLAWPSPWVIVIGSFFSTCGAGLQSLTGAPRLLQAIAKDNIIPFLRVFGHGKVNGEPTWALLLTALIAELGILIASLDMVAPILSMFFLMCYLFVNLACAVQTLLRTPNWRPRFKYYHWALSFLGMSLCLALMFVSSWYYALVAMLIAGMIYKYIEYQGAEKEWGDGIRGLSLSAARYALLRLEEGPPHTKNWRPQLLVLLKLDEDLHVKYPRLLTFASQLKAGKGLTIVGSVIQGSFLESYGEAQAAEQTIKNMMEIEKVKGFCQVVVASKVREGLAHLIQSCGLGGMRHNSVVLGWPYGWRQSEDPRAWKTFIDTVRCTTAAHLALLVPKNIAFYPSNHERYLEGHIDVWWIVHDGGMLMLLPFLLRQHKVWRKCRMRIFTVAQMDDNSIQMKKDLAVFLYHLRLEAEVEVVEMHNSDISAYTYERTLMMEQRSQMLRQMRLTKTEREREAQLVKDRHSALRLESLYSDEEDESAVGADKIQMTWTRDKYMTETWDPSHAPDNFRELVHIKPDQSNVRRMHTAVKLNEVIVTRSHDARLVLLNMPGPPRNSEGDENYMEFLEVLTEGLERVLLVRGGGREVITIYS

SEQ ID NO: 36917 - protein, 37 aa, Homo sapiens
LRSVGACVRLVGPRVWPRAPFLCGHDSAAAAAPSPGP

SEQ ID NO: 36918 - protein, 224 aa, Homo sapiens
LAGGMRGMRAAGLSASPPPPPRREPRELNLHPGPAATVVHHGPPPPPLPCGAAPGWPPVPLAAANAARGPSAPGRTSPPSGAGLVYNKTSRATQFPDGVDVRVPGFGKTFSLEFLDPSKSSVGSYFHTMVESLVGWGYTRGEDVRGAPYDWRRAPTAAAGLEGQVYPGLRVTGCALGGRGQDPARPGFRRQQPDPSHRAPEDPGAAAVSCLHQLAAALQLHMVT

SEQ ID NO: 36919 - protein, 54 aa, Homo sapiens
LYLFLSSVFLSTGSYFHTMVESLVGWGYTRGEDVRGAPYDWRRAPSKQALSFPP

SEQ ID NO: 36920 - protein, 15 aa, Homo sapiens
VAYESVMFAYFLTVA

SEQ ID NO: 36921 - protein, 136 aa, Homo sapiens
LGAVLALLFLLLVLLLLVRKKRKIKEPLLLPEDDTRDNVFYYGEEGGGEEDQDYDITQLHRGLEARPEVVLRNDVAPTIIPTPMYRPRPANPDEIGNFIIEVRRGRPVEGHPLFKPSTSHTGEQAWAWSLGSGFKF

SEQ ID NO: 36922 - protein, 270 aa, Homo sapiens
LTGMRVAAATAAAGAGPAMAVWTRATKAGLVELLLRERWVRVVAELSGESLSLTGDAAAAELEPALGPAAAAFNGLPNGGGAGDSLPGSPSRGLGPPSPPAPPRGPAGEAGASPPVRRVRVVKQEAGGLGISIKGGRENRMPILISKIFPGLAADQSRALRLGDAILSVNGTDLRQATHDQAVQALKRAGKEVLLEVKFIREVTPYIKKPSLVSDLPWEGAAPQSPSFSGSEDSGSPKHQNSTKDRKIIPLKMCFAARNLSMPDLENRQN

SEQ ID NO: 36923 - protein, 543 aa, Homo sapiens
LTGMRVAAATAAAGAGPAMAVWTRATKAGLVELLLRERWVRVVAELSGESLSLTGDAAAAELEPALGPAAAAFNGLPNGGGAGDSLPGSPSRGLGPPSPPAPPRGPAGEAGASPPVRRVRVVKQEAGGLGISIKGGRENRMPILISKIFPGLAADQSRALRLGDAILSVNGTDLRQATHDQAVQALKRAGKEVLLEVKFIREVTPYIKKPSLVSDLPWEGAAPQSPSFSGSEDSGSPKHQNSTKDRKIIPLKMCFAARNLSMPDLENRLIELHSPDSRNTLILRCKDTATAHSWFVAIHTNIMALLPQVLAELNAMLGATSTAGGSKEVKHIAWLAEQAKLDGGRQQWRPVLMAVTEKDLLLYDCMPWTRDAWASPCHSYPLVATRLVHSGSGCRSPSLGSDLTFATRTGSRQGIEMHLFRVETHRDLSSWTRILVQGCHAAAELIKEVSLGCMLNGQEVRLTIHYENGFTISRENGGSSSILYRYPFERLKMSADDGIRNLYLDFGGPEGELTMDLHSCPKPIVFVLHTFLSAKVTRMGLLV

SEQ ID NO: 36924 - protein, 76 aa, Homo sapiens
VKPAIPHKRHVELFWAAQKQQDAASWLWPGPLWQQWHGQATANSRLTIGFTAHPTVSRVMRPWNSYLLLVKIARYH

SEQ ID NO: 36925 - protein, 59 aa, Homo sapiens
MGGACSSFTTSSSPTIYSTSVTDSKAMQVESCSSAVGNIGKPKRNWSKEEPYVVWTISC

SEQ ID NO: 36926 - protein, 490 aa, Homo sapiens
LPCSAAMAGAAGRVQDRALRRFPITLPVGDLSNLHLKEEKIKPDTNGAVVKTNANAEKTDEEEKEDRAAQSLLNKLIRSNLVDNTNQVEVLQRDPNSPLYSVKSFEELRLKPQLLQGVYAMGFNRPSKIQENALPLMLAEPPQNLIAQSQSGTGKTAAFVLAMLSQVEPANKYPQCLCLSPTYELALQTGKVIEQMGKFYPELKLAYAVRGNKLERGQKISEQIVIGTPGTVLDWCSKLKFIDPKKIKVFVLDEADVMIATQGHQDQSIRIQRMLPRNCQMLLFSATFEDSVWKFAQKVVPDPNVIKLKREEETLDTIKQYYVLCSSRDEKFQALCNLYGAITIAQAMIFCHTRKTASWLAAELSKEGHQVALLSGEMMVEQRAAVIERFREGKEKVLVTTNVCARGIDVEQVSVVINFDLPVDKDGNPDNETYLHRIGRTGRFGKRGLAVNMVDSKHSMNILNRIQEHFNKKIERLDTDDLDEIEKIAN

SEQ ID NO: 36927 - protein, 459 aa, Homo sapiens
LPCSAAMAGAAGRVQDRALRRFPITLPVGDLSNLHLKEEKIKPDTNGAVVKTNANAEKTDEEEKEDRAAQSLLNKLIRSNLVDNTNQVEVLQRDPNSPLYSVKSFEELRLPQNLIAQSQSGTGKTAAFVLAMLSQVEPANKYPQCLCLSPTYELALQTGKVIEQMGKFYPELKLAYAVRGNKLERGQKISEQIVIGTPGTVLDWCSKLKFIDPKKIKVFVLDEADVMIATQGHQDQSIRIQRMLPRNCQMLLFSATFEDSVWKFAQKVVPDPNVIKLKREEETLDTIKQYYVLCSSRDEKFQALCNLYGAITIAQAMIFCHTRKTASWLAAELSKEGHQVALLSGEMMVEQRAAVIERFREGKEKVLVTTNVCARGIDVEQVSVVINFDLPVDKDGNPDNETYLHRIGRTGRFGKRGLAVNMVDSKHSMNILNRIQEHFNKKIERLDTDDLDEIEKIAN

SEQ ID NO: 36928 - protein, 557 aa, Homo sapiens
LLCPGLRGTGLRATESTASSGQRVAKQEWPPTSLWRAASGLQPCSGAGAEPAANPRSPRSLVPSLESTSTSVPPAPGTMATDSWALAVDEQEAAAESLSNLHLKEEKIKPDTNGAVVKTNANAEKTDEEEKEDRAAQSLLNKLIRSNLVDNTNQVEVLQRDPNSPLYSVKSFEELRLKPQLLQGVYAMGFNRPSKIQENALPLMLAEPPQNLIAQSQSGTGKTAAFVLAMLSQVEPANKYPQCLCLSPTYELALQTGKVIEQMGKFYPELKLAYAVRGNKLERGQKISEQIVIGTPGTVLDWCSKLKFIDPKKIKVFVLDEADVMIATQGHQDQSIRIQRMLPRNCQMLLFSATFEDSVWKFAQKVVPDPNVIKLKREEETLDTIKQYYVLCSSRDEKFQALCNLYGAITIAQAMIFCHTRKTASWLAAELSKEGHQVALLSGEMMVEQRAAVIERFREGKEKVLVTTNVCARGIDVEQVSVVINFDLPVDKDGNPDNETYLHRIGRTGRFGKRGLAVNMVDSKHSMNILNRIQEHFNKKIERLDTDDLDEIEKIAN

SEQ ID NO: 36929 - protein, 148 aa, Homo sapiens
LCSPPLPVRVRCILAPVARLGPALRRGAAHIFTSGSPLSGTMATDSWALAVDEQEAAVKSMTNLQIKEEKVKADTNGIIKTSTTAEKTDEEEKEDRAAQSLLNKLIRSNLVDNTNQVEVLQRDPNSPLYSVKSFEELRLTFNKILADR

SEQ ID NO: 36930 - protein, 519 aa, Homo sapiens
LCSPPLPVRVRCILAPVARLGPALRRGAAHIFTSGSPLSGTMATDSWALAVDEQEAAVKSMTNLQIKEEKVKADTNGIIKTSTTAEKTDEEEKEDRAAQSLLNKLIRSNLVDNTNQVEVLQRDPNSPLYSVKSFEELRLKPQLLQGVYAMGFNRPSKIQENALPMMLAEPPQNLIAQSQSGTGKTAAFVLAMLSRVEPSDRYPQCLCLSPTYELALQTGKVIEQMGKFYPELKLAYAVRGNKLERGQKISEQIVIGTPGTVLDWCSKLKFIDPKKIKVFVLDEADVMIATQGHQDQSIRIQRMLPRNCQMLLFSATFEDSVWKFAQKVVPDPNVIKLKREEETLDTIKQYYVLCSSRDEKFQALCNLYGAITIAQAMIFCHTRKTASWLAAELSKEGHQVALLSGEMMVEQRAAVIERFREGKEKVLVTTNVCARGIDVEQVSVVINFDLPVDKDGNPDNETYLHRIGRTGRFGKRGLAVNMVDSKHSMNILNRIQEHFNKKIERLDTDDLDEIEKIAN

SEQ ID NO: 36931 - protein, 125 aa, Homo sapiens
VRCILAPVARLGPALRRGAAHIFTSGSPLSGTMATDSWALAVDEQEAAVKSMTNLQIKEEKVKADTNGIIKTSTTAEKTDEEEKGNYFWMPLARDGMTQGLPSWSQGHSKLQDPGDERNQRRNSQ

SEQ ID NO: 36932 - protein, 161 aa, Homo sapiens
VRCILAPVARLGPALRRGAAHIFTSGSPLSGTMATDSWALAVDEQEAAVKSMTNLQIKEEKVKADTNGIIKTSTTAEKTDEEEKEDRAAQSLLNKLIRSNLVDNTNQVEVLQRDPNSPLYSVKSFEELRLKPQLLQGVYAMGFNRPSKIQENALPMMLAEP

SEQ ID NO: 36933 - protein, 451 aa, Homo sapiens
LSGTMATDSWALAVDEQEAAVKSMTNLQIKEEKVKADTNGIIKTSTTAEKTDEEEKEDRAAQSLLNKLIRSNLVDNTNQVEVLQRDPNSPLYSVKSFEELRLPQNLIAQSQSGTGKTAAFVLAMLSRVEPSDRYPQCLCLSPTYELALQTGKVIEQMGKFYPELKLAYAVRGNKLERGQKISEQIVIGTPGTVLDWCSKLKFIDPKKIKVFVLDEADVMIATQGHQDQSIRIQRMLPRNCQMLLFSATFEDSVWKFAQKVVPDPNVIKLKREEETLDTIKQYYVLCSSRDEKFQALCNLYGAITIAQAMIFCHTRKTASWLAAELSKEGHQVALLSGEMMVEQRAAVIERFREGKEKVLVTTNVCARGIDVEQVSVVINFDLPVDKDGNPDNETYLHRIGRTGRFGKRGLAVNMVDSKHSMNILNRIQEHFNKKIERLDTDDLDEIEKIAN

SEQ ID NO: 36934 - protein, 372 aa, Homo sapiens
VAGPSAGWEKSGHGDRHPPAGTMKCSLRVWFLSVAFLLVFIMSLLFTYSHHSMATLPYLDSGALDGTHRVKLVPGYAGLQRLSKERLSGKSCACRRCMGDAGASDWFDSHFDGNISPVWTRENMDLPPDVQRWWMMLQPQFKSHNTNEVLEKLFQIVPGENPYRFRDPHQCRRCAVVGNSGNLRGSGYGQDVDGHNFIMRMNQAPTVGFEQDVGSRTTHHFMYPESAKNLPANVSFVLVPFKVLDLLWIASALSTGQIRFTYAPVKSFLRVDKEKVQIYNPAFFKYIHDRWTEHHGRYPSTGMLVLFFALHVCDEVNVYGFGADSRGNWHHYWENNRYAGEFRKTGVHDADFEAHIIDMLAKASKIEVYRGN

SEQ ID NO: 36935 - protein, 12 aa, Homo sapiens
MADASMLELVVA

SEQ ID NO: 36936 - protein, 1251 aa, Homo sapiens
LDIHTILLAAGFLGLRTVGVTKAWRSGWLRFPAAMFLYNLTLQRATGISFAIHGNFSGTKQQEIVVSRGKILELLRPDPNTGKVHTLLTVEVFGVIRSLMAFRLTGGTKDYIVVGSDSGRIVILEYQPSKNMFEKIHQETFGKSGCRRIVPGQFLAVDPKGRAVMISAIEKQKLVYILNRDAAARLTISSPLEAHKANTLVYHVVGVDVGFENPMFACLEMDYEEADNDPTGEAAANTQQTLTFYELDLGLNHVVRKYSEPLEEHGNFLITVPGGSDGPSGVLICSENYITYKNFGDQPDIRCPIPRRRNDLDDPERGMIFVCSATHKTKSMFFFLAQTEQGDIFKITLETDEDMVTEIRLKYFDTVPVAAAMCVLKTGFLFVASEFGNHYLYQIAHLGDDDEEPEFSSAMPLEEGDTFFFQPRPLKNLVLVDELDSLSPILFCQIADLANEDTPQLYVACGRGPRSSLRVLRHGLEVSEMAVSELPGNPNAVWTVRRHIEDEFDAYIIVSFVNATLVLSIGETVEEVTDSGFLGTTPTLSCSLLGDDALVQVYPDGIRHIRADKRVNEWKTPGKKTIVKCAVNQRQVVIALTGGELVYFEMDPSGQLNEYTERKEMSADVVCMSLANVPPGEQRSRFLAVGLVDNTVRIISLDPSDCLQPLSMQALPAQPESLCIVEMGGTEKQDELGERGSIGFLYLNIGLQNGVLLRTVLDPVTGDLSDTRTRYLGSRPVKLFRVRMQGQEAVLAMSSRSWLSYSYQSRFHLTPLSYETLEFASGFASEQCPEGIVAISTNTLRILALEKLGAVFNQVAFPLQYTPRKFVIHPESNNLIIIETDHNAYTEATKAQRKQQMAEEMVEAAGEDERELAAEMAAAFLNENLPESIFGAPKAGNGQWASVIRVMNPIQGNTLDLVQLEQNEAAFSVAVCRFSNTGEDWYVLVGVAKDLILNPRSVAGGFVYTYKLVNNGEKLEFLHKTPVEEVPAAIAPFQGRVLIGVGKLLRVYDLGKKKLLRKCENKHIANYISGIQTIGHRVIVSDVQESFIWVRYKRNENQLIIFADDTYPRWVTTASLLDYDTVAGADKFGNICVVRLPPNTNDEVDEDPTGNKALWDRGLLNGASQKAEVIMNYHVGETVLSLQKTTLIPGGSESLVYTTLSGGIGILVPFTSHEDHDFFQHVEMHLRSEHPPLCGRDHLSFRSYYFPVKNVIDGDLCEQFNSMEPNKQKNVSEELDRTPPEVSKKLEDIRTRYAF

SEQ ID NO: 36937 - protein, 29 aa, Homo sapiens
LQAWAWFGVCFMLFGPSSSSSGALPLPYP

SEQ ID NO: 36938 - protein, 59 aa, Homo sapiens
VPHLHIDSLKAAPKSQKADSPSIDYAELLQHFEKVQNKHLEVRHQRSGRGDHLDRRVVL

SEQ ID NO: 36939 - protein, 133 aa, Homo sapiens
LVSPLQKQLFCGPMVILKDLEVLAEIASSPAGQTDDPGPLDGPDLQASHSELQVPTPGRAGLLNTSGTKGLECSPSTPTMNSYFYKFMINLLKRFSSERKLLEVRGPFIIRNEEGCPFILVADASDMKQTGQC

SEQ ID NO: 36940 - protein, 657 aa, Homo sapiens
LRRGLGICLWEFIHLSLLFTSPKPGFPLLKPAVISQLEGGSELGGSSPLAAGTGLQGLQTVDIQTDNDLTKEMYEGKENVSFELQRDFSQETDFSEASLLEKQQEVHSAGNIKKEKSNTIDGTVKDETSPVEECFFSQSSNSYQCHTITGEQPSGCTGLGKSISFDTKLVKHEIINSEERPFKCEELVEPFRCDSQLIQHQENNTEEKPYQCSECGKAFSINEKLIWHQRLHSGEKPFKCVECGKSFSYSSHYITHQTIHSGEKPYQCKMCGKAFSVNGSLSRHQRIHTGEKPYQCKECGNGFSCSSAYITHQRVHTGEKPYECNDCGKAFNVNAKLIQHQRIHTGEKPYECNECGKGFRCSSQLRQHQSIHTGEKPYQCKECGKGFNNNTKLIQHQRIHTGEKPYECTECGKAFSVKGKLIQHQRIHTGEKPYECNECGKAFRCNSQFRQHLRIHTGEKPYECNECGKAFSVNGKLMRHQRIHTGEKPFECNECGRCFTSKRNLLDHHRIHTGEKPYQCKECGKAFSINAKLTRHQRIHTGEKPFKCMECEKAFSCSSNYIVHQRIHTGEKPFQCKECGKAFHVNAHLIRHQRSHTGEKPFRCVECGKGFSFSSDYIIHQTVHTWKKPYMCSVCGKAFRFSFQLSQHQSVHSEGKS

SEQ ID NO: 36941 - protein, 682 aa, Homo sapiens
MDFHGLQKSVTFEDVAVYFTQAEWDGLSPAQRTLYRDVMLENYGNVASLGFPLLKPAVISQLEGGSELGGSSPLAAGTGLQGLQTVDIQTDNDLTKEMYEGKENVSFELQRDFSQETDFSEASLLEKQQEVHSAGNIKKEKSNTIDGTVKDETSPVEECFFSQSSNSYQCHTITGEQPSGCTGLGKSISFDTKLVKHEIINSEERPFKCEELVEPFRCDSQLIQHQENNTEEKPYQCSECGKAFSINEKLIWHQRLHSGEKPFKCVECGKSFSYSSHYITHQTIHSGEKPYQCKMCGKAFSVNGSLSRHQRIHTGEKPYQCKECGNGFSCSSAYITHQRVHTGEKPYECNDCGKAFNVNAKLIQHQRIHTGEKPYECNECGKGFRCSSQLRQHQSIHTGEKPYQCKECGKGFNNNTKLIQHQRIHTGEKPYECTECGKAFSVKGKLIQHQRIHTGEKPYECNECGKAFRCNSQFRQHLRIHTGEKPYECNECGKAFSVNGKLMRHQRIHTGEKPFECNECGRCFTSKRNLLDHHRIHTGEKPYQCKECGKAFSINAKLTRHQRIHTGEKPFKCMECEKAFSCSSNYIVHQRIHTGEKPFQCKECGKAFHVNAHLIRHQRSHTGEKPFRCVECGKGFSFSSDYIIHQTVHTWKKPYMCSVCGKAFRFSFQLSQHQSVHSEGKS

SEQ ID NO: 36942 - protein, 33 aa, Homo sapiens
VTSFLVLSFLADTDHLDSVEFALLRGNCTRAGG

SEQ ID NO: 36943 - protein, 146 aa, Homo sapiens
VEAMEILELYCDLLLARFGLIQSMKELDSGLAESVSTLIWAAPRLQSEVAELKIVADQLCAKYSKEYGKLCRTNQIGTVNDRLMHKLSVEAPPKILVERYLIEIAKNYNVPYEPDSVVMVSLSQNTKKNEFVGMTFFGKQKKHSLH

SEQ ID NO: 36944 - protein, 361 aa, Homo sapiens
MPHSTALPEARPTKMSALGAVIALLLWGQLFAVDSGNDVTDIADDGCPKPPEIAHGYVEHSVRYQCKNYYKLRTEGDGVYTLNNEKQWINKAVGDKLPECEAVCGKPKNPANPVQRILGGHLDAKGSFPWQAKMVSHHNLTTGATLINEQWLLTTAKNLFLNHSENATAKDIAPTLTLYVGKKQLVEIEKVVLHPNYSQVDIGLIKLKQKVSVNERVMPICLPSKDYAEVGRVGYVSGWGRNANFKFTDHLKYVMLPVADQDQCIRHYEGSTVPEKKTPKSPVGVQPILNEHTFCAGMSKYQEDTCYGDAGSAFAVHDLEEDTWYATGILSFDKSCAVAEYGVYVKVTSIQDWVQKTIAEN

SEQ ID NO: 36945 - protein, 420 aa, Homo sapiens
MPHSTALPEARPTKMSALGAVIALLLWGQLFAVDSGNDVTDIADDGCPKPPEIAHGYVEHSVRYQCKNYYKLRTEGDGVYTLNDKKQWINKAVGDKLPECEADDGCPKPPEIAHGYVEHSVRYQCKNYYKLRTEGDGVYTLNNEKQWINKAVGDKLPECEAVCGKPKNPANPVQRILGGHLDAKGSFPWQAKMVSHHNLTTGATLINEQWLLTTAKNLFLNHSENATAKDIAPTLTLYVGKKQLVEIEKVVLHPNYSQVDIGLIKLKQKVSVNERVMPICLPSKDYAEVGRVGYVSGWGRNANFKFTDHLKYVMLPVADQDQCIRHYEGSTVPEKKTPKSPVGVQPILNEHTFCAGMSKYQEDTCYGDAGSAFAVHDLEEDTWYATGILSFDKSCAVAEYGVYVKVTSIQDWVQKTIAEN

SEQ ID NO: 36946 - protein, 83 aa, Homo sapiens
MSALGAVIALLLWGQLFAVDSGNDVTDIADDGCPKPPEIAHGYVEHSVRYQCKNYYKLRTEGDGKMWTTVSMPYIQPPSLTFP

SEQ ID NO: 36947 - protein, 142 aa, Homo sapiens
MSALGAVIALLLWGQLFAVDSGNDVTDIADDGCPKPPEIAHGYVEHSVRYQCKNYYKLRTEGDGVYTLNDKKQWINKAVGDKLPECEADDGCPKPPEIAHGYVEHSVRYQCKNYYKLRTEGDGKMWTTVSMPYIQPPSLTFP

SEQ ID NO: 36948 - protein, 147 aa, Homo sapiens
LGAVIALLLWGQLFAVDSGNDVTDIADDGCPKPPEIAHGYVEHSVRYQCKNYYKLRTEGDGVYTLNDKKQWINKAVGDKLPECEADDGCPKPPEIAHGYVEHSVRYQCKNYYKLRTEGDGVYTLNNEKQWINKAVGDKLPECEAGGC

SEQ ID NO: 36949 - protein, 402 aa, Homo sapiens
LGAVIALLLWGQLFAVDSGNDVTDIADDGCPKPPEIAHGYVEHSVRYQCKNYYKLRTEGDGVYTLNDKKQWINKAVGDKLPECEADDGCPKPPEIAHGYVEHSVRYQCKNYYKLRTEGDVYTLNNEKQWINKAVGDKLPECEAVCGKPKNPANPVQRILGGHLDAKGSFPWQAKMVSHHNLTTGATLINEQWLLTTAKNLFLNHSENATAKDIAPTLTLYVGKKQLVEIEKVVLHPNYSQVDIGLIKLKQKVSVNERVMPICLPSKDYAEVGRVGYVSGWGRNANFKFTDHLKYVMLPVADQDQCIRHYEGSTVPEKKTPKSPVGVQPILNEHTFCAGMSKYQEDTCYGDAGSAFAVHDLEEDTWYATGILSFDKSCAVAEYGVYVKVTSIQDWVQKTIAEN

SEQ ID NO: 36950 - protein, 363 aa, Homo sapiens
LGAVIALLLWGQLFAVDSGNDVTDIADDGCPKPPEIAHGYVEHSVRYQCKNYYKLRTEGDGVYTLNDKKQWINKAVGDKLPECEADDGCPKPPEIAHGYVEHSVRYQCKNYYKLRTEGDGVYTLNNEKQWINKAVGDKLPECEAGATLINEQWLLTTAKNLFLNHSENATAKDIAPTLTLYVGKKQLVEIEKVVLHPNYSQVDIGLIKLKQKVSVNERVMPICLPSKDYAEVGRVGYVSGWGRNANFKFTDHLKYVMLPVADQDQCIRHYEGSTVPEKKTPKSPVGVQPILNEHTFCAGMSKYQEDTCYGDAGSAFAVHDLEEDTWYATGILSFDKSCAVAEYGVYVKVTSIQDWVQKTIAEN

SEQ ID NO: 36951 - protein, 86 aa, Homo sapiens
LLEINFLNVKQPILNEHTFCAGMSKYQEDTCYGDAGSAFAVHDLEEDTWYATGILSFDKSCAVAEYGVYVKVTSIQDWVQKTIAEN

SEQ ID NO: 36952 - protein, 90 aa, Homo sapiens
LDKYWSQQIEESTTVVTTQSVKVGAAETTLTELRYTVQSLETDLDSMRNLKASLENSLREVEARYTLQMEQLNGILLYLESELAQTRAEG

SEQ ID NO: 36953 - protein, 27 aa, Homo sapiens
MSFIILLGAFSNDWLLRAPGRAPSKFF

SEQ ID NO: 36954 - protein, 707 aa, Homo sapiens
VRRARRGLKMAACGRVRRMFRLSAALHLLLLFAAGAEKLPGQGVHSQGQGPGANFVSFVGQAGGGGPAGQQLPQLPQSSQLQQQQQQQQQQQQPQPPQPPFPAGGPPARRGGAGAGGGWKLAEEESCREDVTRVCPKHTWSNNLAVLECLQDVREPENEISSDCNHLLWNYKLNLTTDPKFESVAREVCKSTITEIKECADEPVGKGYMVSCLVDHRGNITEYQCHQYITKMTAIIFSDYRLICGFMDDCKNDINILKCGSIRLGEKDAHSQGEVVSCLEKGLVKEAEEREPKIQVSELCKKAILRVAELSSDDFHLDRHLYFACRDDRERFCENTQAGEGRVYKCLFNHKFEESMSEKCREALTTRQKLIAQDYKVSYSLAKSCKSDLKKYRCNVENLPRSREARLSYLLMCLESAVHRGRQVSSECQGEMLDYRRMLMEDFSLSPEIILSCRGEIEHHCSGLHRKGRTLHCLMKVVRGEKGNLGMNCQQALQTLIQETDPGADYRIDRALNEACESVIQTACKHIRSGDPMILSCLMEHLYTEKMVEDCEHRLLELQYFISRDWKLDPVLYRKCQGDASRLCHTHGWNETSEFMPQGAVFSCLYRHAYRTEEQGRRLSRECRAEVQRILHQRAMDVKLDPALQDKCLIDLGKWCSEKTETGQELECLQDHLDDLVVECRDIVGNLTELESEAEREYVFKNLPFKV

SEQ ID NO: 36955 - protein, 26 aa, Homo sapiens
MLEILIFFIFCVTFWTLESVLSSSRM

SEQ ID NO: 36956 - protein, 329 aa, Homo sapiens
VWRPVQSAECRVRAPGKGAQGNSRGPRVCKLLAWAGGGRGKEGGRASFLELCTGQIGRTPLGRREGMENLKHIITLGQVIHKRCEEMKYCKKQCRRLGHRVLGLIKPLEMLQDQGKRSVPSEKLTTAMNRFKAALEEANGEIEKFSNRSNICRFLTASQDKILFKDVNRKLSDVWKELSLLLQVEQRMPVSPISQGASWAQEDQQDADEDRRAFQMLRRDNEKIEASLRRLEINMKEIKETLRQSLESSSGKSPLEISRFKVKNVKTGSASGCNSEKIRKLVAVKRQQEPLGEDCPSELREIIDECRAHDPSVRPSVDEILKKLSTFSK

SEQ ID NO: 36957 - protein, 537 aa, Homo sapiens
VWRPVQSAECRVRAPGKGAQGNSRGPRVCKLLAWAGGGRGKEGGRASFLELCTGQIGRTPLGRREGMENLKHIITLGQVIHKRCEEMKYCKKQCRRLGHRVLGLIKPLEMLQDQGKRSVPSEKLTTAMNRFKAALEEANGEIEKFSNRSNICRFLTASQDKILFKDVNRKLSDVWKELSLLLQVEQRMPVSPISQGASWAQEDQQDADEDRRAFQMLRRDNEKIEASLRRLEINMKEIKETLRQYLPPKCMQEIPQEQIKEIKKEQLSGSPWILLRENEVSTLYKGEYHRAPVAIKVFKKLQAGSIAIVRQTFNKEIKTMKKFESPNILRIFGICIDETVTPPQFSIVMEYCELGTLRELLDREKDLTLGKRMVLVLGAARGLYRLHHSEAPELHGKIRSSNFLVTQGYQVKLAGFELRKTQTSMSLGTTREKTDRVKSTAYLSPQELEDVFYQYDVKSEIYSFGIVLWEIATGDIPFQGCNSEKIRKLVAVKRQQEPLGEDCPSELREIIDECRAHDPSVRPSVDEILKKLSTFSK

SEQ ID NO: 36958 - protein, 20 aa, Homo sapiens
MCSAASAPVAALPPPPAASG

SEQ ID NO: 36959 - protein, 81 aa, Homo sapiens
LVPRLAECLRAVLMALYELFSHPVERSYRAGLCSKAALFLLLAAALTYIPPLLVAFRSHGEPAPAAVPRGSPGALGQGRPP

SEQ ID NO: 36960 - protein, 18 aa, Homo sapiens
LCLAWPSSLCLCLSMAYL

SEQ ID NO: 36961 - protein, 362 aa, Homo sapiens
MPRWTPGSQEKDPNPTRADIREAPRSASSPPLSAASGSSSAFRLSFWEEGLTGASPSSELKRRLKAEKKVAEKEAKQKELSEKQLSQATAAATNHTTDNGVGPEEESVDPNQYYKIRSQAIHQLKVNGEDPYPHKFHVDISLTDFIQKYSHLQPGDHLTDITLKVAGRIHAKRASGGKLIFYDLRGEGVKLQVMANSRNYKSEEEFIHINNKLRRGDIIGVQGNPGKTKKGELSIIPYEITLLSPCLHMLPHLHFGLKDKETRYRQRYLDLILNDFVRQKFIIRSKIITYIRSFLDELGFLEIETPMMNIIPGGAVAKPFITYHNELDMNLYMRIAPELYHKVVSNSTPFSLKEAESWNTTG

SEQ ID NO: 36962 - protein, 64 aa, Homo sapiens
LRLLVKLCSFLARRTDSTFNQVVLKRLFMSRTNRPPLSLSQMIQKSEASCPGKQNGRDCGEHNR

SEQ ID NO: 36963 - protein, 1312 aa, Homo sapiens
LMLLFYLLVVLSIDSTKASALTNPNVALFLLADDCDDPLVSALPQASFSSSSELSSSHGPGFARLNRRDGAGGWSPLVSNKYQWLQIDLGERMEVTAVATQGGYGSSNWVTSYLLMFSDSGWNWKQYRQEDSIWGFSGNANADSVVYYRLQPSIKARFLRFIPLEWNPKGRIGMRIEVFGCAYRSEVVDLDGKSSLLYRFDQKSLSPIKDIISLKFKTMQSDGILLHREGPNGDHITLQLRRARLFLLINSGEAKLPSTSTLVNLTLGSLLDDQHWHSVLIQRLGKQVNFTVDEHRHHFHARGEFNLMNLDYEISFGGIPAPGKSVSFPHRNFHGCLENLYYNGVDIIDLAKQQKPQIIAMGNVSFSCSQPQSMPVTFLSSRSYLALPDFSGEEEVSATFQFRTWNKAGLLLFSELQLISGGILLFLSDGKLKSNLYQPGKLPSDITAGVELNDGQWHSVSLSAKKNHLSVAVDGQMASAAPLLGPEQIYSGGTYYFGGCPDKSFGSKCKSPLGGFQGCMRLISISGKVVDLISVQQGSLGNFSDLQIDSCGISDRCLPNYCEHGGECSQSWSTFHCNCTNTGYRGATCHNSIYEQSCEAYKHRGNTSGFYYIDSDGSGPLEPFLLYCNMTETAWTIIQHNGSDLTRVRNTNPENPYAGFFEYVASMEQLQATINRAEHCEQEFTYYCKKSRLVNKQDGTPLSWWVGRTNETQTYWGGSSPDLQKCTCGLEGNCIDSQYYCNCDADRNEWTNDTGLLAYKEHLPVTKIVITDTGRLHSEAAYKLGPLLCQGDRSFWNSASFDTEASYLHFPTFHGELSADVSFFFKTTASSGVFLENLGIADFIRIELRSPTVVTFSFDVGNGPFEISVQSPTHFNDNQWHHVRVERNMKEASLQVDQLTPKTQPAPADGHVLLQLNSQLFVGGTATRQRGFLGCIRSLQLNGMTLDLEERAQVTPEVQPGCRGHCSSYGKLCRNGGKCRERPIGFFCDCTFSAYTGPFCSNEISAYFGSGSSVIYNFQENYLLSKNSSSHAASFHGDMKLSREMIKFSFRTTRTPSLLLFVSSFYKEYLSVIIAKNGSLQIRYKLNKYQEPDVVNFDFKNMADGQLHHIMINREEGVVFIEIDDNRRRQVHLSSGTEFSAVKSLVLGRILEHSDVDQDTALAGAQGFTGCLSAVQLSHVAPLKAALHPSHPDPVTVTGHVTESSCMAQPGTDATSRERTHSFADHSGTIDDREPLANAIKSDSAVIGGLIAVVIFILLCITAIAVRIYQQKRLYKRSEAKRSENVDSAEAVLKSELNIQNAVNENQKEYFF

SEQ ID NO: 36964 - protein, 468 aa, Homo sapiens
LPVVFAVYLTYLFLCPSHHVSANVQIPPACPYPSPGAHRVSMWTRAWCVYGRRGQKSPTVSLWSFLIQLYPPFLPLPSLEDHKLVFLQQGPLLLVAMSRTSQSAAQLRGELLAVHAQIVSTLTRASVARIFAHKQNYDLRRLLAGSERTLDRLLDSMEQDPGALLLGAVRCVPLARPLRDALGALLRRCTAPGLALSVLAVGGRLITAAQERNVLAECRLDPADLQLLLDWVGAPAFAAGEAWAPVCLPRFNPDGFFYAYVARLDAMPVCLLLLGTQREAFHAMAACRRLVEDGMHALGAMRALGEAASFSNASSASAPAYSVQAVGAPGLRHFLYKPLDIPDHHRQLPQFTSPELEAPYSREEERQRLSDLYHRLHARLHSTSRPLRLIYHVAEKETLLAWVTSKFELYTCLSPLVTKAGAILVVTKLLRWVKKEEDRLFIRYPPKYSTPPATSTDQAAHNGLFTGL

SEQ ID NO: 36965 - protein, 109 aa, Homo sapiens [sequence omitted]

SEQ ID NO: 36966 - protein, 145 aa, Homo sapiens
MILILQMRKMRHKEVCLRGTKVHKKCYLASEGLKHFHEANEDCISKGGILVIPRNSDEINALQDYGKRSLPGVNDFWLGINDMVTEGKFVDVNGIAISFLNWDRAQPNGGKRENCVLFSQSAQGKWSDEACRSSKRYICEFTIPQ

SEQ ID NO: 36967 - protein, 287 aa, Homo sapiens [sequence omitted]

SEQ ID NO: 36968 - protein, 42 aa, Homo sapiens
VPPQSAMAALRYAGLDDTDSEDELPPGWEERTTKDGWVYYAK

SEQ ID NO: 36969 - protein, 51 aa, Homo sapiens
VPPQSAMAALRYAGLDDTDSEDELPPGWEERTTKDGWVYYAKFAIRMGTRN

SEQ ID NO: 36970 - protein, 120 aa, Homo sapiens
VPPQSAMAALRYAGLDDTDSEDELPPGWEERTTKDGWVYYANHTEEKTQWEHPKTGKRKRVAGDLPYGWEQETDENGQVFFVEAEKKMLTYAAFSLCFGYLKGKGPLSCNHVTCFTLSIT

SEQ ID NO: 36971 - protein, 144 aa, Homo sapiens
VPPQSAMAALRYAGLDDTDSEDELPPGWEERTTKDGWVYYANHTEEKTQWEHPKTGKRKRVAGDLPYGWEQETDENGQVFFVDHINKRTTYLDPRLAFTVDDNPTKPTTRQRYDGSTTAMEILQGRDFTGKVVVVTGANSGIAF

SEQ ID NO: 36972 - protein, 195 aa, Homo sapiens
VPPQSAMAALRYAGLDDTDSEDELPPGWEERTTKDGWVYYANHTEEKTQWEHPKTGKRKRVAGDLPYGWEQETDENGQVFFVDHINKRTTYLDPRLAFTVDDNPTKPTTRQRYDGSTTAMEILQGRDFTGKVVVVTGANSGIGFETAKSFALHGAHVILACRNMARASEAVSRILEEWKTKYHPPPEKCRIKIFH

SEQ ID NO: 36973 - protein, 179 aa, Homo sapiens
VPPQSAMAALRYAGLDDTDSEDELPPGWEERTTKDGWVYYANHTEEKTQWEHPKTGKRKRVAGDLPYGWEQETDENGQVFFVDHINKRTTYLDPRLAFTVDDNPTKPTTRQRYDGSTTAMEILQGRDFTGKVVVVTGANSGIGFETAKSFALHGAHVILACRNMARASEAVSRILEEWN

SEQ ID NO: 36974 - protein, 369 aa, Homo sapiens
VPPQSAMAALRYAGLDDTDSEDELPPGWEERTTKDGWVYYANHTEEKTQWEHPKTGKRKRVAGDLPYGWEQETDENGQVFFVDHINKRTTYLDPRLAFTVDDNPTKPTTRQRYDGSTTAMEILQGRDFTGKVVVVTGANSGIGFETAKSFALHGAHVILACRNMARASEAVSRILEEWHKAKVEAMTLDLALLRSVQHFAEAFKAKNVPLHVLVCNAATFALPWSLTKDGLETTFQVNHLGHFYLVQLLQDVLCRSAPARVIVVSSESHRFTDINDSLGKLDFSRLSPTKNDYWAMLAYNRSKLCNILFSNELHRRLSPRGVTSNAVHPGNMMYSNIHRSWWVYTLLFTLARPFTKSMVSDCLVEGGHF

SEQ ID NO: 36975 - protein, 219 aa, Homo sapiens
VPPQSAMAALRYAGLDDTDSEDELPPGWEERTTKDGWVYYANHTEEKTQWEHPKTGKRKRVAGDLPYGWEQETDENGQVFFVDHINKRTTYLDPRLAFTVDDNPTKPTTRQRYDGSTTAMEILQGRDFTGKVVVVTGANSGIGKASCHVGRILKHTRVEELSLLPTAINRELPPPCTVLLSQNWRVWEGCTSTTAAAACPHQKLRAKRRPGPCGRSARG

SEQ ID NO: 36976 - protein, 420 aa, Homo sapiens
VPPQSAMAALRYAGLDDTDSEDELPPGWEERTTKDGWVYYANHTEEKTQWEHPKTGKRKRVAGDLPYGWEQETDENGQVFFVDHINKRTTYLDPRLAFTVDDNPTKPTTRQRYDGSTTAMEILQGRDFTGKVVVVTGANSGIGFETAKSFALHGAHVILACRNMARASEAVSRILEEWHKAKVEAMTLDLALLRSVQHFAEAFKAKNVPLHVLVCNAATFALPWSLTKDGLETTFQVNHLGHFYLVQLLQDVLCRSAPARVIVVSSESHRFTDINDSLGKLDFSRLSPTKNDYWAMLAYNRSKLCNILFSNELHRRLSPRGVTSNAVHPGNMMYSNIHRSWWVYTLLFTLARPFTKSMQQGAATTVYCAAVPELEGLGGMYFNNCCRCMPSPEAQSEETARTLWALSERLIQERLGSQSG

SEQ ID NO: 36977 - protein, 240 aa, Homo sapiens
VPPQSAMAALRYAGLDDTDSEDELPPGWEERTTKDGWVYYANHTEEKTQWEHPKTGKRKRVAGDLPYGWEQETDENGQVFFVDHINKRTTYLDPRLAFTVDDNPTKPTTRQRYDGSTTAMEILQGRDFTGKVVVVTGANSGIGFETAKSFALHGAHVILACRNMARASEAVSRILEEWQQGAATTVYCAAVPELEGLGGMYFNNCCRCMPSPEAQSEETARTLWALSERLIQERLGSQSG

SEQ ID NO: 36978 - protein, 317 aa, Homo sapiens
VPPQSAMAALRYAGLDDTDSEDELPPGWEERTTKDGWVYYANHTEEKTQWEHPKTGKRKRVAGDLPYGWEQETDENGQVFFVDHINKRTTYLDPRLAFTVDDNPTKPTTRQRYDGSTTAMEILQGRDFTGKVVVVTGANSGIATGSCHHRVLCCCPRTGGSGRDVLQQLLPLHALTRSSERRDGPDPVGAQREADPRTAWQPVRLSGAQSGWAHTPALCVSPHASARAGPLPNVPPTQIRKSKGNKSSHNRVKNLKYQWEAGNSWGKVSLFWGWARHRSLCFLVVACLKVKTCLVCRFRISLEKHQQFSFFYCYRIA

SEQ ID NO: 36979 - protein, 15 aa, Homo sapiens
LIPERILSYLVSIIL

SEQ ID NO: 36980 - protein, 25 aa, Homo sapiens
VRLQEMWAVPKRWMRLLLSSSRGPS

SEQ ID NO: 36981 - protein, 96 aa, Homo sapiens
MKQFKNSFKKILQRALKNVTVSFRETEENAVWIRIAWGTQYTKPNQYKPTYVVYYSQTPYAFTSSSMLRRNTPLLGQALTIASKHHQIVKMDLRSR

SEQ ID NO: 36982 - protein, 1780 aa, Homo sapiens
MSAVGLVLLVLALRLRATTVKPEEGSFCSNSQVAFRDACYEFVPLGRTFRDAQSWCEGQGGHLVFIQDEGTQWFLQKHISQDREWWIGLTWNLARNGTTEGPGTWLDTSNVTYSNWHGGQAAAAPDTCGHIGRGPSSEWVTSDCAQTFAFMCEFRVGQSLACEGLNATVHCGLGQVIQVQDAVYGRQNPHFCTQDAGRPSDLEQGCSWANVKEEVAGQCQELQSCQVAADETYFGNLCPTQGSYLWVQYQCREALQLMVSSESFIFDNVTISLTWLLSPYIGNLSCIISTGDSHTFDPYNPPSVSSNVTHQFTSPGEFTVFAECTTSEWHVTAQRQVTVRDKMETLSVTACSGLSQSGAGPLCQAVFGDPLWIQVELDGGTGVTYTVLLGDITLAESTTQKGSLPYNLILDRETQKLMGPGRHRLEIQATGNTTTSTISRNITVHLVELLSGLQASWASDHLELGQDLLITISLAQGTPEELTFEVAGLNATFSHEQVSFGEPFGICRLAVPVEGTFLVTMLVRNAFSNLSLEIGNITITAPSGLQEPSGMNAEGKSKDKGDMEVYIQPGPYVDPFTTVTLGWPDNDKELRFQWSCGSCWALWSSCVERQLLRTDQRELVVPASCLPPPDSAVTLRLAVLRGQELENRAEQCLYVSAPWELRPRVSCERNCRPVNASKDILLRVTMGEDSPVAMFSWYLDNTPTEQAEPLLDACRLRGFWPRSLTLLQSNTSTLLLNSSFLQSRGEVIRIRATALTRHAYGEDTYVISTVPPREVPACTIAPEEGTVLTSFAIFCNASTALGPLEFCFCLESGSCLHCGPEPALPSVYLPLGEENNDFVLTVVISATNRAGDTQQTQAMAKVALGDTCVEDVAFQAAVSEKIPTALQGEGGPEQLLQLAKAVSSMLNQEHESQGSGQSLSIDVRQKVREHVLGSLSAVTTGLEDVQRVQELAEVLREVTCRSKELTPSAQWEASLALQHASEALLTVSAKARPEDQRRQAATRDLFQAVGSVLEASLSNRPEEPAEASSSQIATVLRLLRVMEHVQTTLLLGKLPGGLPAMLATPSISVYTNRIQPWSWQGSSLRPDAADSATFMLPAASSLSSLEGGQEPVDIKIMSFPKSPFPARSHFDVSGTVGGLRVTSPSGQLIPVKNLSENIEILLPRHSQRHSQPTVLNLTSPEALWVNVTSGEATLGIQLHWRPDIALTLSLGYGYHPNKSSYDAQTHLVPMVAPDELPTWILSPQDLRFGEGVYYLTVVPESDLEPAPGRDLTVGITTFLSHCVFWDEVQETWDDSGCQVGPRTSPYQTHCLCNHLTFFGSTFLVMSNAINIHQTAELFATFEDNPVVVTTVGCLCVVYVLVVIWARRKDAQDQAKVKVTVLEDNDPFAQYHYLVTVYTGHRRGAATSSKVTVTLYGLDGEREPHHLADPDTPVFERGAVDAFLLSTLFPLGELRSLRLWHDNSGDRPSWYVSRVLVYDLVMDRKWYFLCNSWLSINVGDCVLDKVFPVATEQDRKQFSHLFFMKTSAGFQDGHIWYSIFSRCARSSFTRVQRVSCCFSLLLCTMLTSIMFWGVPKDPAEQKMDLGKIEFTWQEVMIGLESSILMFPINLLIVQIFQNTRPRVAKEQNTGKWDRGSPNLTPSPQPMEDGLLTPEAVTKDVSRIVSSLFKALKVPSPALGWDSVNLMDINSLLALVEDVIYPQNTSGQVFWEEAKKREDPVTLTLGSSEMKEKSQCPKPKAARSGPWKDSAYRQCLYLQLEHVEQELRLVGPRGFSQPHSHA

SEQ ID NO: 36983 - protein, 611 aa, Homo sapiens
VSGAGPVGRGAGAAMAEGSAVSDPQHAARLLRALSSFREESRFCDAHLVLDGEEIPVQKNILAAASPYIRTKLNYNPPKDDGSTYKIELEGISVMVMREILDYIFSGQIRLNEDTIQDVVQAADLLLLTDLKTLCCEFLEGCIAAENCIGIRDFALHYCLHHVHYLATEYLETHFRDVSSTEEFLELSPQKLKEVISLEKLNVGNERYVFEAVIRWIAHDTEIRKVHMKDVMSALWVSGLDSSYLREQMLNEPLVREIVKECSNIPLSQPQQGEAMLANFKPRGYSECIVTVGGEERVSRKPTAAMRCMCPLYDPNRQLWIELAPLSMPRINHGVLSAEGFLFVFGGQDENKQTLSSGEKYDPDANTWTALPPMNEARHNFGIVEIDGMLYILGGEDGEKELISMECYDIYSKTWTKQPDLTMVRKIGCYAAMKKKIYAMGGGSYGKLFESVECYDPRTQQWTAICPLKERRFGAVACGVAMELYVFGGVRSREDAQGSEMVTCKSEFYHDEFKRWIYLNDQNLCIPASSSFVYGAVPIGASIYVIGDLDTGTNYDYVREFKRSTGTWHHTKPLLPSDLRRTGCAALRIANCKLFRLQLQQGLFRIRVHSP

SEQ ID NO: 36984 - protein, 709 aa, Homo sapiens
LRTTNQAGRAAALFPARREVTDLRPGVRGRMGQAAEPTGYMENSVSYSAIEDVQLLSWENAPKYCLQLTIPGGTVLLQAANSYLRDQWFHSLQWKKKIYKYKKVLSNPSRWEVVLKEIRTLVDMALTSPLQDDSINQAPLEIVSKLLSENTNLTTQEHENIIVAIAPLLENNHPPPDLCEFFCKHCRERPRSMVVIEVFTPVVQRILKHNMDFGKCPRLRLFTQEYILALNELNAGMEVVKKFIQSMHGPTGHCPHPRVLPNLVAVCLAAIYSCYEEFINSRDNSPSLKEIRNGCQQPCDRKPTLPLRLLHPSPDLVSQEATLSEARLKSVVVASSEIHVEVERTSTAKPALTASAGNDSEPNLIDCLMVSPACSTMSIELGPQADRTLGCYVEILKLLSDYDDWRPSLASLLQPIPFPKEALAHEKFTKELKYVIQRFAEDPRQEVHSCLLSVRAGKDGWFQLYSPGGVACDDDGELFASMVHILMGSCYKTKKFLLSLAENKLGPCMLLALRGNQTMVEILCLMLEYNIIDNNDTQLQIISTLESTDVGKRMYEQLCDRQRELKELQRKGGPTRLTLPSKSTDADLARLLSSGSFGNLENLSLAFTNVTSACAEHLIKLPSLKQLNLWSTQFGDAGLRLLSEHLTMLQVLNLCETPVTDAGLLALSSMKSLCSLNMNSTKLSADTYEDLKAKLPNLKEVDVRYTEAW

SEQ ID NO: 36985 - protein, 120 aa, Homo sapiens
MHSGRQWWLLLAVLLRHVSLIHRLAQLPGPFFLDTIPSPSHTSHSVPDPGSNSGRLVSSRELKYVIQRFAEDPRQEVHSCLLSVRAGKDGWFQLYSPGGVACDDDGELFASMVRSGTPVG

SEQ ID NO: 36986 - protein, 39 aa, Homo sapiens
VAGLQSHSQLALVAVARLLVQWGCRPQVPTLPSPTEYVT

SEQ ID NO: 36987 - protein, 825 aa, Homo sapiens
LERPTMSTTVNVDSLAEYEKSQIKRALELGTVMTVFSFRKSTPERRTVQVIMETRQVAWSKTADKIEGFLDIMEIKEIRPGKNSKDFERAKAVRQKEDCCFTILYGTQFVLSTLSLAADSKEDAVNWLSGLKILHQEAMNASTPTIIESWLRKQIYSVDQTRRNSISLRELKTILPLINFKVSSAKFLKDKFVEIGAHKDELSFEQFHLFYKKLMFEQQKSILDEFKKDSSVFILGNTDRPDASAVYLHDFQRFLIHEQQEHWAQDLNKVRERMTKFIDDTMRETAEPFLFVDEFLTYLFSRENSIWDEKYDAVDMQDMNNPLSHYWISSSHNTYLTGDQLRSESSPEAYIRCLRMGCRCIELDCWDGPDGKPVIYHGWTRTTKIKFDDVVQAIKDHAFVTSSFPVILSIEEHCSVEQQRHMAKAFKEVFGDLLLTKPTEASADQLPSPSQLREKIIIKHKKLGPRGDVDVNMEDKKDEHKQQGELYMWDSIDQKWTRHYCAIADAKLSFSDDIEQTMEEEVPQDIPPTELHFGEKWFHKKVEKRTSAEKLLQEYCMETGGKDGTFLVRESETFPNDYTLSFWRSGRVQHCRIRSTMEGGTLKYYLTDNLTFSSIYALIQHYRETHLRCAEFELRLTDPVPNPNPHESKPWYYDSLSRGEAEDMLMRIPRDGAFLIRKREGSDSYAITFRARGKVKHCRINRDGRHFVLGTSAYFESLVELVSYYEKHSLYRKMRLRYPVTPELLERYNMERDINSLYDVSRMYVDPSEINPSMVRCRTSNSHDFGVTRLMWIPSCSHGSYNRAREDFGKPGQNNFFFFLRRKDD

SEQ ID NO: 36988 - protein, 42 aa, Homo sapiens
MAQGCLVEVSRASGAHPNGVSIVINTVTFTCKEIIILETCCF

SEQ ID NO: 36989 - protein, 12 aa, Homo sapiens
LVLVISLYPMLS

SEQ ID NO: 36990 - protein, 136 aa, Homo sapiens
MQPRTPLVLCVLLSQVLLLTSAEDLDCTPGFQQKVFHINQPAEFIEDQSILNLTFSDCKGNDKLRYEVSSPYFKVNSDGGLVALRNITAVGKTLFVHARTPHAEDMAELVIVGGKDIQGSLQVTHLFEITWVQGGH

SEQ ID NO: 36991 - protein, 83 aa, Homo sapiens
LRVALGSPKRSTGAKAARLGQDLERLPGAGSLPPRACCHGLVESSLPARTLPAGVHVQAPAARTPHPRPGTCPGCPLTRAVAR

SEQ ID NO: 36992 - protein, 280 aa, Homo sapiens
VQFPFPNILRGCAFRRHIWEPQRQMLMLSRVRGREGTGISTPQVASMNQRRVDFYLASIEDMLVAIGGRNENGALSSVETYSPKTDSWSYVAGLPRFTYGHAGTIYKDFVYISGGHDYQIGPYRKNLLCYDHRTDVWEERRPMTTARGWHSMCSLGDSIYSIGGSDDNIESMERFDVLGVEAYSPQCNQWTRVAPLLHANSESGVAVWEGRIYILGGYSWENTAFSKTVQVYDREADKWSRGVDLPKAIAGGSACVCALEPRPEDKKKKGKGKRHQDRGQ

SEQ ID NO: 36993 - protein, 89 aa, Homo sapiens
LLLLSCLLAVPAVPAVPALSPLLPRLLDAGDASELVIGALRRLGLIPKISHYVHANQRSIVMTPGGHPVTPITALSTSTQRQSFLASLL

SEQ ID NO: 36994 - protein, 56 aa, Homo sapiens
LLLLSCLLAVPAVPAVPALSPLLPRLLDAGDASELVIGALRRAQAPSSARGAQAAP

SEQ ID NO: 36995 - protein, 527 aa, Homo sapiens
LEPCGELKRPALPEEPRLPRESHSCCRSGAMSCVLGGVIPLGLLFLVCGSQGYLLPNVTLLEELLSKYQHNESHSRVRRAIPREDKEEILMLHNKLRGQVQPQASNMEYMTWDDELEKSAAAWASQCIWEHGPTSLLVSIGQNLGAHWGRYRSPGFHVQSWYDEVKDYTYPYPSECNPWCPERCSGPMCTHYTQIVWATTNKIGCAVNTCRKMTVWGEVWENAVYFVCNYSPKGNWIGEAPYKNGRPCSECPPSYGGSCRNNLCYREETYTPKPETDEMNEVETAPIPEENHVWLQPRVMRPTKPKKTSAVNYMTQVVRCDTKMKDRCKGSTCNRYQCPAGCLNHKAKIFGTLFYESSSSICRAAIHYGILDDKGGLVDITRNGKVPFFVKSERHGVQSLSKYKPSSSFMVSKVKVQDLDCYTTVAQLCPFEKPATHCPRIHCPAHCKDEPSYWAPVFGTNIYADTSSICKTAVHAGVISNESGGDVDVMPVDKKKTYVGSLRNGVQSESLGTPRDGKAFRIFAVRQ

SEQ ID NO: 36996 - protein, 526 aa, Homo sapiens
LEPCGELKRPALPEEPRLPRESHSCCRSGAMSCVLGGVIPLGLLFLVCGSQGYLLPNVTLLEELLSKYQHNESHSRVRRAIPREDKEEILMLHNKLRGQVQPQASNMEYMTWDDELEKSAAAWASQCIWEHGPTSLLVSIGQNLGAHWGRYRSPGFHVQSWYDEVKDYTYPYPSECNPWCPERCSGPMCTHYTQIVWATTNKIGCAVNTCRKMTVWGEVWENAVYFVCNYSPKGNWIGEAPYKNGRPCSECPPSYGGSCRNNLCYRETYTPKPETDEMNEVETAPIPEENHVWLQPRVMRPTKPKKTSAVNYMTQVVRCDTKMKDRCKGSTCNRYQCPAGCLNHKAKIFGTLFYESSSSICRAAIHYGILDDKGGLVDITRNGKVPFFVKSERHGVQSLSKYKPSSSFMVSKVKVQDLDCYTTVAQLCPFEKPATHCPRIHCPAHCKDEPSYWAPVFGTNIYADTSSICKTAVHAGVISNESGGDVDVMPVDKKKTYVGSLRNGVQSESLGTPRDGKAFRIFAVRQ

SEQ ID NO: 36997 - protein, 164 aa, Homo sapiens
MQPSGHRLRDVEHHPLLAENDNYDSSSSSSSEADVADRVWFIRDGCGMICAVMTWLLVAYADFVVTFVMLLPSKDFWYSVVNGVIFNCLAVLALSSHLRTMLTDPYLQKMYSENGSSLPVGEQLCRRKESKIFCALHYVYSSVFSPCSDPLWISVHLLCPRAVD

SEQ ID NO: 36998 - protein, 14 aa, Homo sapiens
MHLKILKKRHKMFK

SEQ ID NO: 36999 - protein, 1164 aa, Homo sapiens
VSWRVVRGSSTPAPCQGRPASAGSSLSSESSPVSSPATNHSSPASTPKRVPMGPIIVPPGGHSVPSTPPVVTIAPTKTVNGVWRSESRQDAGSRSSSGGRERLIVEPPLPQEKAGGPAIPSHLLSTPYPFGLSPSSVVQDSRFPPLNLQRPVHHVVPPSTVTEDYLRSFRPYHTTDDLRMSSLPPLGLDPATAAAYYHPSYLAPHPFPHPAFRMDDSYCLSALRSPFYPIPTPGSLPPLHPSAMHLHLSGVRYPPELSHSSLAALHSERMSGLSAERLQMDEELRREREREREREREREADREREKEREREREKEREQEKEREREKERERELERQREQRAREKELLAAKALEPSFLPVAELHGLRGHATEERGKPSEQLTPTRAEKLKDAGLQAPKPVQHPLHPVPTPHHTVPSLISNHGIFSLPSSSAATALLIQRTNEEEKWLARQRRLRQEKEDRQSQVSEFRQQVLEQHLDMGRPPVPAEAEHRPESTTRPGPNRHEPGGRDPPQHFGGPPPLISPKPQLHAAPTALWNPVSLMDNTLETRRAESHSLHSHPAAFEPSRQAAVPLVKVERVFCPEKAEEGPRKREPAPLDKYQPPPPPPREGGSLEHQPFLPGPGPFLAELEKSTQTILGQQRASLPQAATFGELSGPLKPGSPYRPPVPRAPDPAYIYDEFLQQRRRLVSKLDLEERRRREAQEKGYYYDLDDSYDESDEEEVRAHLRCVAEQPPLKLDTSSEKLEFLQLFGLTTQQQKEELVAQKRRKRRRMLRERSPSPPTIQSKRQTPSPRLALSTRYSPDEMNNSPNFEEKKKFLTIFNLTHISAEKRKDKERLVEMLRAMKQKALSAAVADSLTNSPRDSPAVSLSEPATQQASLDVEKPVGVAASLSDIPKAAEPGKLEQVRPQELSRVQELAPASGEKARLSEAPGGKKSLSMLHYIRGAAPKDIPVPLSHSTNGKSKPWEPFVAEEFAHQFHESVLQSTQKALQKHKGSVAVLSAEQNHKVDTSVHYNIPELQSSSRAPPPQHNGQQEPPTARKGPPTQELDRDSEEEEEEDDEDGEDEEEVPKRKWQGIEAVFEAYQEHIEEQNLERQVLQTQCRRLEARHYSLSLTAEQLSHSVAELRSQKQKMVSERERLQAELDHLRKCLALPAMHWPRGYLKGYPR

SEQ ID NO: 37000 - protein, 78 aa, Homo sapiens
MPVQTRLQRRWPPESPRASATLRSSCDYCEDWPEAQRISASLLDSRSYETLVDFDNHLDDIRNDWTNPEINKAVLHLC

SEQ ID NO: 37001 - protein, 49 aa, Homo sapiens
MPGRAAFRQALERLLSGGAGREARLESGAAASQRRESLFQEPRPKRGRA

SEQ ID NO: 37002 - protein, 30 aa, Homo sapiens
MQASPPLVLLCLFSLLQLAAFAGEVPTQDS

SEQ ID NO: 37003 - protein, 158 aa, Homo sapiens
VRAGPHRPRGVVTIIMRPLEQPQALLPGGRARGASGSAGWHSHPARRMAGKNSTFQTYKKEVCLPRHSMHPGPWAICCECQTRFGGRLPVSRVEAALPYWVPLSLRPRKQHPCWMHAAGTTAGGSAVMSACCPSSSSSRPPTRTSYRLLQRVCCPSAS

SEQ ID NO: 37004 - protein, 50 aa, Homo sapiens
LYPNSRLLPVGLVGEKLQMGKKLITSCLLAVQTVAPGYTQLRTRPPPAAL

SEQ ID NO: 37005 - protein, 126 aa, Homo sapiens
VQDGPGTALQGPPPCPCTLTPIFLSQPDPRAWEPPADRPSLPNSGCPLWTRRLAEPLWRRSWLSWSGEAALGLSRLVVNVEPISAGISRSVPHTIMREALGPEGCSDLGGHKFSQQPGVTRDQTRR

SEQ ID NO: 37006 - protein, 136 aa, Homo sapiens
LHVSCSKTRRASTCRLALSTHPLRSSAAEGPSVKTLPDPRAWEPPADRPSLPNSGCPLWTRRLAEPLWRRSWLSWSGEAALGLSRLVVNVEPISAGISRSVPHTIMREALGPEGCSDLGGHKFSQQPGVTRDQTRR

SEQ ID NO: 37007 - protein, 159 aa, Homo sapiens
LGISLTCACLLALGRPGSAHSPFPDTRCQEDSDCGTSVPPTLTKTFLYNELYVYNTRKDTWTKVDIPSPPPRRCAHQAVVVPQGGGQLWVFGGEFASPNGEQFYHYKDLWVLHLATKTWEQVKSTGGPSGRSGHRMVAWKRQLILFGGFHESTRNQHGN

SEQ ID NO: 37008 - protein, 260 aa, Homo sapiens
VGSGPGCLQAMGSPEPTQGPRLSPILIPYSGRRYKVGRASGALCHQDSLPPILELGLTFLRASAGFSVPTSSSFALPEPLRSLCLGNGEGLGLSLTLTVLAWILGLSGTLGALVLFMVATGIFQEALWHLLLLSFSVEALPCFFFFPFFLLCRCLRAELQIQQRLDGTLSLDLMRLESDGETGCAAESSVLQGAQLIAVASSDPAAAGVDGSPLQGSDIQVQYVQLAPVSDHTAGAQTAEALQPTLQPEMQLEHGAIQIQ

SEQ ID NO: 37009 - protein, 121 aa, Homo sapiens
VICPPQPPKVLGLQTVTATPRLECNGVISAHCNLRFPGSTDSPASASRVAGTTGGKRDEELVLPINSSLSVTLHQDQLKTTTTAVISKDFTEDRIWLNGREEDVGQPRLQACLRESELGSP

SEQ ID NO: 37010 - protein, 59 aa, Homo sapiens
LRAVGPFMGLTWWIHIKPVSVGTSVLAAGGEGKPDPAPPGGPSGVWLGVKGALWQYGVG

SEQ ID NO: 37011 - protein, 154 aa, Homo sapiens
MADSELQLVEQRIRSFPDFPTPGVVFRDISPVLKDPASFRAAIGLLARHLKATHGGRIDYIAGECPVAASRALPPLRAPRAARGLCASAWGRAFGVLQGAPGRAPCLGRPGRVVRLSPRGRRAVQASFPQVPGPQPRTGVTELPGQLVSLECPS

SEQ ID NO: 37012 - protein, 525 aa, Homo sapiens
VVAMAAVVAATRWWQLLLVLSAAGMGASGAPQPPNILLLLMDDMGWGDLGVYGEPSRETPNLDRMAAEGLLFPNFYSANPLCSPSRAALLTGRLPIRNGFYTTNAHARNAYTPQEIVGGIPDSEQLLPELLKKAGYVSKIVGKWHLGHRPQFHPLKHGFDEWFGSPNCHFGPYDNKARPNIPVYRDWEMVGRYYEEFPINLKTGEANLTQIYLQEALDFIKRQARHHPFFLYWAVDATHAPVYASKPFLGTSQRGRYGDAVREIDDSIGKILELLQDLHVADNTFVFFTSDNGAALISAPEQGGSNGPFLCGKQTTFEGGMREPALAWWPGHVTAGQVSHQLGSIMDLFTTSLALAGLTPPSDRAIDGLNLLPTLLQGRLMDRPIFYYRGDTLMAATLGQHKAHFWTWTNSWENFRQGIDFCPGQNVSGVTTHNLEDHTKLPLIFHLGRDPGERFPLSFASAEYQEALSRITSVVQQHQEALVPAQPQLNVCNWAVMNWAPPGCEKLGKCLTPPESIPKKCLWSH

SEQ ID NO: 37013 - protein, 119 aa, Homo sapiens
VVAMAAVVAATRWWQLLLVLSAAGMGASGAPQPPNILLLLMDDESLPPPRAAGSPRWAPVLPDGCLCPLENAERSDCFPEHALQRPGVRVLTAVAGPFSALSGISLLKILCFRISSFHF

SEQ ID NO: 37014 - protein, 81 aa, Homo sapiens
VVAMAAVVAATRWWQLLLVLSAAGMGASGAPQPPNILLLLMDDESLPPPRAAGSPRWAPVLPDGCLCPLENAERRSGVPKV

SEQ ID NO: 37015 - protein, 169 aa, Homo sapiens
LPMSFAEEAVNEVKRQAMSELQKAVSDAERKAHELITTERAKMERALAEAKRQASEDALTVINQQEDSSESCWNCGRKASETCSGCNAARYCGSFCQHRDWEKHHHVCGQSLQGPTAVVADPVPGPPEAAHSLGPSLPVGAASPSEAGSAGPSRPGSPSPPGPLDTVPR

SEQ ID NO: 37016 - protein, 12 aa, Homo sapiens
MESTVDDEAPAV

SEQ ID NO: 37017 - protein, 38 aa, Homo sapiens
LGPGLWASSSAIGLALQPTREWMGPFFFADSVRPLPGL

SEQ ID NO: 37018 - protein, 193 aa, Homo sapiens
LPGSKSASQRPGHNDLPWQLLDMFNNRLQDERANLTTLAGTHTNIPKLRAGFVGGQFWSVYTPCDTQNKDAVRRTLEQMDVVHRMCRMYPETFLYVTSSAGIRQAFREGKVASLIGVEGGHSIDSSLGVLRALYQLGMRYLTLTHSCNTPWADNWLVDTGDSEPQSQGLSPFGQVSGVGAASHPRGEGRGPGG

SEQ ID NO: 37019 - protein, 205 aa, Homo sapiens
LASLLPLRVLLLSLWPWTFTAKQLEKLAKKAEKDSKAEQAKVKKALLQKNVECARVYAENAIRKKNEGVNWLRMASRVDAVASKVQTAVTMKGVTKNMAQVTKALDKALSTMDLQKVSSVMDRFEQQVQNLDVHTSVMEDSMSSATTLTTPQEQVDSLIMQIAEENGLEVLDQLSQLPEGASAVGESSVRSQEDQLSRRLAALRN

SEQ ID NO: 37020 - protein, 271 aa, Homo sapiens
VRHHGDRAPRSRAPPLWRDRPPSSRESIPCDRKWGGDPGSPRRVQLGRFDRRRDLTPPGVGVPSPSPSAAPVIVAMDDTLFQLKFTAKQLEKLAKKAEKDSKAEQAKVKKALLQKNVECARVYAENAIRKKNEGVNWLRMASRVDAVASKVQTAVTMKGVTKNMAQVTKALDKALSTMDLQKVSSVMDRFEQQVQNLDVHTSVMEDSMSSATTLTTPQEQVDSLIMQIAEENGLEVLDQLSQLPEGASAVGESSVRSQEDQLSRRLAALRN

SEQ ID NO: 37021 - protein, 27 aa, Homo sapiens
MWPLPLGLWPGDKERVWAAHREGWLTG

SEQ ID NO: 37022 - protein, 23 aa, Homo sapiens
LASLLPLRVLLLSLWPWTIPCSS

SEQ ID NO: 37023 - protein, 475 aa, Homo sapiens
LRFEISRGSRTTSAVNLRLLVLLMATLILCRVGAQPPTGAEEGACLVDLITSSPQCLHGLVGWVHGHAASCGALPHLQRTLSSEYCGVIQVVWGCDQGHDYTMDTSSSCKAFLLDSALAVKWPWDKETAPRLPQHRGWNPGDAPQTSQGRGTGTPVGAETKTLPSTDVAQPPSDSDAVGPRSGFPPQPSLPLCRAPGQLGEKQLPSSTSDDRVKDEFSDLSEGDVLSEDENDKKQNAQSSDESFEPYPERKVSGKKSESKEAKKSEEPRIRKKPGPKPGWKKKLRCEREELPTIYKCPYQGCTAVYRGADGMKKHIKEHHEEVRERPCPHPGCNKVFMIDRYLQRHVKLIHTEVRNYICDECGQTFKQRKHLLVHQMRHSGAKPLQCEVCGFQCRQRASLKYHMTKHKAETELDFACDQCGRRFEKAHNLNVHMSMVHPLTQTQDKALPLEAEPPPGPPSPSVTTEGQAVKPEPT

SEQ ID NO: 37024 - protein, 91 aa, Homo sapiens
VLSFVSALVVCFPEAQQLLEDWVARLMAQAFESCQLDSMVTAFLVVRQAALEGPSAFLSYADWFKVSDLPIGYLIPDLPRRPGSGDHAVPT

SEQ ID NO: 37025 - protein, 141 aa, Homo sapiens
MSWLEENVHEVLQAVDAGDPAVEACENRRKVLYQRAPRNIHRHVILSEIKEAVAALPPDVTTQSVMGFDPLPPSDTIYSYVRPERKGEEERNSVIWGSQLCVCRPRSFPSPPNVQALACRPLWQVRVTQWKQVCSEVGKTY

SEQ ID NO: 37026 - protein, 10 aa, Homo sapiens
LVVRIPEPRR

SEQ ID NO: 37027 - protein, 801 aa, Homo sapiens
LDRTMAVQGSQRRLLGSLNSTPTAIPQLGLAANQTGARCLEVSISDGLFLSLGLVSLVENALVVATIAKNRNLHSPMYCFICCLALSDLLVSGSNVLETAVILLLEAGALVARAAVLQQLDNVIDVITCSSMLSSLCFLGAIAVDRYISIFYALRYHSIVTLPRARRAVAAIWVASVVFSTLFIAYYDHVAVLLCLVVFFLAMLVLMAVLYVHMLARACQHAQGIARLHKRQRPVHQGFGLKGAVTLTILLGIFFLCWGPFFLHLTLIVLCPEHPTCGCIFKNFNLFLALIICNAIIDPLIYAFHSQELRRTLKEVLTCSCSQDRALVSWDVKSLGGSVCQELLPQQPQEKGLCDQKASSTALQRLLQKEFWEVISDEHGIDPSGNYVGDSDLQLERISVYYNEASSHKYVPRAILVDLEPGTMDSVRSGAFGHLFRPDNFIFGQSGAGNNWAKGHYTEGAELVDSVLDVVRKECENCDCLQGFQLTHSLGGGTGSGMGTLLISKVREEYPDRIMNTFSVVPSPKVSDTVVEPYNATLSIHQLVENTDETYCIDNEALYDICFRTLKLATPTYGDLNHLVSATMSGVTTSLRFPGQLNADLRKLAVNMVPFPRLHFFMPGFAPLTARGSQQYRALTVPELTQQMFDAKNMMAACDPRHGRYLTVATVFRGRMSMKEVDEQMLAIQSKNSSYFVEWIPNNVKVAVCDIPPRGLKMSSTFIGNSTAIQELFKRISEQFTAMFRRKAFLHWYTGEGMDEMEFTEAESNMNDLVSEYQQYQDATAEEEGEMYEDDEEESEAQGPK

SEQ ID NO: 37028 - protein, 517 aa, Homo sapiens
VETGRHLRHSPRTPLNRDREEPQAARPQQQPHEHTVGQGGASLENKRSISRLSKLESFLREKRETGTGPRHPHTALCTQTGHRRPQFWEVISDEHGIDPSGNYVGDSDLQLERISVYYNEASSHKYVPRAILVDLEPGTMDSVRSGAFGHLFRPDNFIFGQSGAGNNWAKGHYTEGAELVDSVLDVVRKECENCDCLQGFQLTHSLGGGTGSGMGTLLISKVREEYPDRIMNTFSVVPSPKVSDTVVEPYNATLSIHQLVENTDETYCIDNEALYDICFRTLKLATPTYGDLNHLVSATMSGVTTSLRFPGQLNADLRKLAVNMVPFPRLHFFMPGFAPLTARGSQQYRALTVPELTQQMFDAKNMMAACDPRHGRYLTVATVFRGRMSMKEVDEQMLAIQSKNSSYFVEWIPNNVKVAVCDIPPRGLKMSSTFIGNSTAIQELFKRISEQFTAMFRRKAFLHWYTGEGMDEMEFTEAESNMNDLVSEYQQYQDATAEEEGEMYEDDEEESEAQGPK

SEQ ID NO: 37029 - protein, 39 aa, Homo sapiens
MREIVHIQAGQCGNQIGAKMRTLRHGILVTCARSHSWEG

SEQ ID NO: 37030 - protein, 95 aa, Homo sapiens
MREIVHIQAGQCGNQIGAKFWEVISDEHGIDPSGNYVGDSDLQLERISVYYNEASCECLPQPPYPSPGLTRSQRLTDQVSAPGLTSSQHLCPPMG

SEQ ID NO: 37031 - protein, 96 aa, Homo sapiens
MLSLEETEAGEEGSRITLPGGGGCRRGDFPWDDEDFRSLALLGAGVAMGFFYLYFRDPGREITWKHFVQYYLARGGPAGSREQTICACYSCPWDLF

SEQ ID NO: 37032 - protein, 125 aa, Homo sapiens [sequence omitted]

SEQ ID NO: 37033 - protein, 144 aa, Homo sapiens
MLSLEETEAGEEGSRITLPGGGGCRRGDFPWDDEDFRSLALLGAGVAMGFFYLYFRDPGREITWKHFVQYYLARGLVDRLEVVNKQSVRVIPAPGTSSEKFLWFNIGSVDTFERNLESAQGELGIEPHNQAVVVYTSESDGSFL

SEQ ID NO: 37034 - protein, 100 aa, Homo sapiens
MLSLEETEAGEEGSRITLPGGGGCRRGDFPWDDEDFRSLALLGAGVAMGFFYLYFRDPGREITWKHFVQYYLARGLVDRLEVVNKQSVRVIPAPGTSSET

SEQ ID NO: 37035 - protein, 199 aa, Homo sapiens
MLSLEETEAGEEGSRITLPGGGGCRRGDFPWDDEDFRSLALLGAGVAMGFFYLYFRDPGREITWKHFVQYYLARGLVDRLEVVNKQSVRVIPAPGTSSEGAMLTGPPGTGKTLLAKATAGEATVPFITVNGSEFLEMFIGVGPARGSTLPPTSWCWLAPTALTSWTRPSCGLAGFIARFTLVPLTLKAGPPSLRSTCAH

SEQ ID NO: 37036 - protein, 205 aa, Homo sapiens [sequence omitted]

SEQ ID NO: 37037 - protein, 85 aa, Homo sapiens
LVLGARGPPAEGVHHTPGQGAPLRTVPAPGAAALHPGAALRPHVHDARGPGSRAAVLRVDHYGGSGRPEEGHPECLRPGCAVWGE

SEQ ID NO: 37038 - protein, 86 aa, Homo sapiens
VFGVMRACVLSSGVHHTPGQGAPLRTVPAPGAAALHPGAALRPHVHDARGPGSRAAVLRVDHYGGSGRPEEGHPECLRPGCAVWGE

SEQ ID NO: 37039 - protein, 127 aa, Homo sapiens
LGGHSPENQPRNTRDDTPYHTKDSKFFRFYHQQMKAFHMFLPSSFLALWRRTTCRTLTHGVPVAPFPGCRTSSLCPGLLPGLTSDHSRRHLLRVPRTHLGVGAVPRCAACLRATVVPPNGQLCRCWH

SEQ ID NO: 37040 - protein, 144 aa, Homo sapiens
MWRTLIFKKTGALASFVEVRRASDTSLLREVGQVVSSDSDSDSDLSSSSLEDRLPSTGVRDRKGDKPWKESGGSVEAPRMGFTHPPGHLSGCQSSLASGETGTGSADPPGGPRPGLTRRAPVKDTPGRAPAADAAPAGPSSCLG

SEQ ID NO: 37041 - protein, 39 aa, Homo sapiens
LFLEGIYVLVCCCVVSPKSQSDEATKRPPELQESSSSLG

SEQ ID NO: 37042 - protein, 98 aa, Homo sapiens
LAHVASVFLKLPDLEDLMKRENQKILTPLVSLDTPGKATVQVVILADPDGHEICFVGDEAFRELSKMDPEGSKLLDDAMAADKSDEWFAKHNKPKASG

SEQ ID NO: 37043 - protein, 33 aa, Homo sapiens
LGPQVLRHEEFEEGCKAACNGYDTLFLKISFRL

SEQ ID NO: 37044 - protein, 161 aa, Homo sapiens
VHTHPCMRGARPASKGKFISVQGPLRRAFLQLRPPRRVPLCLTSQCFFSPSFSTPDPITDSEDDGESEAAKQLIQPIAEKIIAKYKAKEEEAPLLFFVAGEDDMTDSLRDYTNLPEAAPLLTILDMSARAKYVMDVEEITPAIVEAFVNDFLAEKLKPEPI

SEQ ID NO: 37045 - protein, 127 aa, Homo sapiens
LPALTLQRVRGERPFLSLFTPVALGRTVNTLCTEERHAQEEGSTDHRLPVSSLARSPCSLGKAVNLSLKMQCLALPKVPAWHPSVGVWHRRLLLASKVMDRKGQSESRPRLGTFASQPQGAPQPQAR

SEQ ID NO: 37046 - protein, 33 aa, Homo sapiens
MVTQRGELEASCLLLPLLIFTLGIRQKAKKTAA

SEQ ID NO: 37047 - protein, 60 aa, Homo sapiens
LRESETLSASIRRADPAGAAAAMDDREDLVYQAKLAEQAERYDGEEQNKEALQDVEDENQ

SEQ ID NO: 37048 - protein, 116 aa, Homo sapiens
LRESETLSASIRRADPAGAAAAMDDREDLVYQAKLAEQAERYDEMVESMKKVAGMDVELTVEERNLLSVAYKNVIGARRASWRIISSIEQKEENKGGEDKLKMIREYRQMVGKSSF

SEQ ID NO: 37049 - protein, 146 aa, Homo sapiens
LRESETLSASIRRADPAGAAAAMDDREDLVYQAKLAEQAERYDEMVESMKKVAGMDVELTVEERNLLSVAYKNVIGARRASWRIISSIEQKEENKGGEDKLKMIREYRQMVETELKLICCDILDVLDKHLIPAANTGESKVFYYKM

SEQ ID NO: 37050 - protein, 123 aa, Homo sapiens
LRESETLSASIRRADPAGAAAAMDDREDLVYQAKLAEQAERYDEMVESMKKVAGMDVELTVEERNLLSVAYKNVIGARRASWRIISSIEQKEENKGGEDKLKMIREYRQMVRLLCHHPPLSTV

SEQ ID NO: 37051 - protein, 129 aa, Homo sapiens
LRESETLSASIRRADPAGAAAAMDDREDLVYQAKLAEQAERYDGELGGQRGAGILGPSAAAHRGREQETKWRHRLRAWPGGLGSGSRKWPGSSRGDGRLYALECDPFAVLNCKQLAGREAGATGWRSWL

SEQ ID NO: 37052 - protein, 173 aa, Homo sapiens
LRQENPLNPGGEGYSEPRLCHCPPAWATEQKKKRKCFKLQPRSSSSADGWVSPSRLRIGDQEFDSLPALLEFYKIHYLDTTTLIEPVSRSRQGSGVILRQEEAEYVRALFDFNGNDEEDLPFKKGDILRIRDKPEEQWWNAEDSEGKRGMIPVPYVEKYRPASASVSALIGGR

SEQ ID NO: 37053 - protein, 63 aa, Homo sapiens
LSPSFCLPPEGNLRTAARAPRTYTQLLLWRWTKGCGRQTWRSRPGWGRGWVRGVCGVGVGSRS

SEQ ID NO: 37054 - protein, 833 aa, Homo sapiens
LPAMGLGLLLPLLLLWTRGTQGSELDPKGQHVCVASSPSAELQCCAGWRQKDQECTIPICEGPDACQKDEVCVKPGLCRCKPGFFGAHCSSRCPGQYWGPDCRESCPCHPHGQCEPATGACQCQADRWGARCEFPCACGPHGRCDPATGVCHCEPGWWSSTCRRPCQCNTAAARCEQATGACVCKPGWWGRRCSFRCNCHGSPCEQDSGRCACRPGWWGPECQQQCECVRGRCSAASGECTCPPGFRGARCELPCPAGSHGVQCAHSCGRCKHNEPCSPDTGSCESCEPGWNGTQCQQPCLPGTFGESCEQQCPHCRHGEACEPDTGHCQRCDPGWLGPRCEDPCPTGTFGEDCGSTCPTCVQGSCDTVTGDCVCSAGYWGPSCNASCPAGFHGNNCSVPCECPEGLCHPVSGSCQPGSGSRDTALIAGSLVPLLLLFLGLACCACCCWAPRSDLKDRPARDGATVSRMKLQVWGTLTSLGSTLPCRSLSSHKLPWVTVSHHDPEVPFNHSFIEPPSAGWATDDSFSSDPESGEADEVPAYCVPPQEGMVPVAQAGSSEASLAAGAFPPPEDASTPFAIPRTSSLARAKRPSVSFAEGTKFAPQSRRSSGELSSPLRKPKRLSRGAQSGPEGREAEESTGPEEAEAPESFPAAASPGDSATGHRRPPLGGRTVAEHVEAIEGSVQESSGPVTTIYMLAGKPRGSEGPVRSVFRHFGSFQKGQAEAKVKRAIPKPPRQALNRKKGSPGLASGSVGQSPNSAPKAGLPGATGPMAVRPEEAVRGLGAGTESSRRAQEPVSGCGSPEQDPQKQAEEERQEEPEYENVVPISRPPEP

SEQ ID NO: 37055 - protein, 747 aa, Homo sapiens
LPAMGLGLLLPLLLLWTRGTQGSELDPKGQHVCVASSPSAELQCCAGWRQKDQECTIPICEGPDACQKDEVCVKPGLCRCKPGFFGAHCSSRCPGQYWGPDCRESCPCHPHGQCEPATGACQCQADRWGARCEFPCACGPHGRCDPATGVCHCEPGWWSSTCRRPCQCNTAAARCEQATGACVCKPGWWGRRCSFRCNCHGSPCEQDSGRCACRPGWWGPECQQQCECVRGRCSAASGECTCPPGFRGARCELPCPAGSHGVQCAHSCGRCKHNEPCSPDTGSCESCEPGWNGTQCQQPCLPGTFGESCEQQCPHCRHGEACEPDTGHCQPGSGSRDTALIAGSLVPLLLLFLGLACCACCCWAPRSDLKDRPARDGATVSRMKLQVWGTLTSLGSTLPCRSLSSHKLPWVTVSHHDPEVPFNHSFIEPPSAGWATDDSFSSDPESGEADEVPAYCVPPQEGMVPVAQAGSSEASLAAGAFPPPEDASTPFAIPRTSSLARAKRPSVSFAEGTKFAPQSRRSSGELSSPLRKPKRLSRGAQSGPEGREAEESTGPEEAEAPESFPAAASPGDSATGHRRPPLGGRTVAEHVEAIEGSVQESSGPVTTIYMLAGKPRGSEGPVRSVFRHFGSFQKGQAEAKVKRAIPKPPRQALNRKKGSPGLASGSVGQSPNSAPKAGLPGATGPMAVRPEEAVRGLGAGTESSRRAQEPVSGCGSPEQDPQKQAEEERQEEPEYENVVPISRPPEP

SEQ ID NO: 37056 - protein, 572 aa, Homo sapiens
LPAMGLGLLLPLLLLWTRGTQGSELDPKGQHVCVASSPSAELQCCAGWRQKDQECTIPICEGPDACQKDEVCVKPGLCRCKPGFFGAHCSSRCPGQYWGPDCRESCPCHPHGQCEPATGACQCQADRWGARCEFPCACGPHGRCDPATGVCHCEPGWWSSTCRRPCQCNTAAARCEQATGACVCKPGWWGRRCSFRCNCHGSPCEQDSGRCACRPGWWGPECQQQCECVRGRCSAASGECTCPPGFRGARCELPCPAGSHGVQCAHSCGRCKHNEPCSPDTGSCESCEPGWNGTQCQQPCLPGTFGESCEQQCPHCRHGEACEPDTGHCQRCDPGWLGPRCEDPCPTGTFGEDCGSTCPTCVQGSCDTVTGDCVCSAGYWGPSCNASCPAGFHGNNCSVPCECPEGLCHPVSGSCQPGSGSRDTALIAGSLVPLLLLFLGLACCACCCWAPRSDLKDRPARDGATVSRMKLQVWGTLTSLGSTLPCRSLSSHKLPWVTASSSRPLPAGPLMTPSHPILSLERQMRFLPTVCHPKKGWSLWPRQGRQRPAWLQVLSRPLRTPPRHSPSRAPPA

SEQ ID NO: 37057 - protein, 345 aa, Homo sapiens
LPAMGLGLLLPLLLLWTRGTQGSELDPKGQHVCVASSPSAELQCCAGWRQKDQECTIPICEGPDACQKDEVCVKPGLCRCKPGFFGAHCSSRCPGQYWGPDCRESCPCHPHGQCEPATGACQCQADRWGARCEFPCACGPHGRCDPATGVCHCEPGWWSSTCRRPCQCNTAAARCEQATGACVCKPGWWGRRCSFRCNCHGSPCEQDSGRCACRPGWWGPECQQQCECVRGRCSAASGECTCPPGFRGARCELPCPAGSHGVQCAHSCGRCKHNEPCSPDTGSCESCEPGWNGTQCQQPCLPGTFGESCEQQCPHCRHGEACEPDTGHCQRCDPGWLGPRGPVIL

SEQ ID NO: 37058 - protein, 340 aa, Homo sapiens
LPAMGLGLLLPLLLLWTRGTQGSELDPKGQHVCVASSPSAELQCCAGWRQKDQECTIPICEGPDACQKDEVCVKPGLCRCKPGFFGAHCSSRCPGQYWGPDCRESCPCHPHGQCEPATGACQCQADRWGARCEFPCACGPHGRCDPATGVCHCEPGWWSSTCRRPCQCNTAAARCEQATGACVCKPGWWGRRCSFRCNCHGSPCEQDSGRCACRPGWWGPECQQQCECVRGRCSAASGECTCPPGFRGARCELPCPAGSHGVQCAHSCGRCKHNEPCSPDTGSCESCEPGWNGTQCQQPCLPGTFGESCEQQCPHCRHGEACEPDTGHCQRCDPGWLGPR

SEQ ID NO: 37059 - protein, 267 aa, Homo sapiens
LPAMGLGLLLPLLLLWTRGTQGSELDPKGQHVCVASSPSAELQCCAGWRQKDQECTIPICEGPDACQKDEVCVKPGLCRCKPGFFGAHCSSRCPGQYWGPDCRESCPCHPHGQCEPATGACQCQADRWGARCEFPCACGPHGRCDPATGVCHCEPGWWSSTCRRPCQCNTAAARCEQATGACVCKPGWWGRRCSFRCNCHGSPCEQDSGRCACRPGWWGPECQQQCECVRGRCSAASGECTCPPGFRGARCELPCPAGSHGVQCAHR

SEQ ID NO: 37060 - protein, 125 aa, Homo sapiens [sequence omitted]

SEQ ID NO: 37061 - protein, 319 aa, Homo sapiens
LGVDERGKVPADPKGAAGRGAGAPALPGNGFPVPAESAGAEGTDPDSPQPPNRQAMAPTGLLVAGASFLAFRGLHWGLRRLPTPESAARDRWQWWNLCVSLAHSLLSGTGALLGLSLYPQMAADPIHGHPRWALVLVAVSVGYFLADGADLLWNQTLGKTWDLLCHHLVVVSCLSTAVLSGHYVGFSMVSLLLELNSACLHLRKLLLLSRQAPSLAFSVTSWASLATLALFRLVPLGWMSLWLFRQHHQVPLALVTLGGIGLVTVGIMSIILGIRILVNDVLQSRPHPPSPGHEKTRGTRTRRDNGPVTSNSSTLSLKD

SEQ ID NO: 37062 - protein, 20 aa, Homo sapiens
MGVNQRMRLLTLCTLAWPIP

SEQ ID NO: 37063 - protein, 168 aa, Homo sapiens
MDILPRISHEVLLPVLSFLTSLVTGFPSGAQARTILCVKTISLIALICLRIGQEMVQQHLSEPVATFFQVFSQLHELRQQDLKLDPAGRGEGQLPQVVFSDGQQRPVDPALLDELQKVFTLEMAYTIYVPFSCLLGTAPSRSPSQSSWLSPPLGGPILCPCPRVSSGF

SEQ ID NO: 37064 - protein, 502 aa, Homo sapiens
LCVAARSPQRNMALLWGLLVLSWSCLQGPCSVFSPVSAMEPLGRQLTSGPNQEQVSPLTLLKLGNQEPGGQTALKSPPGVCSRDPTPEQTHRLARAMMAFTADLFSLVAQTSTCPNLILSPLSVALALSHLALGAQNHTLQRLQQVLHAGSGPCLPHLLSRLCQDLGPGAFRLAARMYLQKGFPIKEDFLEQSEQLFGAKPVSLTGKQEDDLANINQWVKEATEGKIQEFLSGLPEDTVLLLLNAIHFQGFWRNKFDPSLTQRDSFHLDEQFTVPVEMMQARTYPLRWFLLEQPEIQVAHFPFKNNMSFVVLVPTHFEWNVSQVLANLSWDTLHPPLVWERPTKVRLPKLYLKHQMDLVATLSQLGLQELFQAPDLRGISEQSLVVSGVQHQSTLELSEVGVEAAAATSIAMSRMSLSSFSVNRPFLFFIFEDTTGLPLFVGSVRNPNPSAPRELKEQQDSPGNKDFLQSLKGFPRGDKLFGPDLKLVPPMEEDYPQFGSPK

SEQ ID NO: 37065 - protein, 438 aa, Homo sapiens
LCVAARSPQRNMALLWGLLVLSWSCLQGPCSVFSPVSAMEPLGRQLTSGPNQEQVSPLTLLKLGNQVQPGAQNHTLQRLQQVLHAGSGPCLPHLLSRLCQDLGPGAFRLAARMYLQKGFPIKEDFLEQSEQLFGAKPVSLTGKQEDDLANINQWVKEATEGKIQEFLSGLPEDTVLLLLNAIHFQGFWRNKFDPSLTQRDSFHLDEQFTVPVEMMQARTYPLRWFLLEQPEIQVAHFPFKNNMSFVVLVPTHFEWNVSQVLANLSWDTLHPPLVWERPTKVRLPKLYLKHQMDLVATLSQLGLQELFQAPDLRGISEQSLVVSGVQHQSTLELSEVGVEAAAATSIAMSRMSLSSFSVNRPFLFFIFEDTTGLPLFVGSVRNPNPSAPRELKEQQDSPGNKDFLQSLKGFPRGDKLFGPDLKLVPPMEEDYPQFGSPK

SEQ ID NO: 37066 - protein, 505 aa, Homo sapiens
LEPVLGKKILMPRNMALLWGLLVLSWSCLQGPCSVFSPVSAMEPLGRQLTSGPNQEQVSPLTLLKLGNQEPGGQTALKSPPGVCSRDPTPEQTHRLARAMMAFTADLFSLVAQTSTCPNLILSPLSVALALSHLALGAQNHTLQRLQQVLHAGSGPCLPHLLSRLCQDLGPGAFRLAARMYLQKGFPIKEDFLEQSEQLFGAKPVSLTGKQEDDLANINQWVKEATEGKIQEFLSGLPEDTVLLLLNAIHFQGFWRNKFDPSLTQRDSFHLDEQFTVPVEMMQARTYPLRWFLLEQPEIQVAHFPFKNNMSFVVLVPTHFEWNVSQVLANLSWDTLHPPLVWERPTKVRLPKLYLKHQMDLVATLSQLGLQELFQAPDLRGISEQSLVVSGVQHQSTLELSEVGVEAAAATSIAMSRMSLSSFSVNRPFLFFIFEDTTGLPLFVGSVRNPNPSAPRELKEQQDSPGNKDFLQSLKGFPRGDKLFGPDLKLVPPMEEDYPQFGSPK

SEQ ID NO: 37067 - protein, 36 aa, Homo sapiens
LGGGQASGSREPDPHLSSKQAQRVSCTGAWAGGRCF

SEQ ID NO: 37068 - protein, 125 aa, Homo sapiens
VWSCSVSTGPRMQALVLLLCIGALLGHSSCQNPASPPEEGSPDPDSTGALVEEEDPFFKVPVNKLAAAVSNFGYDLYRVRSSTSPTTNVLLSPLSVATALSALSLGLMPLTYFRKISKDENSLAT

SEQ ID NO: 37069 - protein, 32 aa, Homo sapiens
MQALVLLLCIGALLGHSSCQNPASPPEERAHA

SEQ ID NO: 37070 - protein, 79 aa, Homo sapiens
LLRLFSELRIKSSFVAPLEKSYGTRPRVLTGNPRLDLQEINNWVQAQMKGKLARSTKEIPDEISILLLGVAHFKVGNKV

SEQ ID NO: 37071 - protein, 163 aa, Homo sapiens
MLSHLSQIAQLPLTGSMSIIFFLPLKVTQNLTLIEESLTSEFIHDIDRELKTVQAVLTVPKLKLSYEGEVTKSLQEMKLQSLFDSPDFSKITGKPIKLTQVEHRAGFEWNEDGAGTTPSPGLQPAHLTFPLDYHLNQPFIFVLRDTDTGALLFIGKILDPRGP

SEQ ID NO: 37072 - protein, 650 aa, Homo sapiens
VRATSRANNCAARGTRVGKLELLRGPRGSLGGGAMVGQLSEGAIAAIMQKGDTNIKPILQVINIRPITTGNSPPRYRLLMSDGLNTLSSFMLATQLNPLVEEEQLSSNCVCQIHRFIVNTLKDGRRVVILMELEVLKSAEAVGVKIGNPVPYNEGLGQPQVAPPAPAASPAASSRPQPQNGSSGMGSTVSKAYGASKTFGKAAGPSLSHTSGGTQSKVVPIASLTPYQSKWTICARVTNKSQIRTWSNSRGEGKLFSLELVDESGEIRATAFNEQVDKFFPLIEVNKVYYFSKGTLKIANKQFTAVKNDYEMTFNNETSVMPCEDDHHLPTVQFDFTGIDDLENKSKDSLVDIIGICKSYEDATKITVRSNNREVAKRNIYLMDTSGKVVTATLWGEDADKFDGSRQPVLAIKGARVSDFGGRSLSVLSSSTIIANPDIPEAYKLRGWFDAEGQALDGVSISDLKSGGVGGSNTNWKTLYEVKSENLGQGDKPDYFSSVATVVYLRKENCMYQACPTQDCNKKVIDQQNGLYRCEKCDTEFPNFKYRMILSVNIADFQENQWVTCFQESAEAILGQNAAYLGELKDKNEQAFEEVFQNANFRSFIFRVRVKVETYNDESRIKATVMDVKPVDYREYGRRLVMSIRRSALM

SEQ ID NO: 37073 - protein, 135 aa, Homo sapiens [sequence omitted]

SEQ ID NO: 37074 - protein, 579 aa, Homo sapiens
VRAPFCCSRGGGGPRGRRGGGCGRPARGRRPPSKPPAKCSGWQKQAAGSAEQAARPGAEQARGAAGQHHGCLRAPVPSARGWSSPCPCGAGPPGTSGSPACPRLDALGLAAAGAQGFESGPREGVRLGRPRSGGPVANMLRKGCCVELLLLLVAAELPLGGGCPRDCVCYPAPMTVSCQAHNFAAIPEGIPVDSERVFLQNNRIGLLQPGHFSPAMVTLWIYSNNITYIHPSTFEGFVHLEELDLGDNRQLRTLAPETFQGLVKLHALYLYKCGLSALPAGVFGGLHSLQYLYLQDNHIEYLQDDIFVDLVNLSHLFLHGNKLWSLGPGTFRGLVNLDRLLLHENQLQWVHHKAFHDLRRLTTLFLFNNSLSELQGECLAPLGALEFLRLNGNPWDCGCRARSLWEWLQRFRGSSSAVPCVSPGLRHGQDLKLLRAEDFRNCTGPASPHQIKSHTLTTTDRAARKEHHSPHGPTRSKGHPHGPRPGHRKPGKNCTNPRNRNQISKAGAGKQAPELPDYAPDYQHKFSFDIMPTARPKRKGKCARRTPIRAPSGVQQASSASSLGASLLAWTLGLAVTLR

SEQ ID NO: 37075 - protein, 44 aa, Homo sapiens
VQAALASPPPAAAHLLLLLLVRAGRPGLPLQRAAGPSPVPRPQG

SEQ ID NO: 37076 - protein, 394 aa, Homo sapiens
VAALGGKAPAAGSRGAGPEREPGWGGRALRVRRGAAGEARGGWSWRRGAGELRTMCAQYCISFADVEKAHINIRDSIHLTPVLTSSILNQLTGRNLFFKCELFQKTGSFKIRGALNAVRSLVPDALERKPKAVVTHSSGNHGQALTYAAKLEGIPAYIVVPQTAPDCKKLAIQAYGASIVYCEPSDESRENVAKRVTEETEGIMVHPNQEPAVIAGQGTIALEVLNQVPLVDALVVPVGGGGMLAGIAITVKALKPSVKVYAAEPSNADDCYQSKLKGKLMPNLYPPETIADGVKSSIGLNTWPIIRDLVDDIFTVTEDEIKCATQLVWERMKLLIEPTAGVGVAAVLSQHFQTVSPEVKNICIVLSGGNVDLTSSITWVKQAERPASYQSVSV

SEQ ID NO: 37077 - protein, 212 aa, Homo sapiens
LVSQDGIQRPPLHFPQGGHLLSFLSCLENGLLPRGQLEPPLWTQQGKGKVFPKLRKRSSIRSVDMEEMGTGRATDYVFRIIYPGHRHEHNAGDMIEMQGFGPSLPAWHLEPLCSQGSSCLSCSSSSSPHATPSHCSCIPDRLPLRLLCESMKRQIVSRAFYGCECGARRAVAGWGRAALGPSLLLPTAAHRRAGTLPPPVHGADPPVGAGAP

SEQ ID NO: 37078 - protein, 29 aa, Homo sapiens
LCIEAQKVFLCLSVFLSLGLRLHVMEEIL

SEQ ID NO: 37079 - protein, 69 aa, Homo sapiens
MELESKLNEAKEEFTSGGPLGQKRDPKEWIPRPPEKYALSGHRSPVTRVIFHPVFSVMVSASEDATIKI

SEQ ID NO: 37080 - protein, 15 aa, Homo sapiens
LISLLNCRNQIKTTW

SEQ ID NO: 37081 - protein, 829 aa, Homo sapiens
LLPPVGTLPSCQRRGRRRSPPQRRVDTGFCRIGLKLLTSTDLPTLTSQRAGITGMSHHTWPSPALNLDFATYLLRDLGAHFFLEIEGFEPNPTVAKTSPPVFSKPMDSNIRQCISGNCDDMDSPQSPQDDVTETPSNPNSPSAQLAKEEQRRKKRRLKKRIFAAVSEGCVEELVELLVELQELCRRRHDEDVPDFLMHKLTASDTGKTCLMKALLNINPNTKEIVRILLAFAEENDILGRFINAEYTEEAYEGQTALNIAIERRQGDIAALLIAAGADVNAHAKGAFFNPKYQHEGFYFGETPLALAACTNQPEIVQLLMEHEQTDITSRDSRGNNILHALVTVAEDFKTQNDFVKRMYDMILLRSGNWELETTRNNDGLTPLQLAAKMGKAEILKYILSREIKEKRLRSLSRKFTDWAYGPVSSSLYDLTNVDTTTDNSVLEITVYNTNIDNRHEMLTLEPLHTLLHMKWKKFAKHMFFLSFCFYFFYNITLTLVSYYRPREEEAIPHPLALTHKMGWLQLLGRMFVLIWAMCISVKEGIAIFLLRPSDLQSILSDAWFHFVFFIQAVLVILSVFLYLFAYKEYLACLVLAMALGWANMLYYTRGFQSMGMYSVMIQKVILHDVLKFLFVYIVFLLGFGVALASLIEKCPKDNKDCSSYGSFSDAVLELFKLTIGLGDLNIQQNSKYPILFLFLLITYVILTFVLLLNMLIALMGETVENVSKESERIWRLQRARTILEFEKMLPEWLRSRFRMGELCKVAEDDFRLCLRINEVKWTEWKTHVSFLNEDPGPVRRTADFNKIQDSSRNNSKTTLNAFEEVEEFPETSV

SEQ ID NO: 37082 - protein, 272 aa, Homo sapiens
LLPPVGTLPSCQRRGRRRSPPQRRVDTGFCRIGLKLLTSTDLPTLTSQRAGITGMSHHTWPSPALNLDFATYLLRDLGAHFFLEIEGFEPNPTVAKTSPPVFSKPMDSNIRQCISGNCDDMDSPQSPQDDVTETPSNPNSPSAQLAKEEQRRKKRRLKKRIFAAVSEGCVEELVELLVELQELCRRRHDEDVPDFLMHKLTASDTGKTCLMKALLNINPNTKEIVRILLAFAEENDILGRFINAEYTEEAYEGSHSVGQAGVQWRDHDSLQP

SEQ ID NO: 37083 - protein, 47 aa, Homo sapiens [sequence omitted]

SEQ ID NO: 37084 - protein, 106 aa, Homo sapiens
LGDQSRVEMSYIPGQPVTAVVQRVEIHKLRQGENLILGFSIGGGIDQDPSQNPFSEDKTDKVNGWDMTMVTHDQARKRLTKRSEEVVRLLVTRQSLQKAVQQSMLS

SEQ ID NO: 37085 - protein, 132 aa, Homo sapiens
LGDQSRVEMSYIPGQPVTAVVQRVEIHKLRQGENLILGFSIGGGIDQDPSQNPFSEDKTDKGIYVTRVSEGGPAEIAGLQIGDKIMQVNGWDMTMVTHDQARKRLTKRSEEVVRLLVTRQSLQKAVQQSMLS

SEQ ID NO: 37086 - protein, 116 aa, Homo sapiens
VLPMSARGPGGPQARLRARHGAGGLQGALPVAVRLQDREVCHRQEQEGGPAVPAAAGLHPGVPGRMGVPDKEGLPRRRHLPAECCHHQSQGRGLHQHLGSWAADLGCRRLRHSSPE

SEQ ID NO: 37087 - protein, 138 aa, Homo sapiens
VLPMSARGPGGPQARLRARHGAGGLQGALPVAVRLQDREVCHRQEQEGGPAVPAAAGLHPGVPGRMGVPDKEGLPRRRHLPAECCHHQSQGRGLHQHLGSWAADLGCRRLRHSSPGRERLFCGHQPDCDPQPAAERLC

SEQ ID NO: 37088 - protein, 55 aa, Homo sapiens
MRTSPGPGPGRDGKLAAWFVQRVAVMALVSGLHGVHLESGARLCVQFGSVTKRCN

SEQ ID NO: 37089 - protein, 177 aa, Homo sapiens
VLFYIFLLMGLVLPWSADDDSPSRATLGNMKQVWRVGCVPALVGPVGLEHAFRGSVWAEARPTTQCQSQRRGPTTKAKLDQVSIAMAQCAPWPLKIPLCRVCRDLDCKGPSLQVWKHLPIRALSPSGSGLQGAAGFTALQLGSQLSPRVLVEPSRGGWRVGFKGDGNTWGRSWNLVA

SEQ ID NO: 37090 - protein, 281 aa, Homo sapiens
LSASHQILQKVLQGCREDMLGTMALAACQFMEEPGMEVQVRESKHPYNNNTNFEDKVHIPGAIYLSIKFDSQCNTEEGCDELAMSSSSDFQQDRHSFSGSQQKWKDFELPGDTLYYRFTSDMSNTEWGYRFTVTAGHLGRFQTGFEILKQMLSEERVVPHLPLAKIWEWLVGVACRQTGHQRLKAIHLLLRIVRCCGHSDLCDLALLKPLWQLFTHMEYGLFEDVTQPGILLPLHRALTELFFVTENRAQVRPEVWAGSPVPPCAFAPSATQGRSCCLIRA

SEQ ID NO: 37091 - protein, 38 aa, Homo sapiens
LQLGSLESRLLALMTCSFLADVWSWLLRHPCVIPEEGQ

SEQ ID NO: 37092 - protein, 78 aa, Homo sapiens
MSVPDEKGNPPLWLALANNLEDIASTLVRHGCDATCWGPGPGGCLQTLLHRAIDENNEPTACFLIRRSESPQYLSTAF

SEQ ID NO: 37093 - protein, 15 aa, Homo sapiens
MYSKKVLLGIFSMGF

SEQ ID NO: 37094 - protein, 32 aa, Homo sapiens
LRNMALFFLHSTHLLLDFCCTSWQTLAGTGLQ

SEQ ID NO: 37095 - protein, 312 aa, Homo sapiens
VPRLLPPTFAHPQACLLLQKTLSMREVRSCFEDPEWKQLMGQVLAKVTENLRVLGEAQTKAQHQQALSSLELLNVLFRTCKHEKLTLDLTVLLGVLQGQQQSLQQGAHSTGSSRLHDLYWQAMKTLGVQRPKLEKKDAKEIPSATQSPISKKRKKKGFLPETKKRKKRKSEDGTPAEDGTPAATGGSQPPSMGRKKRNRTKAKVPAQANGTPTTKSPAPGAPTRSPSTPAKSPKLQKKNQKPSQVNGAPGSPTEPAGQKQHQKALPKKGVLGKSPLSALARKKARLSLVIRSPSLLQSGAKKKAQVRKAGKP

SEQ ID NO: 37096 - protein, 382 aa, Homo sapiens
LNRTESAPRAVVLPPLLARRRSFLSVSSKIPGLPSTEPGPVRGRRARELHLLGFPCVQRLAWRGPSTERTVGAQQGRGVQLARASSPAAVSSGPRRKPLRHQLDVTRRSMSGSQSEVAPSPQSPRSPEMGRDLRPGSRVLLLLLLLLLVYLTQPGNGNEGSVTGSCYCGKRISSDSPPSVQFMNRLRKHLRAYHRCLYYTRFQLLSWSVCGGNKDPWVQELMSCLDLKECGHAYSGIVAHQKHLLPTSPPISQASEGASSDIHTPAQMLLSTLQSTQRPTLPVGSLSSDKELTRPNETTIHTAGHSLAAGPEAGENQKQPEKNAGPTARTSATVPVLCLLAIIFILTAALSYVLCKRRRGQSPQSSPDLPVHYIPVAPDSNT

SEQ ID NO: 37097 - protein, 109 aa, Homo sapiens
MDSSPAGSRSSWGEWSEPLWCRGGAYLVAFSLRVEAPTTLGDNTAANNVRFRCSDGEELQGPGLSWGDFGDWSDHCPKGACGLQTKIQGPRGLGDDTALNDARLFCCRS

SEQ ID NO: 37098 - protein, 209 aa, Homo sapiens
LIHRRYRMERGAGAKLLPLLLLLRATGFTCAQTDGRNGYTAVIEVTSGGPWGDWAWPEMCPDGFFASGFSLKVEPPQGIPGDDTALNGIRLHCARGNVLGNTHVVESQSGSWGEWSEPLWCRGGAYLVAFSLRVEAPTTLGDNTAANNVRFRCSDGEELQGPGLSWGDFGDWSDHCPKGACGLQTKIQGPRGLGDDTALNDARLFCCRS

SEQ ID NO: 37099 - protein, 109 aa, Homo sapiens
LIHRRYRMERGAGAKLLPLLLLLRATGFTCAQTDGRNGYTAVIEVTSGGPWGDWAWPEMCPDGFFASGFSLKVEPPQGIPGDDTALNGIRLHCARGNVLGNTHVLGRME

SEQ ID NO: 37100 - protein, 77 aa, Homo sapiens
LIHRRYRMERGAGAKLLPLLLLLRATGFTCAQTDGRNGYTAVIEVTSGGPWGDWAWPEMCPDGFFASGFSLKLGRME

SEQ ID NO: 37101 - protein, 256 aa, Homo sapiens
VTERFTTVALRQYRRRKMAATLLAARGAGPAPAWGPEAFTPDWESREVSTGTTIMAVQFDGGVVLGADSRTTTGSYIANRVTDKLTPIHDRIFCCRSGSAADTQAVADAVTYQLGFHSIELNEPPLVHTAASLFKEMCYRYREDLMAGIIIAGWDPQEGGQVYSVPMGGMMVRQSFAIGGSGSSYIYGYVDATYREGMTKEECLQFTANALALAMERDGSSGGVIRLAAIAESGVERQVLLGDQIPKFAVATLPPA

SEQ ID NO: 37102 - protein, 61 aa, Homo sapiens
VSAIHCQCFLLLSTALALAMERDGSSGGVIRLAAIAESGVERQVLLGDQIPKFAVATLPPA

SEQ ID NO: 37103 - protein, 531 aa, Homo sapiens
VSGPGAPFPTEAMGDPAPARSLDDIDLSALRDPAGIFELVEVVGNGTYGQVYKGRHVKTGQLAAIKVMDVTEDEEEEIKQEINMLKKYSHHRNIATYYGAFIKKSPPGNDDQLWLVMEFCGAGSVTDLVKNTKGNALKEDCIAYICREILRGLAHLHAHKVIHRDIKGQNVLLTENAEVKLVDFGVSAQLDRTVGRRNTFIGTPYWMAPEVIACDENPDATYDYRSDIWSLGITAIEMAEGAPPLCDMHPMRALFLIPRNPPPRLKSKKWSKKFIDFIDTCLIKTYLSRPPTEQLLKFPFIRDQPTERQVRIQLKDHIDRSRKKREETEYEYSGSEEEDDSHGEEGEPSSIMNVPGESTLRREFLRLQQENKSNSEALKQQQQLQQQQQRDPEAHIKHLLHQRQRRIEEQKEERRRVEEQQRREREQRKLQEKEQQRRLEDMQALRREEERRQAEREQVERRTRIPALPPSRSCCLPPLLPVPFPLLSPTPRFLLSFLASLFLSVFSHPSTPTLTPSLFLPCLIPISLPHP

SEQ ID NO: 37104 - protein, 1344 aa, Homo sapiens
VSGPGAPFPTEAMGDPAPARSLDDIDLSALRDPAGIFELVEVVGNGTYGQVYKGRHVKTGQLAAIKVMDVTEDEEEEIKQEINMLKKYSHHRNIATYYGAFIKKSPPGNDDQLWLVMEFCGAGSVTDLVKNTKGNALKEDCIAYICREILRGLAHLHAHKVIHRDIKGQNVLLTENAEVKLVDFGVSAQLDRTVGRRNTFIGTPYWMAPEVIACDENPDATYDYRSDIWSLGITAIEMAEGAPPLCDMHPMRALFLIPRNPPPRLKSKKWSKKFIDFIDTCLIKTYLSRPPTEQLLKFPFIRDQPTERQVRIQLKDHIDRSRKKRGEKEETEYEYSGSEEEDDSHGEEGEPSSIMNVPGESTLRREFLRLQQENKSNSEALKQQQQLQQQQQRDPEAHIKHLLHQRQRRIEEQKEERRRVEEQQRREREQRKLQEKEQQRRLEDMQALRREEERRQAEREQEYKRKQLEEQRQSERLQRQLQQEHAYLKSLQQQQQQQQLQKQQQQQLLPGDRKPLYHYGRGMNPADKPAWAREVEERTRMNKQQNSPLAKSKPGSTGPEPPIPQASPGPPGPLSQTPPMQRPVEPQEGPHKSLVAHRVPLKPYAAPVPRSQSLQDQPTRNLAAFPASHDPDPAIPAPTATPSARGAVIRQNSDPTSEGPGPSPNPPAWVRPDNEAPPKVPQRTSSIATALNTSGAGGSRPAQAVRARPRSNSAWQIYLQRRAERGTPKPPGPPAQPPGPPNASSNPDLRRSDPGWERSDSVLPASHGHLPQAGSLERNRVGVSSKPDSSPVLSPGNKAKPDDHRSRPGRPADFVLLKERTLDEAPRPPKKAMDYSSSSEEVESSEDDEEEGEGGPAEGSRDTPGGRSDGDTDSVSTMVVHDVEEITGTQPPYGGGTMVVQRTPEEERNLLHADSNGYTNLPDVVQPSHSPTENSKGQSPPSKDGSGDYQSRGLVKAPGKSSFTMFVDLGIYQPGGSGDSIPITALVGGEGTRLDQLQYDVRKGSVVNVNPTNTRAHSETPEIRKYKKRFNSEILCAALWGVNLLVGTENGLMLLDRSGQGKVYGLIGRRRFQQMDVLEGLNLLITISGKRNKLRVYYLSWLRNKILHNDPEVEKKQGWTTVGDMEGCGHYRVVKYERIKFLVIALKSSVEVYAWAPKPYHKFMAFKSFADLPHRPLLVDLTVEEGQRLKVIYGSSAGFHAVDVDSGNSYDIYIPVHIQSQITPHAIIFLPNTDGMEMLLCYEDEGVYVNTYGRIIKDVVLQWGEMPTSVAYICSNQIMGWGEKAIEIRSVETGHLDGVFMHKRAQRLKFLCERNDKVFFASVRSGGSSQVYFMTLNRNCIMNW

SEQ ID NO: 37105 - protein, 1315 aa, Homo sapiens
VSGPGAPFPTEAMGDPAPARSLDDIDLSALRDPAGIFELVEVVGNGTYGQVYKGRHVKTGQLAAIKVMDVTEDEEEEIKQEINMLKKYSHHRNIATYYGAFIKKSPPGNDDQLWLVMEFCGAGSVTDLVKNTKGNALKEDCIAYICREILRGLAHLHAHKVIHRDIKGQNVLLTENAEVKLVDFGVSAQLDRTVGRRNTFIGTPYWMAPEVIACDENPDATYDYRSDIWSLGITAIEMAEGAPPLCDMHPMRALFLIPRNPPPRLKSKKWSKKFIDFIDTCLIKTYLSRPPTEQLLKFPFIRDQPTERQVRIQLKDHIDRSRKKRGEKEETEYEYSGSEEEDDSHGEEGEPSSIMNVPGESTLRREFLRLQQENKSNSEALKQQQQLQQQQQRDPEAHIKHLLHQRQRRIEEQKEERRRVEEQQRREREQRKLQEKEQQRRLEDMQALRREEERRQAEREQEYKRKQLEEQRQSERLQRQLQQEHAYLKSLQQQQQQQQLQKQQQQQLLPGDRKPLYHYGRGMNPADKPAWAREVEERTRMNKQQNSPLAKSKPGSTGPEPPIPQASPGPPGPLSQTPPMQRPVEPQEGPHKSLVAHRVPLKPYAAPVPRSQSLQDQPTRNLAAFPASHDPDPAIPAPTATPSARGAVIRQNSDPTSEGPGPSPNPPAWVRPDNEAPPKVPQRTSSIATALNTSGAGGSRPAQAVRASNPDLRRSDPGWERSDSVLPASHGHLPQAGSLERNRVGVSSKPDSSPVLSPGNKAKPDDHRSRPGRPASYKRAIGEDFVLLKERTLDEAPRPPKKAMDYSSSSEEVESSEDDEEEGEGGPAEGSRDTPGGRSDGDTDSVSTMVVHDVEEITGTQPPYGGGTMVVQRTPEEERNLLHADSNGYTNLPDVVQPSHSPTENSKGQSPPSKDGSGDYQSRGLVKAPGKSSFTMFVDLGIYQPGGSGDSIPITALVGGEGTRLDQLQYDVRKGSVVNVNPTNTRAHSETPEIRKYKKRFNSEILCAALWGVNLLVGTENGLMLLDRSGQGKVYGLIGRRRFQQMDVLEGLNLLITISGKRNKLRVYYLSWLRNKILHNDPEVEKKQGWTTVGDMEGCGHYRVVKYERIKFLVIALKSSVEVYAWAPKPYHKFMAFKSFADLPHRPLLVDLTVEEGQRLKVIYGSSAGFHAVDVDSGNSYDIYIPVHIQSQITPHAIIFLPNTDGMEMLLCYEDEGVYVNTYGRIIKDVVLQWGEMPTSVAYICSNQIMGWGEKAIEIRSVETGHLDGVFMHKRAQRLKFLCERNDKVFFASVRSGGSSQVYFMTLNRNCIMNW

SEQ ID NO: 37106 - protein, 664 aa, Homo sapiens
LCLRRSFCLPVLMPLLLLLLLLPSPLHPHPICEVSKVASHLEVNCDKRNLTALPPDLPKDTTILHLSENLLYTFSLATLMPYTRLTQLNLDRCELTKLQVDGTLPVLGTLDLSHNQLQSLPLLGQTLPALTVLDVSFNRLTSLPLGALRGLGELQELYLKGNELKTLPPGLLTPTPKLEKLSLANNNLTELPAGLLNGLENLDTLLLQENSLYTIPKGFFGSHLLPFAFLHGNPWLCNCEILYFRRWLQDNAENVYVWKQGVDVKAMTSNVASVQCDNSDKFPVYKYPGKGCPTLGDEGDTDLYDYYPEEDTEGDKVRATRTVVKFPTKAHTTPWGLFYSWSTASLDSQMPSSLHPTQESTKEQTTFPPRWTPNFTLHMESITFSKTPKSTTEPTPSPTTSEPVPEPAPNMTTLEPTPSPTTPEPTSEPAPSPTTPEPTSEPAPSPTTPEPTSEPAPSPTTPEPTPIPTIATSPTILVSATSLITPKSTFLTTTKPVSLLESTKKTIPELDQPPKLRGVLQGHLESSRNDPFLHPDFCCLLPLGFYVLGLFWLLFASVVLILLLSWVGHVKPQALDSGQGAALTTATQTTHLELQRGRQVTVPRAWLLFLRGSLPTFRSSLFLWVRPNGRVGPLVAGRRPSALSQGRGQDLLSTVSIRYSGHSL

SEQ ID NO: 37107 - protein, 638 aa, Homo sapiens
LCLRRSFCLPVLMPLLLLLLLLPSPLHPHPICEVSKVASHLEVNCDKRNLTALPPDLPKDTTILHLSENLLYTFSLATLMPYTRLTQLNLDRCELTKLQVDGTLPVLGTLDLSHNQLQSLPLLGQTLPALTVLDVSFNRLTSLPLGALRGLGELQELYLKGNELKTLPPGLLTPTPKLEKLSLANNNLTELPAGLLNGLENLDTLLLQENSLYTIPKGFFGSHLLPFAFLHGNPWLCNCEILYFRRWLQDNAENVYVWKQGVDVKAMTSNVASVQCDNSDKFPVYKYPGKGCPTLGDEGDTDLYDYYPEEDTEGDKVRATRTVVKFPTKAHTTPWGLFYSWSTASLDSQMPSSLHPTQESTKEQTTFPPRWTPNFTLHMESITFSKTPKSTTEPTPSPTTSEPVPEPAPNMTTLEPTPSPTTPEPTSEPAPSPTTPEPTPIPTIATSPTILVSATSLITPKSTFLTTTKPVSLLESTKKTIPELDQPPKLRGVLQGHLESSRNDPFLHPDFCCLLPLGFYVLGLFWLLFASVVLILLLSWVGHVKPQALDSGQGAALTTATQTTHLELQRGRQVTVPRAWLLFLRGSLPTFRSSLFLWVRPNGRVGPLVAGRRPSALSQGRGQDLLSTVSIRYSGHSL

SEQ ID NO: 37108 - protein, 315 aa, Homo sapiens
LSSPRMGATVFVQPLDLVKNRMQLSGEGAKTREYKTSFHALTSILKAEGLRGIYTGYWGLRMEGRLWVGSSRPWPDMLTPLLLRLSAGLLRQATYTTTRLGIYTVLFERLTGADGTPPGFLLKAVIGMTAGATGAFVGTPAEVALIRMTADGRLPADQRRGYKNVFNALIRITREEGVLTLWRGCIPTMARAVVVNAAQLASYSQSKQFLLDSGYFSDNILCHFCASMISGLVTTAASMPVDIAKTRIQNMRMIDGKPEYKNGLDVLFKVVRYEGFFSLWKGFTPYYARLGPHTVLTFIFLEQMNKAYKRLFLSG

SEQ ID NO: 37109 - protein, 124 aa, Homo sapiens
VEDRWVFGEHGGNLGALTNLMGAWFLFQPAEVGVLVGKDRSSFYVNGLTLGGQKCSVIRDSLLQDGEFSMDLRTKSTGGAPTFNVTVTKTDKTLVLLMGKEGVHGGLINKKCYEMASHLRRSQY

SEQ ID NO: 37110 - protein, 446 aa, Homo sapiens
LSTLTHTSCPAAMAMQKIFAREILDSRGNPTVEVDLHTAKGRFRAAVPSGASTGIYEALELRDGDKGRYLGKGVLKAVENINNTLGPALLQKKLSVVDQEKVDKFMIELDGTENKSKFGANAILGVSLAVCKAGAAEKGVPLYRHIADLAGNPDLILPVPAFNVINGGSHAGNKLAMQEFMILPVGASSFKEAMRIGAEVYHHLKGVIKAKYGKDATNVGDEGGFAPNILENNEALELLKTAIQAAGYPDKVVIGMDVAASEFYRNGKYDLDFKSPDDPARHITGEKLGELYKSFIKNYPVVSIEDPFDQDDWATWTSFLSGVNIQIVGDDLTVTNPKRIAQAVEKKACNCLLLKVNQIGSVTESIQACKLAQSNGWGVMVSHRSGETEDTFIADLVVGLCTGQIKTGAPCRSERLAKYNQLMRIEEALGDKAIFAGRKFRNPKAK

SEQ ID NO: 37111 - protein, 187 aa, Homo sapiens
LSLLCLCPVSALSLPCLCSVSALSLPCLCSVSALSLLQTPPVVSIEDPFDQDDWATWTSFLSGVNIQIVGDDLTVTNPKRIAQAVEKKACNCLLLKVNQIGSVTESIQACKLAQSNGWGVMVSHRSGETEDTFIADLVVGLCTGQIKTGAPCRSERLAKYNQLMRIEEALGDKAIFAGRKFRNPKAK

SEQ ID NO: 37112 - protein, 84 aa, Homo sapiens
MSSPLRCKLAQSNGWGVMVSHRSGETEDTFIADLVVGLCTGQIKTGAPCRSERLAKYNQLMRIEEALGDKAIFAGRKFRNPKAK

SEQ ID NO: 37113 - protein, 107 aa, Homo sapiens
LPGRAPAAGAATAAAPGARVRRPPPGHPARGGGSSEPAPDPSRFRLTLPGKLVPLRRAAPGAPPRRGYLPEPQLVWPGPRSRMGLPLRGPVAARTDTAPLVWGQDAS

SEQ ID NO: 37114 - protein, 1118 aa, Homo sapiens
LGPGRQLRRAGVSGAMAGASVKVAVRVRPFNARETSQDAKCVVSMQGNTTSIINPKQSKDAPKSFTFDYSYWSHTSTEDPQFASQQQVYRDIGEEMLLHAFEGYNVCIFAYGQTGAGKSYTMMGRQEPGQQGIVPQLCEDLFSRVSENQSAQLSYSVEVSYMEIYCERVRDLLNPKSRGSLRVREHPILGPYVQDLSKLAVTSYADIADLMDCGNKARTVAATNMNETSSRSHAVFTIVFTQRCHDQLTGLDSEKVSKISLVDLAGSERADSSGARGMRLKEGANINKSLTTLGKVISALADMQSKKRKSDFIPYRDSVLTWLLKENLGGNSRTAMIAALSPADINYEETLSTLRYADRTKQIRCNAIINEDPNARLIRELQEEVARLRELLMAQGLSASALEGLKTEEGSVRGALPAVSSPPAPVSPSSPTTHNGELEPSFSPNTESQIGPEEAMERLQETEKIIAELNETWEEKLRKTEALRMEREALLAEMGVAVREDGGTVGVFSPKKTPHLVNLNEDPLMSECLLYHIKDGVTRVGQVDMDIKLTGQFIREQHCLFRSIPQPDGEVVVTLEPCEGAETYVNGKLVTEPLVLKSGNRIVMGKNHVFRFNHPEQARLERERGVPPPPGPPSEPVDWNFAQKELLEQQGIDIKLEMEKRLQDLENQYRKEKEEADLLLEQQRLYADSDSGDDSDKRSCEESWRLISSLREQLPPTTVQTIVKRCGLPSSGKRRAPRRVYQIPQRRRLQGKDPRWATMADLKMQAVKEICYEVALADFRHGRAEIEALAALKMRELCRTYGKPDGPGDAWRAVARDVWDTVGEEEGGGAGSGGGSEEGARGAEVEDLRAHIDKLTGILQEVKLQNSSKDRELQALRDRMLRMERVIPLAQDHEDENEEGGEVPWAPPEGSEAAEEAAPSDRMPSARPPSPPLSSWERVSRLMEEDPAFRRGRLRWLKQEQLRLQGLQGSGGRGGGLRRPPARFVPPHDCKLRFPFKSNPQHRESWPGMGSGEAPTPLQPPEEVTPHPATPARRPPSPRRSHHPRRNSLDGGGRSRGAGSAQPEPQHFQPKKHNSYPQPPQPYPAQRPPGPRYPPYTTPPRMRRQRSAPDLKESGAAV

SEQ ID NO: 37115 - protein, 37 aa, Homo sapiens
LWWFLFLGRHGRIISHSPPLPGLLLYLGDLTGLAGVP

SEQ ID NO: 37116 - protein, 80 aa, Homo sapiens
LTSGDLPSSASQSAGITGVSHRTRPVLSCFDNLDPGSSVGRKISSLFAPLGQLHLGPAFCLSACRHCWVAVPKRTAGAPC

SEQ ID NO: 37117 - protein, 13 aa, Homo sapiens
LILQMRKLKTQKQ

SEQ ID NO: 37118 - protein, 12 aa, Homo sapiens
LLLYLILLGMEE

SEQ ID NO: 37119 - protein, 19 aa, Homo sapiens
LWVMILYGFFGAALDLSSD

SEQ ID NO: 37120 - protein, 20 aa, Homo sapiens
MLVTFIGLFSTMNSMMSNKV

SEQ ID NO: 37121 - protein, 213 aa, Homo sapiens
LATSGLNPRDKAFVDFLSDEIKEERKIQKHKTLPKMSGGWELELNGTEAKLVRKVAGEKITVTFNINNSIPPTFDGEEEPSQGQKVEEQEPELTSTPNFVVEVIKNDDGKKALVLDCHYPEDEVGQEDEAESDIFSIREVSFQSTGESEWKDTNYTLNTDSLDWALYDHLMDFLADRGVDNTFADELVELSTALEHQEYITFLEDLKSFVKSQ

SEQ ID NO: 37122 - protein, 297 aa, Homo sapiens
LGCPLHLHVFAVVSAMLPLLRCVPRVLGSSVAGLRAAAPASPFRQLLQPAPRLCTRPFGLLSVRAGSERRPGLLRPRGPCACGCGCGSLHTDGDKAFVDFLSDEIKEERKIQKHKTLPKMSGGWELELNGTEAKLVRKVAGEKITVTFNINNSIPPTFDGEEEPSQGQKVEEQEPELTSTPNFVVEVIKNDDGKKALVLDCHYPEDEVGQEDEAESDIFSIREVSFQSTGESEWKDTNYTLNTDSLDWALYDHLMDFLADRGVDNTFADELVELSTALEHQEYITFLEDLKSFVKSQ

SEQ ID NO: 37123 - protein, 176 aa, Homo sapiens
LGCPLHLHVFAVVSAMLPLLRCVPRVLGSSVAGLRAAAPASPFRQLLQPAPRLCTRPFGLLSVRAGSERRPGLLRPRGPCACGCGCGSLHTDGDKAFVDFLSDEIKEERKIQKHKTLPKMSGGWELELNGTEAKLVRKVAGEKITVTFNINNSIPPTFDGEEEPSQGQKVEEQEVS

SEQ ID NO: 37124 - protein, 19 aa, Homo sapiens
VAGSLCVLQIVTLMVAPEL

SEQ ID NO: 37125 - protein, 168 aa, Homo sapiens
LRGPADPAEAPCPSGSAPTRVARNTAVAPPTAHCALTQTRLTHLPAILPMADGLFRRRPWGLEQIRPDPESEGLFDKPPPEDPPAARGPRSASAAGKKAGRRAGGRAQGGRAGQPPKAASRPPPKKEAPPLDEGCYLDHFPHLSIFIYAAIAFSITSCIFTYIHLQLA

SEQ ID NO: 37126 - protein, 77 aa, Homo sapiens
VPAGNAHLPRVFLTVLLLHLMHEQVKEKAHRADGHSRVGSTYLPLEARAANLTDPVINSTLGAPSSYSHLPAPPTPQ

SEQ ID NO: 37127 - protein, 690 aa, Homo sapiens
LDKRRYIDASFSTKKINGKSWAMSKLAAAHRGAIRALQMFVTQFTDRGEHPLPARCKELGSLIRQLSLCSVKLDADPSVPDVVIDILQQIEALESLLEKKLSPKKVKKCFSEIRSRFPIGSQKALERWPSTSPKGERRPLTAKDTFPQETSRPSVAKQLLADKYQPDTELPETQRLQSELDVLDADIVLEEGPFILDQSASFKDEVLAVAKTKAGKKKPVTENVPFRKKDTLAPARQQGLRKAERGRQSQPHSKSRVQQTTVSSRLKMNRQPVKDRKAPWIPPNPTSPPASPKCAAWLKVKTSPRDATKEPLQQEDPQEESHLTGAVEHEAARLAWLDAETSKRLKELEELKAKEIDSMQKQRLDWLDAETSRRTKELNELKAEEMYRLQQLSVSATHLADKVEEAVLDRLKPLLVKAQRVNSTTEANIHLKDGSSVNTAKAQPAQEVAAVDFESNNIRQLDDFLEDCASELWAVTHAKILGSETLATVEDSKDSPDLEIMMRRMEEMEKYQESVRQRYNKIAYADPRLWMQEENNDQKISAISEKPLSPHPIRITKTVDRKDPAVNIMLERPCNGNSLDESVGTEEGSEKREAPLLSLAEDSQQKEGRAPLFVPPGMQHSIGDYCSRFEQYLRIISHEAVGSFNPWLIAESFSEELVDEALGAVAAELQDMCEDYAEAVFTSEFLEAAT

SEQ ID NO: 37128 - protein, 78 aa, Homo sapiens
LHVVPMARYEEVSVSGFEEFHRAVEQHNGKTIFAYFTGSKDAGGKSWCPDCVQGEAGIRGLLSNGNGRKVEPTARRGA

SEQ ID NO: 37129 - protein, 80 aa, Homo sapiens
LHVVPMARYEEVSVSGFEEFHRAVEQHNGKTIFAYFTGSKDAGGKSWCPDCVQAEPVVREGLKHISEGCVFIYCQVGEKP

SEQ ID NO: 37130 - protein, 85 aa, Homo sapiens
LHVVPMARYEEVSVSGFEEFHRAVEQHNGKTIFAYFTGSKDAGGKSWCPDCVQAEPVVREGLKHISEGCVFIYCQVGEKPYLKNW

SEQ ID NO: 37131 - protein, 128 aa, Homo sapiens
LHVVPMARYEEVSVSGFEEFHRAVEQHNGKTIFAYFTGSKDAGGKSWCPDCVQAEPVVREGLKHISEGCVFIYCQVGEKPYWKDPNNDFRKNLKVTAVPTLLKYGTPQKLVESECLQANLVEMLFSED

SEQ ID NO: 37132 - protein, 103 aa, Homo sapiens
LHVVPMARYEEVSVSGFEEFHRAVEQHNAEPVVREGLKHISEGCVFIYCQVGEKPYWKDPNNDFRKNLKVTAVPTLLKYGTPQKLVESECLQANLVEMLFSED

SEQ ID NO: 37133 - protein, 145 aa, Homo sapiens
LLCQAGGVLVSSFVMAAAVAMETDDAGNRLRFQLELEFVQCLANPNYLNFLAQRGYFKDKAFVNYLKYLLYWKDPEYAKYLKYPQCLHMLELLQYEHFRKELVNAQCAKFIDEQQILHWQHYSRKRMRLQQALAEQQQQNNTSGK

SEQ ID NO: 37134 - protein, 57 aa, Homo sapiens
LLCQAGGVLVSSFVMAAAVAMETDDAGNRLRFQLELEFVQCLANPNYLNCTLSVYTC

SEQ ID NO: 37135 - protein, 58 aa, Homo sapiens
LLCQAGGVLVSSFVMAAAVAMETDDAGNRLRFQLELEFVQCLANPNYLNCKLLSTSLN

SEQ ID NO: 37136 - protein, 120 aa, Homo sapiens
LFLGSGKTLRTPRRIHTRLGLGSHHPASPEPPWTLFARSSPPGSPGAIFREQHSSSTWQVPSFLQGRTRREPEMGEKGGRWMVWKRDGDPDGEKPASQGEGTSCCAAQERPGLRLPASGR

SEQ ID NO: 37137 - protein, 241 aa, Homo sapiens
MCQQSMQKSSLEFHKANECQERPVECKFCKLDMQLSKLELHESYCGSRTELCQGCGQFIMHRMLAQHRDVCRSEQAQLGKGERISAPEREIYCHYCNQMIPENKYFHHMGKCCPDSEFKKHFPVGNPEILPSSLPSQAAENQTSTMEKDVRPKTRSINRFPLHSESSSKKAPRSKNKTLDPLLMSEPKPRTSSPRGDKAAYDILRRCSQCGILLPLPILNQHQVLSLCSLLTFLGTIRTVS

SEQ ID NO: 37138 - protein, 23 aa, Homo sapiens
MSGLLAVLPCLLVCFYLADSSIG

SEQ ID NO: 37139 - protein, 25 aa, Homo sapiens
MASLLCCGPKLAACGIVLSAWGVII

SEQ ID NO: 37140 - protein, 39 aa, Homo sapiens
VPEFNSLPIPLFQIMLGIFFNVHSAVLIEDVPFTEKDFE

SEQ ID NO: 37141 - protein, 186 aa, Homo sapiens
MVGEIFSAAGAAFTKLGELTMQLHPVADSSPAGAKWTETEIEMLRAAVKRFGDDLNHISCVIKERTVAQIKATVKRKVYEDSGIPLPAESPKKGPKKVASGVLSPPPAAPPPSSSSVPEAGGPPIKKQKADVTLSALNDSDANSDVVDIEGLGETPPAKKLNFDQDSLTLDSGLLMTSADPPLLSC

SEQ ID NO: 37142 - protein, 115 aa, Homo sapiens
LEVGGWNRLCDRLPVSAPWLSVPMSSVSVSPRDLTGSLSSPELNSTPSTLPSLLLSFPLRNWKPGQPDDWQGHGLGGGEDCAHFHPDGRWNDDVCQRPYHWVCEAGLGQTSQESH

SEQ ID NO: 37143 - protein, 62 aa, Homo sapiens
LPLSAQESKSFAVGMFKGQLTTDQVFPYPSVLNEEQTQFLKELVEPVSRFFEVRNDSGLGPW

SEQ ID NO: 37144 - protein, 374 aa, Homo sapiens
LRRTLLWSEAVGASSTRGGTGIPGSGEGGAGPGGGEGAMLEAMAEPSPEDPPPTLKPETQPPEKRRRTIEDFNKFCSFVLAYAGYIPPSKEAPDSATLLEKMKLKDSLFDLDGPKVASPLSPTSLTHTSRPPAALTPVPLSQGDLSHPPRKKDRKNRKLGPGAGAGFGVLRRPRPTPGDGEKRSRIKKSKKRKLKKAERGDRLPPPGPPQAPPSDTDSEEEEEEEEEEEEEEMATVVGGEAPVPVLPTPPEAPRPPATVHPEGVPPADSESKEVGSTETSQDGDASSSEGEMRVMDEDIMVESGDDSWDLITCYCRKPFAGRPMIECSLCGTWIHLSCAKIKKTNVPDFFYCQKCKELRPEARRLGGPPKSGEP

SEQ ID NO: 37145 - protein, 44 aa, Homo sapiens
LSSPVPGRMKFVYKEEHPFEKRRSEGEKIRKKYPDRVPLVSSTS

SEQ ID NO: 37146 - protein, 288 aa, Homo sapiens
VPLSAASPATRGPRSPSRRRGAAPGGLAELGRGGPGAGGAGVIGMMRTQCLLGLRTFVAFAAKLWSFFIYLLRRQIRTVIQYQTVRYDILPLSPVSRNRLAQVKRKILVLDLDETLIHSHHDGVLRPTVRPGTPPDFILKVVIDKHPVRFFVHKRPHVDFFLEVVSQWYELVVFTASMEIYGSAVADKLDNSRSILKRRYYRQHCTLELGSYIKDLSVVHSDLSSIVILDNSPGAYRSHPDNAIPIKSWFSDPSDTALLNLLPMLDALRFTADVRSVLSRNLHQHRLW

SEQ ID NO: 37147 - protein, 45 aa, Homo sapiens
VVTCIRFTGTKFLLRGLWRTMLGLNGGRTPECSARFTPRRKDTGS

SEQ ID NO: 37148 - protein, 375 aa, Homo sapiens
VAAVAGTGPGGMSEVEAAAGATAVPAATVPATAAGVVAVVVPVPAGEPQKGGGAGGGGGAASGPAAGTPSAPGSRTPGNPATAVSGTPAPPARSQADKPVLAIQVLGTVKWFNVRNGYGFINRNDTKEDVFVHQTAIKRNNPRKFLRSVGDGETVEFDVVEGEKGAEATNVTGPGGVPVKGSRYAPNRRKSRRFIPRPPSVAPPPMVAEIPSAGTGPGSKGERAEDSGQRPRRWCPPPFFYRRRFVRGPRPPNQQQPIEGTDRVEPKETAPLEGHQQQGDERVPPPRFRPRYRRPFRPRPRQQPTTEGGDGETKPSQGPADGSRPEPQRPRNRPYFQRRRQQAPGPQQAPGPRQPAAPETSAPVNSGDPTTTILE

SEQ ID NO: 37149 - protein, 59 aa, Homo sapiens
LGTVKWFNVRNGYGFINRNDTKEDVFVHQEALRQFSEGEGPWVQWFSKRGPCTSGSSIT

SEQ ID NO: 37150 - protein, 323 aa, Homo sapiens
LGFAGLQSVTLELFSLPCLFFILPDSPEEEEVDKMMEQKMKEEQERRKKKEMEERMSLEETKEQILKLEEKLLALQEEKHQLFLQLKKVLHEEEKRRRKEQSDLTTLTSAAYQQSLTVHTGTHLLSMQGSPGGHNRPGTLMAADRAKQMFGPQVLTTRHYVGSAAAFAGTPEHGQFQGSPGGAYGTAQPPPHYGPTQPAYSPSQQLRAPSAFPAVQYLSQPQPQPYAVHGHFQPTQTGFLQPGGALSLQKQMEHANQQTGFSDSSSLRPMHPQALHPAPGLLASPQLPVQMQPAGKSGFAATSQPGPRLPFIQHSQNPRFYHK

SEQ ID NO: 37151 - protein, 163 aa, Homo sapiens
LGFAGLQSVTLELFSLPCLFFILPDSPEEEEVDKMMEQKMKEEQERRKKKEMEERMSLEETKEQILKLEEKLLALQEEKHQLFLQLKKVLHEEEKRRRKEQSDLTTLTSAAYQQSLTVHTGTHLLSMQGSPGGHNRPGTLMAADRAKQMFGPQVLTVRVGLDA

SEQ ID NO: 37152 - protein, 131 aa, Homo sapiens
LGFAGLQSVTLELFSLPCLFFILPDSPEEEEVDKMMEQKMKEEQERRKKKEMEERMSLEETKEQILKLEEKLLALQEEKHQLFLQLKKVLHEEEKRRRKEQSDLTTLTSAAYQQSLTVHTGTHLLSMQGED

SEQ ID NO: 37153 - protein, 1566 aa, Homo sapiens
VSAEMAAGSGGSGGSGGGPGPGPGGGGGPSGSGSGPGSNGGLGSGGELHPRTGRLVSLSACGRTARRQQPGQEFNHGLVLSREPLRDGRVFTVRIDRKVNSWSGSIEIGVTALDPSVLDFPSSATGLKGGSWVVSGCSVLRDGRSVLEEYGQDLDQLGEGDRVGVERTVAGELRLWVNGRDCGVAATGLPPRVWAVVDLYGKCTQITVLPPEPGFSPPTPIPTPPLEPLAPTEDSALAEQGTSADEAFMVSPAQARPETFPNSLESHNDFANMELSEVVSNTILSAYNGGLLNVNLSSPPAGEGLGSSGAATSPILTSNDALLFHEKCGTLIKLSNNNKTAERRRPLDEFNNGVVMTNRPLRDNEMFEIRIDKLVDKWSGSIEIGVTTHNPNSLEYPATMTNLQSGTIMMSGCGILTNGKGTRREYCEFSLDELQEGDHIGLTRKSNSALHFFINGIDQGVATPLTPPVVYGVVDLYGMAVKVTIVHNNNHSDRLRRNNAILRALSPEGALRRAAPAAQAEPERLLFHPNCGQKAAITHEGRTALRPHATDDFNHGVVLSSRALRDGEVFQVRIDKMVDKWAGSIEIGVTTHNPAYLQLPSTMTNLRSGTWMMTGNGVMHNGTTILDEYGHNLDRLKAGDTVGVVRREDGTLHFFVNGMTQGPAAWNVPPGVYAVVDLYGQAAQATIVDDVEVAPVPEPLPEGNNQVSPSSPSSGAGGSDLRFHQLHGSNAVITNGGRTALRHNCRSEFNDAIVISNRALRDGELFEIVIQKMVDRWSGSIEAGVTAIRPEDLEFPNTMTDIDYDTWMLSGTAIMQDGNTMRNNYGCDLDALGTGARIGMMRTAKGDLHYFINGQDQGAACSGLPPGKEVYAVVDLYGQCVQVSITNATGPMDNSLATSNTATEKSFPLHSPVAGVAHRFHSTCGKNVTLEEDGTRAVRAAGYAHGLVFSTKELRAEEVFEVKVEELDEKWAGSLRLGLTTLAPGEMGPGAGGGGPGLPPSLPELRTKTTWMVSSCEVRRDGQLQRMNYGRNLERLGVGSRVGVRRGADDTMHILVDGEDMGPAATGIAKNVWAVLDLYGPVRGVSIVSSTRLEESEGTQPPSPSSDTGSEGEEDDEGEEHGLGGQNEVGIIPTTLEFLENHGKNILLSNGNRTATRVASYNQGIVVINQPLVPQLLVQVRIDFLNRQWTSSLVLGVITCAPERLNFPASACALKRAAWLLRGRGVFHNGLKICEKFGPNLDTCPEGTILGLRLDSSGGLHLHVNGVDQGVAVPDVPQPCHALVDLYGQCEQVTIVNPEPGAASGKSAGTQGDMEKADMVDGIKESVCWGPPPAASPLKSCEYHALCSRFQELLLLPEDYFMPPPKRSLCYCESCRKLRGDEAHRRRGEPPREYALPFGWCRFNLRVNPRLEAGTLTKKWHMAYHGSNVAAVRRVLDRGELGAGTASILSCRPLKGEPGVGFEEPGENCAPPREEQPPPVLLSPSLQYAGAETLASKVQFRDPKSQRTHQAQVAFQVCVRPGSYTPGPPSAALGEPPDPHFSPAELEWVTKEKGATLLCALLVRVE

SEQ ID NO: 37154 - protein, 344 aa, Homo sapiens
LLFSSLLSTFWGFLCPDTTSPSTTKVAGVSPKPYWVCSTCASNPANLTASTQFCTHPGSSAFSFLSVSPVLPKISPPPVPSSPPSFGGPVTLNVGGTLYSTTLETLTRFPDSMLGAMFRAGTPMPPNLNSQGGGHYFIDRDGKAFRHILNFLRLGRLDLPRGYGETALLRAEADFYQIRPLLDALRELEASQGTPAPTAALLHADVDVSPRLVHFSARRGPHHYELSSVQVDTFRANLFCTDSECLGALRARFGVASGDRAEGSPHFHLEWAPRPVELPEVEYGRLGLQPLWTGGPGERREVVGTPSFLEEVLRVALEHGFRLDSVFPDPEDLLNSRSLRFVRH

SEQ ID NO: 37155 - protein, 317 aa, Homo sapiens
LGRRRAQLPLRLCVCLCVCLAISEFASASRTKPPRHHHLENPSPSPMAGYLPPKGYAPSPPPPYPVTPGYPEPALHPGPGQAPVPAQVPAPAPGFALFPSPGPVALGSAAPFLPLPGVPSGLEFLVQIDQILIHQKAERVETFLGWETCNRYELRSGAGQPLGQAAEESNCCARLCCGARRPLRVRLADPGDREVLRLLRPLHCGCSCCPCGLQEFSIQDADRQTVLRVVGPCWTCGCGTDTNFEVKTRDESRSVGRISKQWGGLVREALTDADDFGLQFPLDLDVRVKAVLLGATFLIDYMFFEKRGGAGPSAVTS

SEQ ID NO: 37156 - protein, 99 aa, Homo sapiens
LAGAEEGEQTPREARPLLPSWGEGVWQRAPRRGHACLTKALIVVRGQPFPQASEHCSSVPNWVGGFERKDSQNVPRISQSQAGQGKLRASRIQGEGCGR

SEQ ID NO: 37157 - protein, 131 aa, Homo sapiens [sequence omitted]

SEQ ID NO: 37158 - protein, 103 aa, Homo sapiens
MTPGALLMLLGALGAPLAPGVRGSEAEGRLREKLFSGYDSSVRPAREVGDRVRVSVGLILAQLISLVRARGGWRSGQPTGRGRGFRQGRTRDRLGAGPGTRPG

SEQ ID NO: 37159 - protein, 267 aa, Homo sapiens
LTGSLAALVTLSSIQVTYFPFDWQNCTMVFSSYSYDSSEVSLQTGLGPDGQGHQEIHIHEGTFIENGQWEIIHKPSRLIQPPGDPRGGREGQRQEVIFYLIIRRKPLFYLVNVIAPCILITLLAIFVFYLPPDAGEKMGLSIFALLTLTVFLLLLADKVPETSLSVPIIIKYLMFTMVLVTFSVILSVVVLNLHHRSPHTHQMPLWVRQIFIHKLPLYLRLKRPKPERDLMPEPPHCSSPGSGWGRGTDEYFIRKPPSDFLFPKPNR

SEQ ID NO: 37160 - protein, 50 aa, Homo sapiens
LGGPGPELEPEPELEAGKTGAAGGGHGDEPGLADAAPSQSEGRGPAEGTR

SEQ ID NO: 37161 - protein, 328 aa, Homo sapiens
LGAQRSGGRPLRSLRAQRPARGSEFDHTQRPASCPQRPLPPRFPCPSLSPARSARRLPLPRSLGSRDGGAVRQAQPPAPMAARRSQRRRGRRGEPGTALLVPLALGLGLALACLGLLLAVVSLGSRASLSAQEPAQEELVAEEDQDPSELNPQTEESQDPAPFLNRLVRPRRSAPKGRKTRARRAIAAHYEVHPRPGQDGAQAGVDGTVSGWEEARINSSSPLRYNRQIGEFIVTRAGLYYLYCQVHFDEGKAVYLKLDLLVDGVLALRCLEEFSATAASSLGPQLRLCQVSGLLALRPGSSLRIRTLPWAHLKAAPFLTYFGLFQVH

SEQ ID NO: 37162 - protein, 377 aa, Homo sapiens
MSASQDSRSRDNGPDGMEPEGVIESNWNEIVDSFDDMNLSESLLRGIYAYGFEKPSAIQQRAILPCIKGYDVIAQAQSGTGKTATFAISILQQIELDLKATQALVLAPTRELAQQIQKVVMALGDYMGASCHACIGGTNVRAEVQKLQMEAPHIIVGTPGRVFDMLNRRYLSPKYIKMFVLDEADEMLSRGFKDQIYDIFQKLNSNTQVVLLSATMPSDVLEVTKKFMRDPIRILVKKEELTLEGIRQFYINVEREEWKLDTLCDLYETLTITQAVIFINTRRKVDWLTEKMHARDFTVSAMVCLPAASLLWVCPSEVSYLKPGFLEPRCLPGLLHICFLFQHGDMDQKERDVIMREFRSGSSRVLITTDLLVSRGN

SEQ ID NO: 37163 - protein, 22 aa, Homo sapiens
MRLAVLFSGALLGLLAGKEEGG

SEQ ID NO: 37164 - protein, 155 aa, Homo sapiens
MAAEADGPLKRLLVPILLPEKCYDQLFVQWDLLHVPCLKILLSKGLGLGIVAGSLLVKLPQVFKILGAKSAEGLSLQSVMLELVALTGTMVYSITNNFPFSSWGEALFLMLQTITICFLVMHYRGQTVKGAGDLPKSRLCGSWEPCWELRSGKAK

SEQ ID NO: 37165 - protein, 11 aa, Homo sapiens
LMLRPPWRKEG

SEQ ID NO: 37166 - protein, 105 aa, Homo sapiens
VGLCPDRGSPRWPTLSSRTAPESQLHLPGRGYPAVPPDSRHPALSGSSGSKSVGPLRGLVAVCEALGLWSQTAGIRMASVRIREAKEGDCGDILRLIRVKTAGRS

SEQ ID NO: 37167 - protein, 39 aa, Homo sapiens
LGLWSQTAGIRMASVRIREAKEGDCGDILRLIRVKTAGR

SEQ ID NO: 37168 - protein, 428 aa, Homo sapiens
LLGSGDTLRSGWERAFHDGDTLPWIGSQTAFRVTAMEEPQSDPSVEPPLSQETFSDLWKLLPENNVLSPLPSQAMDDLMLSPDDIEQWFTEDPGPDEAPRMPEAAPPVAPAPAAPTPAAPAPAPSWPLSSSVPSQKTYQGSYGFRLGFLHSGTAKSVTCTYSPALNKMFCQLAKTCPVQLWVDSTPPPGTRVRAMAIYKQSQHMTEVVRRCPHHERCSDSDGLAPPQHLIRVEGNLRVEYLDDRNTFRHSVVVPYEPPEVGSDCTTIHYNYMCNSSCMGGMNRRPILTIITLEDSSGNLLGRNSFEVRVCACPGRDRRTEEENLRKKGEPHHELPPGSTKRALPNNTSSSPQPKKKPLDGEYFTLQIRGRERFEMFRELNEALELKDAQAGKEPGGSRAHSSHLKSKKGQSTSRHKKLMFKTEGPDSD

SEQ ID NO: 37169 - protein, 15 aa, Homo sapiens
MRRSVPFCPVANSKI

SEQ ID NO: 37170 - protein, 93 aa, Homo sapiens [sequence omitted]

SEQ ID NO: 37171 - protein, 137 aa, Homo sapiens
VLGGARSGGSGTGSWGLRGAGGVRCLATVRGCPGRMQGRERRGIPRFVGMLLLPLTLLLSPSALLCGDQGHWPPDPLHVVTEELGSYSRRKVGAAASRGLMSRLLSLRSQDWHVMREMSRRQEGTPWEVLMLSWGGS

SEQ ID NO: 37172 - protein, 140 aa, Homo sapiens
VKMARSNKPKSWTFFLSLTSWAAPWPSLLLVRHCTLQGPCLLLTCSQAHPKTGLSLGRTLVFRDTSEIYVVTVPHQSSFFPPLAPAWCLRSEGVSSVLLGVSSAEQLIEHLGALQVLSQLTPQTVMEIDGLLGNKPHSKK

SEQ ID NO: 37173 - protein, 63 aa, Homo sapiens
LLSHRSLAWSLPPFSQVFLRELFLLDFAKAEPPSSLLSPVVSSLYSWQHQLTAPVHPSGRRIS

SEQ ID NO: 37174 - protein, 91 aa, Homo sapiens
LGKGMLLPTPMAPGTGGNLSSNQKASISLIHQGSLAWSLPPFSQVFLRELFLLDFAKAEPPSSLLSPVVSSLYSWQHQLTAPVHPSGRRIS

SEQ ID NO: 37175 - protein, 54 aa, Homo sapiens
LILPPTLAFLSSFLLTLPVMLPLPRPQKKKKKKKNNSTCPGFLRYIFFVSIGRL

SEQ ID NO: 37176 - protein, 125 aa, Homo sapiens
LPLPSPPPAAPAMSATAATAPPAAPAGEGGPPAPPPNLTSNRRLQQTQAQVDEVVDIMRVNVDKVLERDQKLSELDDRADALQAGASQFETSAAKLKRKYWWKNLKMMIILGVICAIILIIIIGE

SEQ ID NO: 37177 - protein, 123 aa, Homo sapiens
LQTPSSFPTLATLKEEGQRKAWASFDPKALLPLPEASYLPSCQLNRRLAWSWLCLLPSAFCPAQVLLGVLVASSHKGCLQLRDQSGSLPCLLLAKHSQPLSDPRLIGLEFRCGKKMVVGWWFS

SEQ ID NO: 37178 - protein, 8 aa, Homo sapiens
MVFYLLLS

SEQ ID NO: 37179 - protein, 24 aa, Homo sapiens
LHLLILLKQLPFHGLASQSSTMPV

SEQ ID NO: 37180 - protein, 275 aa, Homo sapiens
LQTPGSGRARDELRGVSRAGRRSQLLRAGRVRAAGGVCRMAPDPWFSTYDSTCQIAQEIAEKIQQRNQYERKGEKAPKLTVTIRALLQNLKEKIALLKDLLLRAVSTHQITQLEGDRRQNLLDDLVTRERLLLASFKNEGAEPDLIRSSLMSEEAKRGAPNPWLFEEPEETRGLGFDEIRQQQQKIIQEQDAGLDALSSIISRQKQMGQEIGNELDEQNEIIDDLANLVENTDEKLRNETRRVNMVDRKSASCGMIMVILLLLVAIVVVAVWPTN

SEQ ID NO: 37181 - protein, 54 aa, Homo sapiens
LAYFVTGHLISTCVGLILLLEMSLYPALHTYLGGVKRAQEGPTDTAWLRGLGRR

SEQ ID NO: 37182 - protein, 18 aa, Homo sapiens
MNRGPFLVEIKVRMQLRK

SEQ ID NO: 37183 - protein, 67 aa, Homo sapiens
VPFSSQPHPESFAALLLYFFPIAFWESTSGFLSHCSSPGVLGGRLGSCLPRPTMPGEVRMELPHSAN

SEQ ID NO: 37184 - protein, 586 aa, Homo sapiens
MFSLLQLHLKRGNFLVLKAKEMGLPVGTAAIAPIIAAVKDGKSITHEGREILAEELCTPPDPGAAFVVVECPDESFIQPICENATFQRYQGKADAPVALVVHMAPASVLVDSRYQQWMERFGPDTQHLVLNENCASVHNLRSHKIQTQLNLIHPDIFPLLTSFRCKKEGPTLSVPMVQGECLLKYQLRPRREWQRDAIITCNPEEFIVEALQLPNFQQSVQEYRRSAQDGPAPAEKRSQYPEIIFLGTGSAIPMKIRNVSATLVNISPDTSLLLDCGEGTFGQLCRHYGDQVDRVLGTLAAVFVSHLHADHHTGLPSILLQRERALASLGKPLHPLLVVAPNQLKAWLQQYHNQCQEVLHHISMIPAKCLQEGAEISSPAVERLISSLLRTCDLEEFQTCLVRHCKHAFGCALVHTSGWKVVYSGDTMPCEALVRMGKDATLLIHEATLEDGLEEEAVEKTHSTTSQAISVGMRMNAEFIMLNHFSQRYAKVPLFSPNFSEKVGVAFDHMKVCFGDFPTMPKLIPPLKALFAGDIEEMEERREKRELRQVRAALLSRELAGGLEDGEPQQKRAHTEEPQAKKVRAQ

SEQ ID NO: 37185 - protein, 13 aa, Homo sapiens
VLWIYHSLLSLII

SEQ ID NO: 37186 - protein, 24 aa, Homo sapiens
MLLVILSFVLLELIVVHMLATRDS

SEQ ID NO: 37187 - protein, 157 aa, Homo sapiens
LRTQPQGCCPRASRLQRRRTEADSTGDLNWGEEQNLQNKEEVVIMETDLAEMPEKGALSSQDSPHFQEKSTEEGEVAALRLTARSQETVTFKDVAMDFTPEEWGKLDPAQRDVMLENYRNLVSLWLPVSKPESYNLENGKEPLKLERKAPKSSYSEN

SEQ ID NO: 37188 - protein, 74 aa, Homo sapiens
VALGWLSPLSWGWMGFLSETEGLGMGAPPFPWQLGTQWTLQSYPQNVSEMLTSMARIHLFGCQKCFVLHRRKQA

SEQ ID NO: 37189 - protein, 395 aa, Homo sapiens
VPPLGRGGPRPVGPGHQRPSPEAQKRQAEARSGRYGHARRVSRGCPSPGAPSVGGARGPAGPAMLLETQDALYVALELVIAALSVAGNVLVCAAVGTANTLQTPTNYFLVSLAAADVAVGLFAIPFAITISLGFCTDFYGCLFLACFVLVLTQSSIFSLLAVAVDRYLAICVPLRYKSLVTGTRARGVIAVLWVLAFGIGLTPFLGWNSKDSATNNCTEPWDGTTNESCCLVKCLFENVVPMSYMVYFNFFGCVLPPLLIMLVIYIKIFLVACRQLQRTELMDHSRTTLQREIHAAKSLAMIVGIFALCWLPVHAVNCVTLFQPAQGKNKPKWAMNMAILLSHANSVVNPIVYAYRNRDFRYTFHKIISRYLLCQADVKSGNGQAGVQPALGVGL

SEQ ID NO: 37190 - protein, 157 aa, Homo sapiens
LERRGGPPVVEGVSCGAMAVVLPAVVEELLSEMAAAVQESARIPDEYLLSLKFLFGSSATQALDLVDRQSITLISSPSGRRVYQVLGSSSKTYTCLASCHYCSCPAFAFSVLRKSDSILCKHLLAVYLSQVMRTCQQLSVSDKQLTDILLMEKKQEA

SEQ ID NO: 37191 - protein, 131 aa, Homo sapiens
LLTYLWVLVTTIWVDLLIPLFSLVEEKANTHLLLGMCLDACARYLLFSKQPSQAQRMYEKALQISEEIQGERHPQTIVLMSDLATTLDAQGRFDEAYIYMQRASDLARQINHPELHMVLSNLAAVLMHRGR

SEQ ID NO: 37192 - protein, 178 aa, Homo sapiens
LLTYLWVLVTTIWVDLLIPLFSLVEEKANTHLLLGMCLDACARYLLFSKQPSQAQRMYEKALQISEEIQGERHPQTIVLMSDLATTLDAQGRFDEAYIYMQRASDLARQINHPELHMVLSNLAAVLMHRERYTQAKEIYQEALKQAKLKKDEISVQHIREELAELSKKSRPLTNSVKL

SEQ ID NO: 37193 - protein, 247 aa, Homo sapiens
LCGFWKPLLWNPSVRKVKMQIFVKTLTGKTITLEVEPSDTIENVKAKIQDKEGIPPDQQRLIFAGKQLEDGRTLSDYNIQKESTLHLVLRLRGGMQIFVKTLTGKTITLEVEPSDTIENVKAKIQDKEGIPPDQQRLIFAGKQLEDGRTLSDYNIQKESTLHLVLRLRGGMQIFVKTLTGKTITLEVEPSDTIENVKAKIQDKEGIPPDQQRLIFAGKQLEDGRTLSDYNIQKESTLHLVLRLRGGC

SEQ ID NO: 37194 - protein, 232 aa, Homo sapiens
LVKMQIFVKTLTGKTITLEVEPSDTIENVKAKIQDKEGIPPDQQRLIFAGKQLEDGRTLSDYNIQKESTLHLVLRLRGGMQIFVKTLTGKTITLEVEPSDTIENVKAKIQDKEGIPPDQQRLIFAGKQLEDGRTLSDYNIQKESTLHLVLRLRGGMQIFVKTLTGKTITLEVEPSDTIENVKAKIQDKEGIPPDQQRLIFAGKQLEDGRTLSDYNIQKESTLHLVLRLRGGC

SEQ ID NO: 37195 - protein, 151 aa, Homo sapiens
MKRALDKLDGTEINGRNIRLIEDKPRTSHRRSYSGSRSRSRSRRWSRSRSRRSSRSRSGSVSKSRSRSRSRSKGRSRSRSKGRKSRSKSKSKPKSDRGSHSHSRSRSKDEYEKYRSRSRSGSPKENGKGHTKSKSRSRSQSRSNSPLPGPP

SEQ ID NO: 37196 - protein, 67 aa, Homo sapiens
LEETKGRYCVQLAQIQEMIGSVEEQLAQLCCEMEQQNQEYKILLDVKMRLEQEIATYRRLLEGEDAQ

SEQ ID NO: 37197 - protein, 306 aa, Homo sapiens
LQPPVHLLQIHEGLLQHRGQHQGRLQPHLLCPGRRVLPCPQHLRGGLCVSFSRFSFGGACGLGGGYGGGFGSSSSFASGFGGGYGGGLGAGVGGGLGAGLGGGFAGGDGLLVGSEKVTMQHLSDRLASYLDKVRALEEANADLEVKIRDWYQRQRPSEIKDCSPYFKTIEDLRHKIIAATIENAQPILQIDNARLAADDFRTNYEHELALRQTVEAGVNGLCRVLDELTLARTDLEMQMEGLKEELAYLRKNHEEEMLALRGQTGGEVNVEMDAAPGVDLSCILNEMRNQYEQMAKHNHRDAGPGS

SEQ ID NO: 37198 - protein, 422 aa, Homo sapiens
LGGGSSRTSCQLSGGLGAGSCRPGSAGGLGSALGGSSYSSCYSFGSGGGYGSSSFEGVDGLLVGGEKATMQNLNDRLASYLDKVRALEEADTELEVKIRDWYQRQAPGPARDYSQYYRIIEELQNKILTATVDNANILLHIDNAHLAAADFRTKFETEQALCLSVEADINGPCRVLDELTLARADLEMHIENLKEELAYLKKNHEEMNAPRGQVGGEINVEMGAAPGVDLSRILNEMREQYEKMAEKNRKDAEDWFFSKTEELNREVATNSELVQSGKSEISELRCTMQALEIELQSQLSMKASLEGNLAETENRYCMQLSQIQGLIGSVEERLAQLLCEMEQQNQEYKILLDMKMRLELEITTYHRLLEGEDAHEGLLAPTHFKLPASPAAVTTCQVPTIVEEVQDGKVISSREQVRQTTR

SEQ ID NO: 37199 - protein, 268 aa, Homo sapiens
MEETHQKKIEDLQRQHQRELEKLREEKDRLLAEETAATISAIEAMKNAHREEMERELEKSQRSQISSVNSDVEALRRQYLEELQSVQRELEVLSEQYSQKCLENAHLAQALEAERQALRQCQRENQELNAHNQVLLRVKESEIQYLKQEISSLKDELQTALRDKKYASDKYKDIYTELSIAKAKADCDISRLKEQLKAATEALGEKSPDSATVSGYDIMKSKSNPDFLKKDRSCVTRQLRNIRSKSLKEGLTVQERLKLFESRDLKKD

SEQ ID NO: 37200 - protein, 46 aa, Homo sapiens
MQMLKCIELDERLKAMDQEITVNPQFVQKSMGSQEDDSGNKPSSYS

SEQ ID NO: 37201 - protein, 211 aa, Homo sapiens [sequence omitted]

SEQ ID NO: 37202 - protein, 95 aa, Homo sapiens
MKRSGNPGAEADFCVMTRLLGYVDPLDPSFVAAVITITFNPLYWNVLHAGHAEPAQDGEPGHPRGLQPGPRAPGTGRRARALQLLCTGVRWNFPR

SEQ ID NO: 37203 - protein, 109 aa, Homo sapiens
VQLFLCDLLLVVRTSLWRQQQPPAPAPAAQGTSSRPQASALELRGFQRDLSSLRRLAQSFRPAMRRVFLHEATARLMAGASPTRTHQLLDRSLRRRAGPGGKGADGCAD

SEQ ID NO: 37204 - protein, 61 aa, Homo sapiens
LRKGIEFVAAQLKSMVLTLGLIDLRLTVEQAVLLSRLEEEYQGGFPCQLEKFIQPARMAWD

SEQ ID NO: 37205 - protein, 61 aa, Homo sapiens
LGSDLACVPAGIEFVAAQLKSMVLTLGLIDLRLTVEQAVLLSRLEEEYQKSKSRTSRSIVK

SEQ ID NO: 37206 - protein, 62 aa, Homo sapiens
LDFPLWSTFLSLMTSTASEAASYEFTTLTCIPGVIEVSGCAGPRRRRGACLCLDLCLCPPCV

SEQ ID NO: 37207 - protein, 72 aa, Homo sapiens
LDFPLWSTFLSLMTSTASEAASYEFTTLTCIPGVIEYKGANIQLLDLPGIIEGAAQGGRQGRCVGSRLELCY

SEQ ID NO: 37208 - protein, 76 aa, Homo sapiens
LDFPLWSTFLSLMTSTASEAASYEFTTLTCIPGVIEYKGANIQLLDLPGIIEGAAQGGRQGRKRPWPAGDRCGAHG

SEQ ID NO: 37209 - protein, 229 aa, Homo sapiens
LDFPLWSTFLSLMTSTASEAASYEFTTLTCIPGVIEYKGANIQLLDLPGIIEGAAQGKGRGRQVIAVARTADVIIMMLDATKGEVQRSAGWGMGQAHMSGEGQCVPELVLGGLWVFGSLTRESSGRTCHRLNPTPPSLWRLLLKACVQPAQRYLGTGGRGAWPGPASCSEAQVPHHCPEPARSPAPGTEALFIHILAEGYTRPASSGPEGVPSCGHLAGAPPLACACRP

SEQ ID NO: 37210 - protein, 71 aa, Homo sapiens
LPRLPGEVVPLGHTNTQTEKYKYTYPRKGSLKSLLFTEVSSVGRRRVCWGKGARLEAFPIRLSPLMGVLSL

SEQ ID NO: 37211 - protein, 51 aa, Homo sapiens
LGEDAVASKRQGARPESLLMPHPFHRCIQINTDSSLLNSEFCFILKVGLWV

SEQ ID NO: 37212 - protein, 308 aa, Homo sapiens
LTLLISHMQASADQVERDILETQKRLQQDRLNSEQSQALQHQQETGSSLKEAEVLLKDLFLDVDKARRLKHPQAEETEKDIEQLHERVTQECAEYCALYEKMVLPPRRGIQGRLGTRAGAETEAGLRRPVWAGHGGAGGTDRGAQHRAEGDQRPRRAAAEPGGAGCRHHPEPIPRPTEGGVVARAEPGQPVHALQGCTWQLSALAEQQRRILQQDWSDLMADPAGVRREYEHFKQHELLSQEQSVNQLEEDGKRMVELRHPAVGPIQAHQEALKMEWQNFLNLCICQETQLQHVEDYSRILCPSSSPH

SEQ ID NO: 37213 - protein, 131 aa, Homo sapiens
VDRLLPHMRNIVEYMLQRTQDQDENVALEACEFWLTLAEQQVCKDVFVRHLPRLIPVLVNGMKYSDIDIILPKGDVEEDEMIPDSEQDIWPRFHRSRTVAQQHDEDGIEEEDDDDNEIDDDDTISDWNLRK

SEQ ID NO: 37214 - protein, 193 aa, Homo sapiens
LLGGCGRGSSSLLMASWGGEKRGGAEGSPKLAVYATRKTRSVRSQEDQWYLGYPGDQWSSGFSYSWWKNSVGSESKHGEGALDQPQHDVRLEDLGELHRAARSGDVPGVEHVLAPGDTGVDKRDRKKSIQQLVPEYKEKQTPESLPQNNNPEYRHLKILLGPAQWCMPVISSLWEAEMGGSLEPRSSRPAQAT

SEQ ID NO: 37215 - protein, 131 aa, Homo sapiens
MVNGQVESAQFPEYDDLYCKYCFVYGQDWAPTAGLEEGISQITSKSQDVRQALVWNFPIDVTFKSTNPYGWPQIVLSVYGPDVFGNDVVRGYGAVHVPFSPGRHKRTIPMFVPESTSKLQKFTRSASCSTH

SEQ ID NO: 37216 - protein, 32 aa, Homo sapiens
LQLAVSWLLGVLQAPMEQVGEESLGPRTPMNP

SEQ ID NO: 37217 - protein, 533 aa, Homo sapiens [sequence omitted]

SEQ ID NO: 37218 - protein, 100 aa, Homo sapiens
LCLAATVDLVPGSMGAFSKALALDPAGEARLGLFCRFISDPPFSLKQPPEPPPSHGRIGRPQLPLNNPFQYYIFIIIMLLLHCLFAIKMRPVKYKVPFCT

SEQ ID NO: 37219 - protein, 184 aa, Homo sapiens
MTTSWASAVLMESTGWVRQGPGGLRGCPRARSLLTSCPSSPGLQNMHLLTLKQKYELRVDLEDFENNTAYAKYADFSISPNAVSAEEDGYTLFVAGFEDGGAGDSLSYHSGQKFSTFDRDQDLFVQNCAALSSGAFWFRSCHFANLNGFYLGGSHLSYANGINWAQWKGFYYSLKRTEMKIRRA

SEQ ID NO: 37220 - protein, 261 aa, Homo sapiens
LSRTDSMKALLALPLLLLLSTPPCAPQVSGIRGDALERFCLQQPLDCDDIYAQGYQSDGVYLIYPSGPSVPVPVFCDMTTEGGKWTVFQKRFNGSVSFFRGWNDYKLGFGRADGEYWLGLQNMHLLTLKQKYELRVDLEDFENNTAYAKYADFSISPNAVSAEEDGYTLFVAGFEDGGAGDSLSYHSGQKFSTFDRDQDLFVQNCAALSSGAFWFRSCHFANLNGFYLGGSHLSYANGINWAQWKGFYYSLKRTEMKIRRA

SEQ ID NO: 37221 - protein, 157 aa, Homo sapiens
LSRTDSMKALLALPLLLLLSTPPCAPQVSGIRGDALERFCLQQPLDCDDIYAQGYQSDGVYLIYPSGPSVPVPVFCDMTTEGGKWTVFQKRFNGSVSFFRGWNDYKLGFGRADGEYWLGKAGTRWAEGLPQGQVLVDQLPLLPRAAEHAPPDTEAEV

SEQ ID NO: 37222 - protein, 471 aa, Homo sapiens
VNCGCGLTVETPPGGRRREGRRGLHLHASRLPLPSAPGPCSSLQDQAMELEVRRVRQAFLSGRSRPLRFRLQQLEALRRMVQEREKDILTAIAADLCKSEFNVYSQEVITVLGEIDFMLENLPEWVTAKPVKKNVLTMLDEAYIQPQPLGVVLIIGAWNYPFVLTIQPLIGAIAAGNAVIIKPSELSENTAKILAKLLPQYLDQDLYIVINGGVEETTELLKQRFDHIFYTGNTAVGKIVMEAAAKHLTPVTLELGGKSPCYIDKDCDLDIVCRRITWGKYMNCGQTCIAPDYILCEASLQNQIVWKIKETVKEFYGENIKESPDYERIINLRHFKRILSLLEGQKIAFGGETDEATRYIAPTVLTDVDPKTKVMQEEIFGPILPIVPVKNVDEAINFINEREKPLALYVFSHNHKLIKRMIDETSSGGVTGNDVIMHFTLNSFPFGGVGRILLKNDPVQPPSASTELFLF

SEQ ID NO: 37223 - protein, 335 aa, Homo sapiens
LCFSFFEDLYIVINGGVEETTELLKQRFDHIFYTGNTAVGKIVMEAAAKHLTPVTLELGGKSPCYIDKDCDLDIVCRRITWGKYMNCGQTCIAPDYILCEASLQNQIVWKIKETVKEFYGENIKESPDYERIINLRHFKRILSLLEGQKIAFGGETDEATRYIAPTVLTDVDPKTKVMQEEIFGPILPIVPVKNVDEAINFINEREKPLALYVFSHNHKLIKRMIDETSSGGVTGNDVIMHFTLNSFPFGGVGSSGMGAYHGKHSFDTFSHQRPCLLKSLKREGANKLRYPPNSQSKVDWGKFFLLKRFNKEKLGLLLLTFLGIVAAVLVKAEYY

SEQ ID NO: 37224 - protein, 474 aa, Homo sapiens
VGGRARSCPSASCRCSLSPGAMSKISEAVKRARAAFSSGRTRPLQFRIQQLEALQRLIQEQEQELVGALAADLHKNEWNAYYEEVVYVLEEIEYMIQKLPEWAADEPVEKTPQTQQDELYIHSEPLGVVLVIGTWNYPFNLTIQPMVGAIAAGNSVVLKPSELSENMASLLATIIPQYLDKDLYPVINGGVPETTELLKERFDHILYTGSTGVGKIIMTAAAKHLTPVTLELGGKSPCYVDKNCDLDVACRRIAWGKFMNSGQTCVAPDYILCDPSIQNQIVEKLKKSLKEFYGEDAKKSRDYGRIISARHFQRVMGLIEGQKVAYGGTGDAATRYIAPTILTDVDPQSPVMQEEIFGPVLPIVCVRSLEEAIQFINQREKPLALYMFSSNDKVIKKMIAETSSGGVAANDVIVHITLHSLPFGGVGNSGMGSYHGKKSFETFSHRRSCLVRPLMNDEGLKVRYPPSPAKMTQH

SEQ ID NO: 37225 - protein, 476 aa, Homo sapiens
LTACAELWGCWSGIVPSALQASAMSKISEAVKRARAAFSSGRTRPLQFRIQQLEALQRLIQEQEQELVGALAADLHKNEWNAYYEEVVYVLEEIEYMIQKLPEWAADEPVEKTPQTQQDELYIHSEPLGVVLVIGTWNYPFNLTIQPMVGAIAAGNSVVLKPSELSENMASLLATIIPQYLDKDLYPVINGGVPETTELLKERFDHILYTGSTGVGKIIMTAAAKHLTPVTLELGGKSPCYVDKNCDLDVACRRIAWGKFMNSGQTCVAPDYILCDPSIQNQIVEKLKKSLKEFYGEDAKKSRDYGRIISARHFQRVMGLIEGQKVAYGGTGDAATRYIAPTILTDVDPQSPVMQEEIFGPVLPIVCVRSLEEAIQFINQREKPLALYMFSSNDKVIKKMIAETSSGGVAANDVIVHITLHSLPFGGVGNSGMGSYHGKKSFETFSHRRSCLVRPLMNDEGLKVRYPPSPAKMTQH

SEQ ID NO: 37226 - protein, 136 aa, Homo sapiens
LLLALLALLMSLTQGVLTALRLSVKKASIKILKNFDEAIIVDAASLDPESLYQRTYAGKMTFGRVSDLGQFIRESEPEPDVRKSKGSMFSQAMKKWVQGNTDEAQEELAWKIAKMIVSDIMQQAQYDQPLEKSTKL

SEQ ID NO: 37227 - protein, 117 aa, Homo sapiens
LMTSFFLEIVLMGYIFLDSKDPEYKKFLETYCVEEEKASANPETLLGEMEAKTRELIARRTTPLLEYIKNRKLEKQRIREEKREERRRRELEKKRLREEEKRRRREEERCKKKKRDR

SEQ ID NO: 37228 - protein, 50 aa, Homo sapiens
LRQRRPIFLFLLLLSLLNLKTMMKSYIMIYLHLMNNSFPCKVIKVLPRRH

SEQ ID NO: 37229 - protein, 14 aa, Homo sapiens
VLLYFGLVCMLFIV

SEQ ID NO: 37230 - protein, 88 aa, Homo sapiens
VKPILSSQAMEKLVGTRPSSLAGWAGEGVVTVAAATHCSVWKTQDLAITARRTIMCGRSLRDAVSCPRALFIFCCFSALKEFTWKHVL

SEQ ID NO: 37231 - protein, 11 aa, Homo sapiens
LLALWAVWSLP

SEQ ID NO: 37232 - protein, 110 aa, Homo sapiens
VPFMLLPALCAWLLWVPWCLLVAGSGRSGGELCCSSYGVSVISVWSKCSVCRCLMGSVPRIFFAFYPIAWLPLPGSQGCWSRSWSGLWWSLHLVSSASALHLVYFRAWWQ

SEQ ID NO: 37233 - protein, 21 aa, Homo sapiens
LHLGPIGSGWTTRTGRLLELL

SEQ ID NO: 37234 - protein, 314 aa, Homo sapiens
LGVVGTCLSSLLQLLALETQGPTGGWAPVTPRLRTPGTQFLQKCSNQDGSWSPRALAEGLRAPATPGAGLPARCLVGTVVPPGLASACRAAPDRRPDYTSRRPACSPDAALARDVGKQSVSKMAAWGRRRLGPGSSGGSARERVSLSATDCYIVHEIYNGENAQDQFEYELEQALEAQYKYIVIEPTRIGDETARWITVGNCLHKTAVLAGTACLFTPLALPLDYSHYISLPAGVLSLACCTLYGISWQFDPCCKYQVEYDAYKLSRLPLHTLTSSTPVVLVRKDDLHRKRLHNTIALAALVYCVKKIYELYAV

SEQ ID NO: 37235 - protein, 55 aa, Homo sapiens
LAMALLTSSRAHVGTFGAQPTILVQGRWMQRPVHIPPRPARSVVPTHPAHMCKCP

SEQ ID NO: 37236 - protein, 12 aa, Homo sapiens
LTGAMGLLWCCF

SEQ ID NO: 37237 - protein, 449 aa, Homo sapiens
LPGASLGASQGPPTPGMTAASRANPYSIVSSEEDGLHLVTMSGANGFGNGKVHTRRRCRNRFVKKNGQCNIEFANMDEKSQRYLADMFTTCVDIRWRYMLLIFSLAFLASWLLFGIIFWVIAVAHGDLEPAEGRGRTPCVMQVHGFMAAFLFSIETQTTIGYGLRCVTEECPVAVFMVVAQSIVGCIIDSFMIGAIMAKMARPKKRAQTLLFSHNAVVALRDGKLCLMWRVGNLRKSHIVEAHVRAQLIKPRVTEEGEYIPLDQIDIDVGFDKGLDRIFLVSPITILHEIDEASPLFGISRQDLETDDFEIVVILEGMVEATAMTTQARSSYLANEILWGHRFEPVLFEEKNQYKIDYSHFHKTYEVPSTPRCSAKDLVENKFLLPSANSFCYENELAFLSRDEEDEADGDQDGRSRDGLSPQARHDFDRLQAGGGVLEQRPYRRESEI

SEQ ID NO: 37238 - protein, 42 aa, Homo sapiens
LESQVLLGDDCASAQFHYICSLCLPVLHCCRALCWLQEPISG

SEQ ID NO: 37239 - protein, 255 aa, Homo sapiens
LPASCGAASSPGLASLGQPLLGGHSRITVPVCLAISIFTLPSLCGEAVNPVDSAPCGVSVLWWDCSFCPIIPLASHTPAPSQGSRVSPAFHLSIAMVAFVQARAGLMDVLVSPTVGCQLSRPTGRNSRLSSSLTPDTRPQWACTGPQKVSLGFAFLVSITVKEALIEQLQCTWSSASAGHLEIGTVMVPALKELMTWWGPVVFKEPRSHWAPKVELKDWGQLALSLPPLHCLPLKNPTPPHDGPLCSPCISVTVN

SEQ ID NO: 37240 - protein, 168 aa, Homo sapiens
LLPGAELRFQGDGERDPLRAVLPPRALPPCGHHLRQWLCAAVLHQLPASRRVACQPGSHYPDSHPHSAERPWTDVLYSRHPTYDVPPPRLSDAFHHHHSGRAVPIQVHPPVRHCPAQCSEVWILCEAHCLKVAVDGQHLFEYYHRLRNLPTINRLEVGGDIQLTHVQT

SEQ ID NO: 37241 - protein, 41 aa, Homo sapiens
MEPALHYLRSQGLGRWRKVISPSLKSYFLNVAPHQALYLTS

SEQ ID NO: 37242 - protein, 47 aa, Homo sapiens
LLGLYFLSHIPITLFMDLQAVLPRELYPVEEAASGFELLQSSTLFTP

SEQ ID NO: 37243 - protein, 65 aa, Homo sapiens
VGLQAIGARNLLKSIAKQREAQQQQLQALIAEKKMQLERYRVEYEALCKVEAEQNEFIDQFIFQK

SEQ ID NO: 37244 - protein, 194 aa, Homo sapiens [sequence omitted]

SEQ ID NO: 37245 - protein, 180 aa, Homo sapiens [sequence omitted]

SEQ ID NO: 37246 - protein, 136 aa, Homo sapiens
MAAAGAAATHLEVARGKRAALFFAAVAIVLGLPLWWKTTETYRASLPYSQISGLNALQLRLMVPVTVVFTRESVPLDDQEKLPFTVVHEREIPLKYKMKIKCRFQKAYRRALDHEEEALSSGSVQGMGRDEHTILM

SEQ ID NO: 37247 - protein, 376 aa, Homo sapiens
LPHSEALEGAVTMPHSYPALSAEQKKELSDIALRIVAPGKGILAADESVGSMAKRLSQIGVENTEENRRLYRQVLFSADDRVKKCIGGVIFFHETLYQKDDNGVPFVRTIQDKGIVVGIKVDKGVVPLAGTDGETTTQGLDGLSERCAQYKKDGADFAKWRCVLKISERTPSALAILENANVLARYASICQQNGIVPIVEPEILPDGDHDLKRCQYVTEKVLAAVYKALSDHHVYLEGTLLKPNMVTPGHACPIKYTPEEIAMATVTALRRTVPPAVPGVTFLSGGQSEEEASFNLNAINRCPLPRPWALTFSYGRALQASALNAWRGQRDNAGAATEEFIKRAEVNGLAAQGKYEGSGEDGGAAAQSLYIANHAY

SEQ ID NO: 37248 - protein, 353 aa, Homo sapiens
LCLWLRLLTGCAQGAVTMPHSYPALSAEQKKELSDIALRIVAPGKGILAADESVGSMAKRLSQIGVENTEENRRLYRQVLFSADDRVKKCIGGVIFFHETLYQKDDNGVPFVRTIQDKGIVVGIKVDKGVVPLAGTDGETTTQGLDGLSERCAQYKKDGADFAKWRCVLKISERTPSALAILENANVLARYASICQQVLAAVYKALSDHHVYLEGTLLKPNMVTPGHACPIKYTPEEIAMATVTALRRTVPPAVPGVTFLSGGQSEEEASFNLNAINRCPLPRPWALTFSYGRALQASALNAWRGQRDNAGAATEEFIKRAEVNGLAAQGKYEGSGEDGGAAAQSLYIANHAY

SEQ ID NO: 37249 - protein, 451 aa, Homo sapiens
MPGGALTPPRRPASEGVVLPRTPVLGRGCGQGGACRPRPRRSHVALRHPQPHLPEGARAAASSVCGSEPELCLWLRLLTGCAQGAVTMPHSYPALSAEQKKELSDIALRIVAPGKGILAADESVGSMAKRLSQIGVENTEENRRLYRQVLFSADDRVKKCIGGVIFFHETLYQKDDNGVPFVRTIQDKGIVVGIKVDKGVVPLAGTDGETTTQGLDGLSERCAQYKKDGADFAKWRCVLKISERTPSALAILENANVLARYASICQQNGIVPIVEPEILPDGDHDLKRCQYVTEKVLAAVYKALSDHHVYLEGTLLKPNMVTPGHACPIKYTPEEIAMATVTALRRTVPPAVPGVTFLSGGQSEEEASFNLNAINRCPLPRPWALTFSYGRALQASALNAWRGQRDNAGAATEEFIKRAEVNGLAAQGKYEGSGEDGGAAAQSLYIANHAY

SEQ ID NO: 37250 - protein, 132 aa, Homo sapiens
LCLWLRLLTGCAQGAVTMPHSYPALSAEQKKELSDIALRIVAPGKGILAADESVGSMAKRLSQIGVENTEENRRLYRQVLFSADDRVKKCIGGVIFFHETLYQKDDNGVPFVRTIQDKGIVVGIKVQPLALL

SEQ ID NO: 37251 - protein, 219 aa, Homo sapiens
LGLRDTVRMAVVPLLLLGGLWSAVGASSLGVVTCGSVVKLLNTRHNVRLHSHDVRYGSGSGQQSVTGVTSVDDSNSYWRIRGKSATVCERGTPIKCGQPIRLTHVNTGRNLHSHHFTSPLSGNQEVSAFGEEGEGDYLDDWTVLCNGPYWVRDGEVRFKHSSTEVLLSVTGEQYGRPISGQKEVHGMAQPSQNNYWKAMEGIFMKPSELLKAEAHHAEL

SEQ ID NO: 37252 - protein, 26 aa, Homo sapiens
MCSFLLAAFLPPGMAILFPETGSCSR

SEQ ID NO: 37253 - protein, 95 aa, Homo sapiens
VFGGWAWAWWCISDTQRISLEIMTLQPRCEDVETAEGVALTVTGVAQVKIMTEKELLAVACEQFLGKNVQDIKNVVLQTLEGHLRSILGEALFSL

SEQ ID NO: 37254 - protein, 96 aa, Homo sapiens
LFSAFLFLYSCHLAGADMDVCLTNYGHCNYVSGKHACIFYDEVRAGDAVGGSFPNLRPLPGSRFLFSALRGGKRDWGSSLFLPSLSFLEEESLDVK

SEQ ID NO: 37255 - protein, 265 aa, Homo sapiens [sequence omitted]

SEQ ID NO: 37256 - protein, 19 aa, Homo sapiens
VLLFGIKNFPSTQSISTVA

SEQ ID NO: 37257 - protein, 10 aa, Homo sapiens
MNGLIIFATL

SEQ ID NO: 37258 - protein, 27 aa, Homo sapiens
LYFFVFVLKFIGLCQLERSCCHYQLWS

SEQ ID NO: 37259 - protein, 15 aa, Homo sapiens
VLMKSVCSLLLHGLA

SEQ ID NO: 37260 - protein, 519 aa, Homo sapiens
LPLPGHGQSRARPRGRALGSRRRRAEPRAKRGARRVDGPAARCPPGLSSFAMPPWGAALALILAVLALLGLLGPRLRGPWGRAVGERTLPGAQDRDDGEEADGGGPADQFSDGREPLPGGCSLVCKPSALAQCLLRALRRSEALEAGPRSWFSGPHLQTLCHFVLPVAPGPELAREYLQLADDGLVALDWVVGPCVRGRRITSAGGLPAVLLVIPNAWGRLTRNVLGLCLLALERGYYPVIFHRRGHHGCPLVSPRLQPFGDPSDLKEAVTYIRFRHPAAPLFAVSEGSGSALLLSYLGECGSSSYVTGAACISPVLRCREWFEAGLPWPYERGFLLHQKIALSRYATALEDTVDTSRLFRSRSLREFEEALFCHTKSFPISWDTYWDRNDPLRDVDEAAVPVLCICSADDPVCGPPDHTLTTELFHSNPYFFLLLSRHGGHCGFLRQEPLPAWSHEVILESFRALTEFFRTEERIKGLSRHRASFLGGRRRGGALQRREVSSSSNLEEIFNWKRSYTR

SEQ ID NO: 37261 - protein, 72 aa, Homo sapiens
LGVTPTNLKRVCQGSVPVSPAWATRSTGIPFPALHSAPRSHPGAAAVQLLYRLQGPAETNPRTRKGAPRLPY

SEQ ID NO: 37262 - protein, 68 aa, Homo sapiens
LLLLAALARLLGPSEVMAGPAEEAGAHCPESLWPLPPQVGALEGPGREGCERLAQSRSVLAAPSTVTI

SEQ ID NO: 37263 - protein, 80 aa, Homo sapiens
LVLTAWGLALEMAWVEPAWAAHWLMRRRRRKQRKKKAWIYCESLSGPAPSEPTPGRGRLCRRGCVQVRDAGPRLVGPRVL

SEQ ID NO: 37264 - protein, 28 aa, Homo sapiens
LSAPACLRVECVGGSAVPEAWSIWSFEG

SEQ ID NO: 37265 - protein, 172 aa, Homo sapiens
LERVFLYMYLCLCFLDLGLRLEGKRFLELGKEEDFHPELESLDGDLDPGLPSTEDVILKTEQVTKNIQELLRAAQEFKHDSFVPCSEKIHLAVTEMASLFPKRPALEPVRSSLRLLNASAYRLQSECRKTVPPEPGAPVDFQLLTQQVIQCAYDIAKAAKQLVTITTREKKQ

SEQ ID NO: 37266 - protein, 600 aa, Homo sapiens
LASAAALAWPGGNVDIEQLDPRGRTPLHLATTLGHLECARVLLAHGADVGRENRSGWTGGQPCSPQPHSRGLPSIIDLWLAEGSCPVTLPRPPPVLQEAAQDFYVEMKWEFTSWVPLVSKICPSDTYKVWKSGQNLRVDTTLLGFDHMTWQRGNRSFVFRGQDTSAVVMEIDHDRRVVYTETLALAGQDRELLLAAAQPTEEQVLSRLTAPVVTTQLDTKNISFERNKTGILGWRSEKTEMVNGYEAKVYGASNVELITRTRTEHLSEQHKGKVKGCKTPLQSFLGIAEQHGGPQNGTLITQTLSQANPTAITAEEYFNPNFELGNRDMGRPMELTTKTQKFKAKLWLCEEHPLSLCEQVAPIIDLMAVSNALFAKLRDFITLRLPPGFPVKIEIPIFHILNARITFGNLNGCDEPVPSVRGSPSSETPSPGSDSSSVSSSSSTTSCRGCEISPALFEAPRGYSMMGGQREAATRDDDDDLLQFAIQQSLLEAGSEYDQVTIWEALTNSKPGTHPMSYEGRRQDRSAPPTPQRQPAPPASVPSPRPSSGPGSGGHVFRSYDEQLRLAMELSAQEQEERRRRARQEEEELERILRLSLTEQ

SEQ ID NO: 37267 - protein, 543 aa, Homo sapiens
MAAAAGAAAAPGSREPQDRPECGAGHPGPRYYRHPERWLLRPEAFLGPLRTRAPSAEDSQRERPAARSGPAMSRRVVRQSKFRHVFGQAAKADQAYEDIRVSKVTWDSSFCAVNPKFLAIIVEAGGGGAFIVLPLAKTGRVDKNYPLVTGHTAPVLDIDWCPHNDNVIASASDDTTIMVWQIPDYTPMRNITEPIITLEGHSKRVGILSWHPTARNVLLSAGGDNVIIIWNVGTGEVLLSLDDMHPDVIHSVCWNSNGSLLATTCKDKTLRIIDPRKGQVVAERFAAHEGMRPMRAVFTRQGHIFTTGFTRMSQRELGLWDPNNFEEPVALQEMDTSNGVLLPFYDPDSSIVYLCGKGDSSIRYFEITDEPPFVHYLNTFSSKEPQRGMGFMPKRGLDVSKCEIARFYKLHERKCEPIIMTVPRKSDLFQDDLYPDTPGPEPALEADEWLSGQDAEPVLISLRDGYVPPKHRELRVTKRNILDVRPPSGPRRSQSASDAPLSQQHTLETLLEEIKALRERVQAQEQRITALENMLCELVDGTD

SEQ ID NO: 37268 - protein, 116 aa, Homo sapiens
LAYHSTEENTNAQTVSMMSEARVWWGQMAGRPKRCRKGRLGPLGLKRSCEVVWKPRLGLTSLPGSRLDRNHLLKASLWCSDYVYPVLLLSSLLECSSISSTQFCDSWIFVCCKVFC

SEQ ID NO: 37269 - protein, 524 aa, Homo sapiens
LQLQTSVSESLQREAAKKQAMKQTKLEIQKALAEDATVYEYDSIYDEMQKKKEENNPKLLLGKDRKPKYIHNLLKAVEIRKKEQEKRMEKKIQREREMEKGEFDDKEAFVTSAYKKKLQERAEEEEREKRAAALEACLDVTKQKDLSGFYRHLLNQAVGEEEVPKCSFREARSGIKEEKSRGFSNEVSSKNRIPQEKCILQTDVKVEENPDADSDFDAKSSADDEIEETRVNCRREKVIETPENDFKHHRSQNHSRSPSEERGHSTRHHTKGSRTSRGHEKREDQHQQKQSRDQENHYTDRDYRKERDSHRHREASHRDSHWKRHEQEDKPRARDQRERSDRVWKREKDREKYSQREQERDRQQNDQNRPSEKGEKEEKSKAKEEHMKVRKERYENNDKYRDREKREVGVQSSERNQDRKESSPNSRAKDKFLDQERSNKMRNMAKDKERNQEKPSNSESSLGAKHRLTEEGQEKGKEQERPPEAVSKFAKRNNEETVMSARDRYLARQMARVNAKTYIEKEDD

SEQ ID NO: 37270 - protein, 63 aa, Homo sapiens
LPSGLISLLFFSPGYLCMTDEWFSEYVYEVVVDRKHVPEEVLAVLEQEPIILPAWDPMGALAE

SEQ ID NO: 37271 - protein, 105 aa, Homo sapiens
LLDRRLHLQSVYDSRRMKSLTCILKSLIQLQSVYGITRRSIRNKVLDFSVVFVFFQCHQPPQRHWLSEVGFMQTWAKGQLEDSSKSSVQGPNRHRRTSCGLQSFI

SEQ ID NO: 37272 - protein, 79 aa, Homo sapiens
LWTAVIYLIMIYQTTEEASVGNPEGAFMKMLQARKQHMSTELTIESEAPSDSSGINLSGFGSEQLDTNDESDVISLKFS

SEQ ID NO: 37273 - protein, 11 aa, Homo sapiens
MFGCLALVFRV

SEQ ID NO: 37274 - protein, 28 aa, Homo sapiens
MGFLLVLVTHLFLLCFPSPLIFKNSTFS

SEQ ID NO: 37275 - protein, 147 aa, Homo sapiens
LVICGKKFPLLQQKEPFKKRWFALDCHERRLLYYKNPLDAFEQGQVFLGNKEQGYEAYEDLPKGIRGNRWKAGLTIVTPERRFVLTCPSEKEQQEWLESLRGVLSSPLTPLNRLSKKQELRGVLLDKGRGQKIASSLRFSFDTTKDS

SEQ ID NO: 37276 - protein, 125 aa, Homo sapiens
LVICGKKFPLLQQKEPFKKRWFALDCHERRLLYYKNPLDAFEQGQVFLGNKEQGYEAYEDLPKGIRGNRWKAGLTIVTPERRFVLTCPSEKEQQEWLESLRGVLSSPLTPLNRLTASTESGRSSR

SEQ ID NO: 37277 - protein, 10 aa, Homo sapiens
LRTLPVAVHR

SEQ ID NO: 37278 - protein, 2488 aa, Homo sapiens
MVVDLKNLLFNPSKPFSRGSQPADVDLMIDCLVSCFRISPHNNQHFKICLAQNSPSTFHYVLVNSLHRIITNSALDWWPKIDAVYCHSVELRNMFGETLHKAVQGCGAHPAIRMAPSLTFKEKVTSLKFKEKPTDLETRSYKYLLLSMVKLIHADPKLLLCNPRKQGPETQGSTAELITGLVQLVPQSHMPEIAQEAMEALLVLHQLDSIDLWNPDAPVETFWEISSQMLFYICKKLTSHQMLSSTEILKWLREILICRNKFLLKNKQADRSSCHFLLFYGVGCDIPSSGNTSQMSMDHEELLRTPGASLRKGKGNSSMDSAAGCSGTPPICRQAQTKLEVALYMFLWNPDTEAVLVAMSCFRHLCEEADIRCGVDEVSVHNLLPNYNTFMEFASVSNMMSTGRAALQKRVMALLRRIEHPTAGNTEAWEDTHAKWEQATKLILNYPKAKMEDGQAAESLHKTIVKRRMSHVSGGGSIDLSDTDSLQEWINMTGFLCALGGVCLQQRSNSGLATYSPPMGPVSERKGSMISVMSSEGNADTPVSKFMDRLLSLMVCNHEKVGLQIRTNVKDLVGLELSPALYPMLFNKLKNTISKFFDSQGQVLLTDTNTQFVEQTIAIMKNLLDNHTEGSSEHLGQASIETMMLNLVRYVRVLGNMVHAIQIKTKLCQLVEVMMARRDDLSFCQEMKFRNKMVEYLTDWVMGTSNQAADDDVKCLTRDLDQASMEAVVSLLAGLPLQPEEGDGVELMEAKSQLFLKYFTLFMNLLNDCSEVEDESAQTGGRKRGMSRRLASLRHCTVLAMSNLLNANVDSGLMHSIGLGYHKDLQTRATFMEVLTKILQQGTEFDTLAETVLADRFERLVELVTMMGDQGELPIAMALANVVPCSQWDELARVLVTLFDSRHLLYQLLWNMFSKEVELADSMQTLFRGNSLASKIMTFCFKVYGATYLQKLLDPLLRIVITSSDWQHVSFEVDPTRLEPSESLEENQRNLLQMTEKFFHAIISSSSEFPPQLRSVCHCLYQVVSQRFPQNSIGAVGSAMFLRFINPAIVSPYEAGILDKKPPPRIERGLKLMSKILQSIANHVLFTKEEHMRPFNDFVKSNFDAARRFFLDIASDCPTSDAVNHSLSFISDGNVLALHRLLWNNQEKIGQYLSSNRDHKAVGRRPFDKMATLLAYLGPPEHKPVADTHWSSLNLTSSKFEEFMTRHQVHEKEEFKALKTLSIFYQAGTSKAGNPIFYYVARRFKTGQINGDLLIYHVLLTLKPYYAKPYEIVVDLTHTGPSNRFKTDFLSKWFVVFPGFAYDNVSAVYIYNCNSWVREYTKYHERLLTGLKGSKRLVFIDCPGKLAEHIEHEQQKLPAATLALEEDLKVFHNALKLAHKDTKVSIKVGSTAVQVTSAERTKVLGQSVFLNDIYYASEIEEICLVDENQFTLTIANQGTPLTFMHQECEAIVQSIIHIRTRWELSQPDSIPQHTKIRPKDVPGTLLNIALLNLGSSDPSLRSAAYNLLCALTCTFNLKIEGQLLETSGLCIPANNTLFIVSISKTLAANEPHLTLEFLEECISGFSKSSIELKHLCLEYMTPWLSNLVRFCKHNDDAKRQRVTAILDKLITMTINEKQMYPSIQAKIWGSLGQITDLLDVVLDSFIKTSATGGLGSIKAEVMADTAVALASGNVKLVSSKVIGRMCKIIDKTCLSPTPTLEQHLMWDDIAILARYMLMLSFNNSLDVAAHLPYLFHVVTFLVATGPLSLRASTHGLVINIIHSLCTCSQLHFSEETKQVLRLSLTEFSLPKFYLLFGISKVKSAAVIAFRSSYRDRSFSPGSYERETFALTSLETVTEALLEIMEACMRDIPTCKWLDQWTELAQRFAFQYNPSLQPRALVVFGCISKRVSHGQIKQIIRILSKALESCLKGPDTYNSQVLIEATVIALTKLQPLLNKDSPLHKALFWVAVAVLQLDEVNLYSAGTALLEQNLHTLDSLRIFNDKSPEEVFMAIRNPLEWHCKQMDHFVGLNFNSNFNFALVGHLLKGYRHPSPAIVARTVRILHTLLTLVNKHRNCDKFEVNTQSVAYLAALLTVSEEVRSRCSLKHRKSLLLTDISMENVPMDTYPIHHGDPSYRTLKETQPWSSPKGSEGYLAATYPTVGQTSPRARKSMSLDMGQPSQANTKKLLGTRKSFDHLISDTKAPKRQEMESGITTPPKMRRVAETDYEMETQRISSSQQHPHLRKVSVSESNVLLDEEVLTDPKIQALLLTVLATLVKYTTDEFDQRILYEYLAEASVVFPKVFPVVHNLLDSKINTLLSLCQDPNLLNPIHGIVQSVVYHEESPPQYQTSYLQSFGFNGLWRFAGPFSKQTQIPDYAELIVKFLDALIDTYLPGIDEETSEESLLTPTSPYPPALQSQLSITANLNLSNSMTSLATSQHSPASLPCSKSAVFMQLFPHQGIDKENVELSPTTGHCNSGRTRHGSASQVQKQRSAGSFKRNSIKKIV

SEQ ID NO: 37279 - protein, 60 aa, Homo sapiens
LITLIPYLAAETQRISSSQQHPHLRKVSVSESNVLLDEEVLTDPKIQALLLTVLVRISPF

SEQ ID NO: 37280 - protein, 47 aa, Homo sapiens
LLDSKINTLLSLCQDPNLLNPIHGIVQSVVYHEESPPQYQTSYLQSK

SEQ ID NO: 37281 - protein, 675 aa, Homo sapiens
LRGADPDGRPRRARGDGGGGQAAGAAGEGSGLSCGPARMAGGAGWSGAPAALLRSVRRLREVFEVCGRDPDGFLRVERVAALGLRFGQGEEVEKLVKYLDPNDLGRINFKDFCRGVFAMKGCEELLKDVLSVESAGTLPCAPEIPDCVEQGSEVTGPTFADGELIPREPGFFPEDEEEAMTLAPPEGPQELYTDSPMESTQSLEGSVGSPAEKDGGLGGLFLPEDKSLVHTPSMTTSDLSTHSTTSLISNEEQFEDYGEGDDVDCAPSSPCPDDETRTNVYSDLGSSVSSSAGQTPRKMRHVYNSELLDVYCSQCCKKINLLNDLEARLKNLKANSPNRKISSTAFGRQLMHSSNFSSSNGSTEDLFRDSIDSCDNDITEKVSFLEKKVTELENDSLTNGDLKSKLKQENTQLVHRVHELEEMVKDQETTAEQALEEEARRHREAYGKLEREKATEVELLNARVQQLEEENTELRTTVTRLKSQTEKLDEERQRMSDRLEDTSLRLKDEMDLYKRMMDKLRQNRLEFQKEREATQELIEDLRKELEHLQMYKLDCERPGRGRSASSGLGEFNARAREVELEHEVKRLKQENYKLRDQNDDLNGQILSLSLYEAKNLFAAQTKAQSLAAEIDTASRDELMEALKEQEEINFRLRQYMDKIILAILDHNPSILEIKH

SEQ ID NO: 37282 - protein, 803 aa, Homo sapiens
LRRHFFFPPSFPPLLLPSLPLSSPLSSFPPRSAGACWGERLVLQALALRGRPAGSWRGEEAGTAMAPQKHGGGGGGGSGPSAGSGGGGFGGSAAVAAATASGGKSGGGSCGGGGSYSASSSSSAAAAAGAAVLPVKKPKMEHVQADHELFLQAFEKPTQIYRFLRTRNLIAPIFLHRTLTYMSHRNSRTNIKRKTFKVDDMLSKVEKMKGEQESHSLSAHLQLTFTGFFHKNDKPSPNSENEQNSVTLEVLLVKVCHKKRKDVSCPIRQVPTGKKQVPLNPDLNQTKPGNFPSLAVSSNEFEPSNSHMVKSYSLLFRVTRPGRREFNGMINGETNENIDVNEELPARRKRNREDGEKTFVAQMTVFDKNRRLQLLDGEYEVAMQEMEECPISKKRATWETILDGKRLPPFETFSQGPTLQFTLRWTGETNDKSTAPIAKPLATRNSESLHQENKPGSVKPTQTIAVKESLTTDLQTRKEKDTPNENRQKLRIFYQFLYNNNTRQQTEARDDLHCPWCTLNCRKLYSLLKHLKLCHSRFIFNYVYHPKGARIDVSINECYDGSYAGNPQDIHRQPGFAFSRNGPVKRTPITHILVCRPKRTKASMSEFLESEDGEVEQQRTYSSGHNRLYFHSDTCLPLRPQEMEVDSEDEKDPEWLREKTITQIEEFSDVNEGEKEVMKLWNLHVMKHGFIADNQMNHACMLFVENYGQKIIKKNLCRNFMLHLVSMHDFNLISIMSIDKAVTKLREMQQKLEKGESASPANEEITEEQNGTANGFSEINSKEKALETDSVSGVSKQSKKQKL

SEQ ID NO: 37283 - protein, 489 aa, Homo sapiens
LGSLQPTCEAVPLSPPLSPRPAERLQLPECSGNGATGATGGGTRGRAFRVCVSGVGGRGRGRCESGKMAAAAVVEFQRAQSLLSTDREASIDILHSIVKRDIQENDEEAVQVKEQSILELGSLLAKTGQAAELGGLLKYVRPFLNSISKAKAARLVRSLLDLFLDMEAATGQEVELCLECIEWAKSEKRTFLRQALEARLVSLYFDTKRYQEALHLGSQLLRELKKMDDKALLVEVQLLESKTYHALSNLPKARAALTSARTTANAIYCPPKLQATLDMQSGIIHAAEEKDWKTAYSYFYEAFEGYDSIDSPKAITSLKYMLLCKIMLNTPEDVQALVSGKLALRYAGRQTEALKCVAQASKNRSLADFEKALTDYRAELRDDPIISTHLAKLYDNLLEQNLIRVIEPFSRVQIEHISSLIKLSKADVERKLSQMILDKKFHGILDQGEGVLIIFDEPPVDKTYEAALETIQNMSKVVDSLYNKAKKLT

SEQ ID NO: 37284 - protein, 63 aa, Homo sapiens
LCLTSSFTWVALVFLAGILDQGEGVLIIFDEPPVDKTYEAALETIQNMSKVVDSLYNKAKKLT

SEQ ID NO: 37285 - protein, 476 aa, Homo sapiens
LWVLAFCTSFGLLLSWSSNRLLYWLSFPSHTRVHREWSRQLPFPAVTVCNNNPLRFPRLSKGDLYYAGHWLGLLLPNRTARPLVSELLRGDEPRRQWFRKLADFRLFLPPRHFEGISAAFMDRLGHQLEDMLLSCKYRGELCGPHNFSSVFTKYGKCYMFNSGEDGKPLLTTVKGGTGNGLEIMLDIQQDEYLPIWGETEETTFEAGVKVQIHSQSEPPFIQELGFGVAPGFQTFVATQEQRLTYLPPPWGECRSSEMGLDFFPVYSITACRIDCETRYIVENCNCRMVHMPGDAPFCTPEQHKECAEPALGLLAEKDSNYCLCRTPCNLTRYNKELSMVKIPSKTSAKYLEKKFNKSEKYISENILVLDIFFEALNYETIEQKKAYEVAALLGDIGGQMGLFIGASILTILELFDYIYELIKEKLLDLLGKEEDEGSHDENVSTCDTMPNHSETISHTVNVPLQTTLGTLEEIAC

SEQ ID NO: 37286 - protein, 33 aa, Homo sapiens
MKVSAALLCLLLIAATFIPQGLAQPGKAPSSSP

SEQ ID NO: 37287 - protein, 109 aa, Homo sapiens
MWKPMPSPSNMKASAALLCLLLTAAAFSPQGLAQPVGINTSTTCCYRFINKKIPKQRLESYRRTTSSHCPREAVIFKTKLDKEICADPTQKWVQDFMKHLDKKTQTPKL

SEQ ID NO: 37288 - protein, 135 aa, Homo sapiens
VNSGFFYKTAEEKEKLVKAERKFIEDRVQKIIDLKDKVCAQSNKGFVVINQKGIDPFSLDSLAKHGIVALRRAKRRNMERLSLACGGMAVNSFEDLTVDCLGHAGLVYEYTLVSISMNSGYKVNTKPPFLKKNTT

SEQ ID NO: 37289 - protein, 43 aa, Homo sapiens
LPAATPLSWAGSAMLLLTLCPLVALQRRPASEQRGRTVPAGRR

SEQ ID NO: 37290 - protein, 108 aa, Homo sapiens
LCFLFYFIYFIFRFSVLISPREGDLGIHPMSSRELPWPRSESSWDATGSESAPQVSPPAPPNLSIPTRITPSAAGRGAREPGGLLEPAQQDPLSPIFCSRARGLSGQS

SEQ ID NO: 37291 - protein, 948 aa, Homo sapiens
LELERSERVLAPSLGLRSCVSTRASGSSPAESASGCNSSASFSCEFNMEANQCPLVVEPSYPDLVINVGEVTLGEENRKKLQKIQRDQEKERVMRAACALLNSGGGVIRMAKKVEHPVEMGLDLEQSLRELIQSSDLQAFFETKQQGRCFYIFVKSWSSGPFPEDRSVKPRLCSLSSSLYRRSETSVRSMDSREAFCFLKTKRKPKILEEGPFHKIHKGVYQELPNSDPADPNSDPADLIFQKDYLEYGEILPFPESQLVEFKQFSTKHFQEYVKRTIPEYVPAFANTGGGYLFIGVDDKSREVLGCAKENVDPDSLRRKIEQAIYKLPCVHFCQPQRPITFTLKIVNVLKRGELYGYACMIRVNPFCCAVFSEAPNSWIVEDKYVCSLTTEKWVGMMTDTDPDLLQLSEDFECQLSLSSGPPLSRPVYSKKGLEHKKELQQLLFSVPPGYLRYTPESLWRDLISEHRGLEELINKQMQPFFRGILIFSRSWAVDLNLQEKPGVICDALLIAQNSTPILYTILREQDAEGQDYCTRTAFTLKQKLVNMGGYTGKVCVRAKVLCLSPESSAEALEAAVSPMDYPASYSLAGTQHMEALLQSLVIVLLGFRSLLSDQLGCEVLNLLTAQQYEIFSRSLRKNRELFVHGLPGSGKTIMAMKIMEKIRNVFHCEAHRILYVCENQPLRNFISDRNICRAETRKTFLRENFEHIQHIVIDEAQNFRTEDGDWYGKAKSITRRAKGGPGILWIFLDYFQTSHLDCSGLPPLSDQYPREELTRIVRNADPIAKYLQKEMQVIRSNPSFNIPTGCLEVFPEAEWSQGVQGTLRIKKYLTVEQIMTCVADTCRRFFDRGYSPKDVAVLVSTAKEVEHYKYELLKAMRKKRVVQLSDACDMLGDHIVLDSVRRFSGLERSIVFGIHPRTADPAILPNVLICLASRAKQHLYIFPWGGH

SEQ ID NO: 37292 - protein, 15 aa, Homo sapiens
LFFVQHAKNLDTLHW

SEQ ID NO: 37293 - protein, 20 aa, Homo sapiens
LVCATSAVLCLAGVIAFCES

SEQ ID NO: 37294 - protein, 327 aa, Homo sapiens
VPAPVQPLLPAVFIRGRRAEAEASSPAPAAVAAACVVAAAAASRQLASGNRTRVSSGVPAPAFLGTMNPNCARCGKIVYPTEKVNCLDKFWHKACFHCETCKMTLNMKNYKGYEKKPYCNAHYPKQSFTMVADTPENLRLKQQSELQSQVRYKEEFEKNKGKGFSVVADTPELQRIKKTQDQISNIKYHEEFEKSRMGPSGGEGMEPERRDSQDGSSYRRPLEQQQPHHIPTSAPVYQQPQQQPVAQSYGGYKEPAAPVSIQRSAPGGGGKRYRAVYDYSAADEDEVSFQDGDTIVNVQQIDDGWMYGTVERTGDTGMLPANYVEAI

SEQ ID NO: 37295 - protein, 233 aa, Homo sapiens
VSSGVPAPAFLGTMNPNCARCGKIVYPTEKVNCLDKFWHKACFHCETCKMTLNMKNYKGYEKKPYCNAHYPKQSFTMVADTPENLRLKQQSELQSQVRYKEEFEKNKGKGFSVVADTPELQRIKKTQDQISNVSSCPALRHPCCPLFGPLPASLADASLADVNEASASTTPALQGGPGEELGVPRCLFSVYPQTTSTHSIFFLKGLYSVGACVLNQPPLSLTVVLFSGYRGYR

SEQ ID NO: 37296 - protein, 122 aa, Homo sapiens
LQRAKSSRGSTAWVRFLPFLILGTATGRRGTRSSLPQPLSPRPPPVSRDPCLPPRLEAMVPKCRARVPQDLLVFSLPQPPGSGLGGRSSLLLMGRCLRAFHDLPSPAQCQVDLELHKVSRDH

SEQ ID NO: 37297 - protein, 358 aa, Homo sapiens
MRGELWLLVLVLREAARALSPQPGAGHDEGPGSGWAAKGTVRGWNRRARESPGHVSEPDRTQLSQDLGGGTLAMDTLPDNRTRVVEDNHSYYVSRLYGPSEPHSRELWVDVAEANRSQVKIHTILSNTHRQASRVVLSFDFPFYGHPLRQITIATGGFIFMGDVIHRMLTATQYVAPLMANFNPGYSDNSTVVYFDNGTVFVVQWDHVYLQGWEDKGSFTFQAALHHDGRIVFAYKEIPMSVPEISSSQHPVKTGLSDAFMILNPSPDVPESRRRSIFEYHRIELDPSKVTSMSAVEFTPLPTCLQHRSCDACMSSDLTFNCSWCHVLQRSLNNQDENTYVNCLDSQQCHGSSESRRP

SEQ ID NO: 37298 - protein, 261 aa, Homo sapiens
LHPSLGNRARLRLKKKKRKKEKETQELPGHTETQLRTKSWPVLGQSKPISLSGPPVTQEPPARGACDCQFLSQALPGRPRNPTLWADLSPASLQALQGTGQVLQEPLCWLYLLPCSGHRALGKRGGGRQTRKVECSVLATRKWGGVGIHREDPSLNTAAFLGANLPPPSSDPPLMPLIVPAHATPILGTVTPSHAVGETQTLVPKGPCPTSPPQSGVSSHTALFAAMRPPPPAISQGRAQCPLYMRLHDGSGALLIPQTPN

SEQ ID NO: 37299 - protein, 57 aa, Homo sapiens
VLMLLWFLNFCLGVSLGILEQHLLSSGVKKSMERQYMMYPGTRKKISLHLRNGRHSL

SEQ ID NO: 37300 - protein, 12 aa, Homo sapiens
VCVFVFIITCAF

SEQ ID NO: 37301 - protein, 607 aa, Homo sapiens
MTAQSRSPTTPTFPGPSQRTPLTPCPVQTPRLGKALIHCWTDPGQPLGEQQRVRRQRTETSEPTMRLHRLRARLSAVACGLLLLLVRGQGQDSASPIRTTHTGQVLGSLVHVKGANAGVQTFLGIPFAKPPLGPLRFAPPEPPESWSGVRDGTTHPAMCLQDLTAVESEFLSQFNMTFPSDSMSEDCLYLSIYTPAHSHEGSNLPVMVWIHGGALVFGMASLYDGSMLAALENVVVVIIQYRLGVLGFFSTGDKHATGNWGYLDQVAALRWVQQNIAHFGGNPDRVTIFGESAGGTSVSSLVVSPISQGLFHGAIMESGVALLPGLIASSADVISTVVANLSACDQVDSEALVGCLRGKSKEEILAINKPFKMIPGVVDGVFLPRHPQELLASADFQPVPSIVGVNNNEFGWLIPKVMRIYDTQKEMDREASQAALQKMLTLLMLPPTFGDLLREEYIGDNGDPQTLQAQFQEMMADSMFVIPALQVAHFQCSRAPVYFYEFQHQPSWLKNIRPPHMKADHVKFTEEEEQLSRKMMKYWANFARNGNPNGEGLPHWPLFDQEEQYLQLNLQPAVGRALKAHRLQFWKKALPQKIQELEEPEERHTEL

SEQ ID NO: 37302 - protein, 359 aa, Homo sapiens
LGPEGEPGRGRDTRGEEERLREGGGEGRERQREETRRDTQEGRDTETQRHSGGERHRDAETPRPGSARERGTDLAQRARGASPESREPGGAPSPGADPPPAPAPSPRRARYFYPCANSPPPPLAAQPAACAGEPSTDRRRDPESRTPAPPPTPRAMDPKDRKKIQFSVPAPPSQLDPRQVEMIRRRRPTPAMLFRLSEHSSPEEEASPHQRASGEGHHLKSKRPNPCAYTPPSLKAVQRIAESHLQSISNLNENQASEEEDELGELRELGYPREEDEEEEEDDEEEEEEEDSQAEVLKVIRQSAGQKTTCGQGLEGPWERPPPLDESERDGGSEDQVEDPALSEPGEEPQRPSPSEPGT

SEQ ID NO: 37303 - protein, 144 aa, Homo sapiens
LVLVRLALVAFLRGGSLPPPAVQRIAESHLQSISNLNENQASEEEDELGELRELGYPREEDEEEEEDDEEEEEEEDSQAEVLKVIRQSAGQKTTCGQGLEGPWERPPPLDESERDGGSEDQVEDPALSEPGEEPQRPSPSEPGT

SEQ ID NO: 37304 - protein, 33 aa, Homo sapiens
LVTTLVSSAFLIVKVILSEVSGSGSGQSGGHQT

SEQ ID NO: 37305 - protein, 20 aa, Homo sapiens
LVTTLVSSAFLIVKVILSET

SEQ ID NO: 37306 - protein, 87 aa, Homo sapiens
VAFAWVSLNAWFWSTVFHTRDTDLTEKMDYFCASTVILHSIYLCCVRPGQRGVVAGLVPVEPAAAASRAQVRGGGLAAAGAVPARAA

SEQ ID NO: 37307 - protein, 186 aa, Homo sapiens
MAGLAARLVLLAGAAALASGSQGDREPVYRDCVLQCEEQNCSGGALNHFRSRQPIYMSLAGWTCRDDCKYECMWVTVGLYLQEGHKVPQFHGKWPFSRFLFFQEPASAVASFLNGLASLVMLCRYRTFVPASSPMYHTCVAFAWVSLNAWFWSTVFHTRDTDLTEKMDYFCASTVILHSIYLCCVR

SEQ ID NO: 37308 - protein, 128 aa, Homo sapiens
MAGLAARLVLLAGAAALASGSQGDREPVYRDCVLQCEEQNCSGGALNHFRSRQPIYMSLAVALLPVPVLSRAGIGRGLVSQWPGQPGDALPLPHLRASLLPHVPHLCGLRLGVPQCMVLVHSFPHQGH

SEQ ID NO: 37309 - protein, 19 aa, Homo sapiens
LLPITGEGGGGGGGLLEEV

SEQ ID NO: 37310 - protein, 93 aa, Homo sapiens
VSTMELAALCRWGLLLALLPPGAASTQVCTGTDMKLRLPASPETHLDMLRHLYQGCQVVQGNLELTYLPTNASLSFLQVRPVGNPARPCLQLG

SEQ ID NO: 37311 - protein, 422 aa, Homo sapiens
VSTMELAALCRWGLLLALLPPGAASTQVCTGTDMKLRLPASPETHLDMLRHLYQGCQVVQGNLELTYLPTNASLSFLQDIQEVQGYVLIAHNQVRQVPLQRLRIVRGTQLFEDNYALAVLDNGDPLNNTTPVTGASPGGLRELQLRSLTEILKGGVLIQRNPQLCYQDTILWKDIFHKNNQLALTLIDTNRSRACHPCSPMCKGSRCWGESSEDCQSLTRTVCAGGCARCKGPLPTDCCHEQCAAGCTGPKHSDCLACLHFNHSGICELHCPALVTYNTDTFESMPNPEGRYTFGASCVTACPYNYLSTDVGSCTLVCPLHNQEVTAEDGTQRCEKCSKPCARGTHSLPPRPAAVPVPLRMQPGPAHPVLSFLRPSWDLVSAFYSLPLAPLSPTSVPISPVSVGRGPDPDAHVAVDLSRYEG

SEQ ID NO: 37312 - protein, 553 aa, Homo sapiens
VIFISILSFYLSGNRTAQWLGALPKISKYWGTPGRPWGVAVFLFQPHSASPSQDIQEVQGYVLIAHNQVRQVPLQRLRIVRGTQLFEDNYALAVLDNGDPLNNTTPVTGASPGGLRELQLRSLTEILKGGVLIQRNPQLCYQDTILWKDIFHKNNQLALTLIDTNRSRACHPCSPMCKGSRCWGESSEDCQSLTRTVCAGGCARCKGPLPTDCCHEQCAAGCTGPKHSDCLACLHFNHSGICELHCPALVTYNTDTFESMPNPEGRYTFGASCVTACPYNYLSTDVGSCTLVCPLHNQEVTAEDGTQRCEKCSKPCARVCYGLGMEHLREVRAVTSANIQEFAGCKKIFGSLAFLPESFDGDPASNTAPLQPEQLQVFETLEEITGYLYISAWPDSLPDLSVFQNLQVIRGRILHNGAYSLTLQGLGISWLGLRSLRELGSGLALIHHNTHLCFVHTVPWDQLFRNPHQALLHTANRPEDECGKTGSPVCALPICQHTAVPRGPWQQRSWTCADCPSLCTLLDSAQLWLAWPLGMASLAGSYLPWHPSLPLCF

SEQ ID NO: 37313 - protein, 31 aa, Homo sapiens
LPSQVPIKWMALESILRRRFTHQSDVWSYGV

SEQ ID NO: 37314 - protein, 206 aa, Homo sapiens [sequence omitted]

SEQ ID NO: 37315 - protein, 47 aa, Homo sapiens
LDLGHLRKRTLFSKAARLNGSENKPGFRTPDPLGPWTQKSLKDNCGL

SEQ ID NO: 37316 - protein, 539 aa, Homo sapiens
VTPGAMKQEGSARRRGADKAKPPPGGGEQEPPPPPAPQDVEMKEEAATGGGSTGEADGKTAAAAAEHSQRELDTVTLEDIKEHVKQLEKAVSGKEPRFVLRALRMLPSTSRRLNHYVLYKAVQGFFTSNNATRDFLLPFLEEPMDTEADLQFRPRTGKAASTPLLPEVEAYLQLLVVIFMMNSKRYKEAQKISDDLMQKISTQNRRALDLVAAKCYYYHARVYEFLDKLDVVRSFLHARLRTATLRHDADGQATLLNLLLRNYLHYSLYDQAEKLVSKSVFPEQANNNEWARYLYYTGRIKAIQLEYSEARRTMTNALRKAPQHTAVGFKQTVHKLLIVVELLLGEIPDRLQFRQPSLKRSLMPYFLLTQAVRTGNLAKFNQVLDQFGEKFQADGTYTLIIRLRHNVIKTGVRMISLSYSRISLADIAQKLQLDSPEDAEFIVAKAIRDGVIEASINHEKGYVQSKEMIDIYSTREPQLAFHQRISFCLDIHNMSVKAMRFPPKSYNKDLESAEERREREQQDLEFAKEMAEDDDDSFP

SEQ ID NO: 37317 - protein, 178 aa, Homo sapiens
LDSMPSTGFQGFLLSLGLNSDPFPCFPLHLAEFRPHFIFFFRPWGSLPTVFPCHSVQVHKLLIVVELLLGEIPDRLQFRQPSLKRSLMPYFLLTQAVRTGNLAKFNQVLDQFGEKFQADGTYTLIIRLRHNVIKTGVRMISLSYSRISLADIAQKLQLDSPEDAEFIVAKVGLVQEPQ

SEQ ID NO: 37318 - protein, 41 aa, Homo sapiens
LAPRDPALRLLPPLSASPGEVARFGRAGGWRASPAGGLASG

SEQ ID NO: 37319 - protein, 286 aa, Homo sapiens
VCPPPLARAPALPACAQRPAPAPSPRAVMLPLCLVAALLLAAGPGPSLGDEAIHCPPCSEEKLARCRPPVGCEELVREPGCGCCATCALGLGMPCGVYTPRCGSGLRCYPPRGVEKPLHTLMHGQGVCMELAEIEAIQESLQPSDKDEGDHPNNSFSPCSAHDRRCLQKHFAKIRDRSTSGGKMKVNGAPREDARPVPQGSCQSELHRALERLAASQSRTHEDLYIIPIPNCDRNGNFHPKQCHPALDGQRGKCWCVDRKTGVKLPGGLEPKGELDCHQLADSFRE

SEQ ID NO: 37320 - protein, 301 aa, Homo sapiens
VEDGKRMELSQLLNEIRANYEKILTRNQIETVLSTRIQLEEDISKKMDKDEEALKAAQAELKEARRQWHHLQVEIESLHAVERGLENSLHASEQHYQMQLQDLETVIEGLEKELQEVRRGIEKQLQEHEMLLNTKMRLEQEIATYRHLLEKEEIRYYGCIQGGKKDKKPTTSRVGFVLPSAIINEISFTTKVPQKYENENVETVTKQAILNGSIVKESTEAHGTIQTEKVDEVIKEWEGSFFKDNPRLRKKSVSLRFDLHLAATDEGCLETKQDNLPDIEVRLIMRRSCSIPSIKPPSTAN

SEQ ID NO: 37321 - protein, 38 aa, Homo sapiens
VFCGFCISSFHFTRKCSLMERKTTFCSHLLMNFNKLSY

SEQ ID NO: 37322 - protein, 346 aa, Homo sapiens
LPAGRRPWCLYLFNSITMQNLNDRLASYLEKVRALEEANADLEVKIRDWHLKQSPASPERDYSPYYKTIEELRDKILTATIENNRVILEIDNARLAADDFRLKYENELALRQSVEADINGLRRVLDELTLSKTDLEMQIESLNEELAYMKKNHEEEMKEFSNQVVGQVNVEMDATPGIDLTRVLAEMREQYEAMAERNRRDAEEWFHTKSAELNKEVSTNTAMIQTSKTEITELRRTLQGLEIELQSQLSMKAGLENTVAETECRYALQLQQIQGLISSIEAQLSELRSEMECQNQEYKMLLDIKTRLEQEIATYRSLLEGQDAKMIGFPSSAGKGTAPWCRGRQS

SEQ ID NO: 37323 - protein, 136 aa, Homo sapiens
LGQAQWGLGPDMPISAVSLQEISTLRGQVGGQVSVEVDSAPGTDLAKILSDMRSQYEVMAEQNRKDAEAWFTSRTEELNREVAGHTEQLQMSRSEVTDLRRTLQGLEIELQSQLSMVCVPPPPPLPCAIHTYTLAA

SEQ ID NO: 37324 - protein, 162 aa, Homo sapiens
LRMSVEADINGLRRVLDELTLARTDLEMQIEGLKEELAYLKKNHEEEISTLRGQVGGQVSVEVDSAPGTDLAKILSDMRSQYEVMAEQNRKDAEAWFTSRTEELNREVAGHTEQLQMSRSEVTDLRRTLQGLEIELQSQLSMVCVPPPPPLPCAIHTYTLAA

SEQ ID NO: 37325 - protein, 466 aa, Homo sapiens
LGAGSTPITASQPVQALEEANNDLENKIQDWYDKKGPAAIQKNYSPYYNTIDDLKDQIVDLTVGNNKTLLDIDNTRMTLDDFRIKFEMEQNLRQGVDADINGLRQVLDNLTMEKSDLEMQYETLQEELMALKKNHKEEMSQLTGQNSGDVNVEINVAPGKDLTKTLNDMRQEYEQLIAKNRKDIENQYETQITQIEHEVSSSGQEVQSSAKEVTQLRHGVQELEIELQSQLSKKAALEKSLEDTKNRYCGQLQMIQEQISNLEAQITDVRQEIECQNQEYSLLLSIKMRLEKEIETYHNLLEGGQEDFESSGAGKIGLGGRGGSGGSYGRGSRGGSGGSYGGGGSGGGYGGGSGSRGGSGGSYGGGSGSGGGSGGGYGGGSGGGHSGGSGGGHSGGSGGNYGGGSGSGGGSGGGYGGGSGSRGGSGGSHGGGSGFGGESGGSYGGGEEASGSGGGYGGGSGKSSHS

SEQ ID NO: 37326 - protein, 439 aa, Homo sapiens
LPPAAATMTTSIRQFTSSSSIKGSSGLGGGSSRTSCRLSGGLGAGSCRLGSAGGLGSTLGGSSYSSCYSFGSGGGYGSSFGGVDGLLAGGEKATMQNLNDRLASYLDKVRALEEANTELEVKIRDWYQRQAPGPARDYSQYYRTIEELQNKILTATVDNANILLQIDNARLAADDFRTKFETEQALRLSVEADINGLRRVLDELTLARADLEMQIENLKEELAYLKKNHEEEMNALRGQVGGEINVEMDAAPGVDLSRILNEMRDQYEKMAEKNRKDAEDWFFSKTEELNREVATNSELVQSGKSEISELRRTMQALEIELQSQLSMKASLEGNLAETENRYCVQLSQIQGLIGSVEEQLAQLRCEMEQQNQEYKILLDVKTRLEQEIATYRRLLEGEDAHLTQYKKEPVTTRQVRTIVEEVQDGKVISSREQVHQTTR

SEQ ID NO: 37327 - protein, 179 aa, Homo sapiens
LPPAAATMTTSIRQFTSSSSIKGSSGLGGGSSRTSCRLSGGLGAGSCRLGSAGGLGSTLGGSSYSSCYSFGSGGGYGSSFGGVDGLLAGGEKATMQNLNDRLASYLDKVRALEEANTELEVKIRDWYQRQAPGPARDYSQYYRTIEELQNKILTATVDNANILLQIDNARLAADDFRTK

SEQ ID NO: 37328 - protein, 19 aa, Homo sapiens
MSRISLLSLVTGLKTSQLV

SEQ ID NO: 37329 - protein, 14 aa, Homo sapiens
MSKHQNVRPTFYQS

SEQ ID NO: 37330 - protein, 528 aa, Homo sapiens
MEWGVVAAQGVQVTAGDTPKAGARADGEDLTTLSDPLGKEGRRRDPGPAPPCRLVPGAKTQRARRPPGARPCPLPSAGQPAQLRRAGGAAGMARVAWGLLWLLLGSAGAQYEKYSFRGFPPEDLMPLAAAYGHALEQYEGESWRESARYLEAALRLHRLLRDSEAFCHANCSGPAPAAKPDPDGGRADEWACELRLFGRVLERAACLRRCKRTLPAFQVPYPPRQLLRDFQSRLPYQYLHYALFKANRLEKAVAAAYTFLQRNPKHELTAKYLNYYQGMLDVADESLTDLEAQPYEAVFLRAVKLYNSGDFRSSTEDMERALSEYLAVFARCLAGCEGAHEQVDFKDFYPAIADLFAESLQCKVDCEANLTPNVGGYFVDKFVATMYHYLQFAYYKLNDVRQAARSAASYMLFDPKDSVMQQNLVYYRFHRARWGLEEEDFQPREEAMLYHNQTAELRELLEFTHMYLQSDDEMELEETEPPLEPEDALSDAEFEGEGDYEEGMYADWWQEPDAKGDEAEAEPEPELA

SEQ ID NO: 37331 - protein, 36 aa, Homo sapiens
VGGHRHGESSSVHPRRLLLPLGPRAPGEHSTSCCFL

SEQ ID NO: 37332 - protein, 81 aa, Homo sapiens
LANYGEYSGAPSEQQTYDYAKTILSLMTREKHPDGKILIIGGSIANFTNVAATFKVTVATVVQFLGKVVWGKQGRGLESRV

SEQ ID NO: 37333 - protein, 570 aa, Homo sapiens
VAPPTHRHSPWAPAPARRPPWTSGGGRPLWPQAEPLSGRRARGSPSGRGAAELLYAPTGSALHRRPPTQLSGPGGKMAAAAECDVVMAATEPELLDDQEAKREAETFKEQGNAYYAKKDYNEAYNYYTKAIDMCPKNASYYGNRAATLMMLGRFREALGDAQQSVRLDDSFVRGHLREGKCHLSLGNAMAACRSFQRALELDHKNAQAQQEFKNANAVMEYEKIAETDFEKRDFRKVVFCMDRALEFAPACHRFKILKAECLAMLGRYPEAQSVASDILRMDSTNADALYVRGLCLYYEDCIEKAVQFFVQALRMAPDHEKACIACRNAKALKAKKEDGNKAFKEGNYKLAYELYTEALGIDPNNIKTNAKLYCNRGTVNSKLRKLDDAIEDCTNAVKLDDTYIKAYLRRAQCYMDTEQYEEAVRDYEKVYQTEKTKEHKQLLKNAQLELKKSKRKDYYKILGVDKNASEDEIKKAYRKRALMHHPDRHSGASAEVQKEEEKKFKEVGEAFTILSDPKKKTRYDSGQDLDEEGMNMGDFDPNNIFKAFFGGPGGFSFEASGPGNFFFQFG

SEQ ID NO: 37334 - protein, 102 aa, Homo sapiens
LWPPPFLSRNYYNVSRDPVVINKVFKDWKPGGVISCRNCGEVWGLQMIYKSVKLPVLKVRSMLLETPQGRIQAKKWSRVPFSVPDFDFLQHCAENLSDLSLD

SEQ ID NO: 37335 - protein, 69 aa, Homo sapiens
LFHLRTLIYYILPLAAKAVDGYVKPQIKQVVPEFVNASADAGGGSATYMDQAPSPAVCPQAHYNMYPQK

SEQ ID NO: 37336 - protein, 138 aa, Homo sapiens
LEGVANWSTFPSSLFADEKTEAQVWDFQSPGFPGNARQPHSPGYSDPPRFRDAPWEPPPRACWDSRGTPPSGQPPRPAPPAGNGRRCCALAGEPATEGEAGREQAGLGGLLARARALCMVYRRQLTFEEEIAALRSFL

SEQ ID NO: 37337 - protein, 80 aa, Homo sapiens
MALGSMYLVLTLIVAKVLRGAEPCCGPLKNRVLRPCPLPVHCPLPIPSPAEGIPWVAYLPIRWFISCCPGHCIQIPMCTS

SEQ ID NO: 37338 - protein, 470 aa, Homo sapiens
LGWGQPISDQTPEFGPGAGELTDPPPSSSGRCPGAHGRGSSFLCSPLSPASSPPFRSCFSPGLPLQLQPHPAGPARLRVAMEDPTLYIVERPLPGYPDAEAPEPSSAGAQAAEEPSGAGSEELIKSDQVNGVLVLSLLDKIIGAVDQIQLTQAQLEERQAEMEGAVQSIQGELSKLGKAHATTSNTVSKLLEKVRKVSVNVKTVRGSLERQAGQIKKLEVNEAELLRRRNFKVMIYQDEVKLPAKLSISKSLKESEALPEKEGEELGEGERPEEDAAALELSSDEAVEVEEVIEESRAERIKRSGLRRVDDFKKAFSKEKMEKTKVRTRENLEKTRLKTKENLEKTRHTLEKRMNKLGTRLVPAERREKLKTSRDKLRKSFTPDHVVYARSKTAVYKVPPFTFHVKKIREGQVEVLKATEMVEVGADDDEGGAERGEAGDLRRGSSPDVHALLEITEESDAVLVDKSDSD

SEQ ID NO: 37339 - protein, 41 aa, Homo sapiens
MFGDFGHGILMTLFAVWMVLRESRILSQKNENEVMFKLHLH

SEQ ID NO: 37340 - protein, 38 aa, Homo sapiens
LQPGKPPRWCKWNPSLEVSFPPPRISTQFSEVTAPSEK

SEQ ID NO: 37341 - protein, 58 aa, Homo sapiens
LQPGKPPRWCKWNPSLEVSLSKRAQDFWIPSPVTRVPVQFPPPRISTQFSEVTAPSEK

SEQ ID NO: 37342 - protein, 571 aa, Homo sapiens
LSAGLGSMAVFRSGLLVLTTPLASLAPRLASILTSAARLVNHTLYVHLQPGMSLEGPAQPQSSPVQATFEVLDFITHLYAGADVHRHLDVRILLTNIRTKSTFLPPLPTSVQNLAHPPEVVLTDFQTLDGSQYNPVKQQLVRYATSCYSCCPRLASVLLYSDYGIGEVPVEPLDVPLPSTIRPASPVAGSPKQPVRGYYRGAVGGTFDRLHNAHKVLLSVACILAQEQLVVGVADKDLLKSKLLPELLQPYTERVEHLSEFLVDIKPSLTFDVIPLLDPYGPAGSDPSLEFLVVSEETYRGGMAINRFRLENDLEELALYQIQLLKDLRHTENEEDKVSSSSFRQRMLGNLLRPPYERPELPTCLYVIGLTGISGSGKSSIAQRLKGLGAFVIDSDHLGHRAYAPGGPAYQPVVEAFGTDILHKDGIINRKVLGSRVFGNKKQLKILTDIMWPIIAKLAREEMDRAVAEGKRVCVIDAAVLLEAGWQNLVHEVWTAVIPETEAVRRIVERDGLSEAAAQSRLQSQMSGQQLVEQSHVVLSTLWEPHITQRQVEKAWALLQKRIPKTHQALD

SEQ ID NO: 37343 - protein, 457 aa, Homo sapiens
LPPPLGILYLGTLFPKLAHTLLPNKKISLFFWAPSPGKLLPELLQPYTERVEHLSEFLVDIKPSLTFDVIPLLDPYGPAGSDPSLEFLVVSEETYRGGMAINRFRLENVTPEGDWQREWMGDGEGHFEGAVGSTMAPEERSGGSGWWEEARRNWFSVCPLSRRRRSLGRKGRMGGQVGCQGLPLTPSFPLFTLSSLPQDLEELALYQIQLLKDLRHTENEEDKVSSSSFRQRMLGNLLRPPYERPELPTCLYVIGLTGISGSGKSSIAQRLKGLGAFVIDSDHLGHRAYAPGGPAYQPVVEAFGTDILHKDGIINRKVLGSRVFGNKKQLKILTDIMWPIIAKLAREEMDRAVAEGKRVCVIDAAVLLEAGWQNLVHEVWTAVIPETEAVRRIVERDGLSEAAAQSRLQSQMSGQQLVEQSHVVLSTLWEPHITQRQVEKAWALLQKRIPKTHQALD

SEQ ID NO: 37344 - protein, 172 aa, Homo sapiens
LARFRSGGYKMTEPGASPEDPWVKVEYAYSDNSLDPDDEDSDYHQEAYKESYKDRRRRAHTQAEQKRRDAIKRGYDDLQTIVPTCQQQDFSIGSQKLSKAIVLQKSMARESTGGDGAKRGCEEASASYPPMARPWCGDCHGIVGVWGKGNKVSLIFLVENTSVPVLFFLPPP

SEQ ID NO: 37345 - protein, 254 aa, Homo sapiens
LARFRSGGYKMTEPGASPEDPWVKVEYAYSDNSLDPGLFVESTRKGSVVSRANSIGSTSASSVPNTDDEDSDYHQEAYKESYKDRRRRAHTQAEQKRRDAIKRGYDDLQTIVPTCQQQDFSIGSQKLSKAIVLQKTIDYIQFLHKEKKKQEEEVSTLRKDVTALKIMKVNYEQIVKAHQDNPHEGEDQVSDQVKFNVFQGIMDSLFQSFNASISVASFQELSACVFSWIEEHCKPQTLREIVIGVLHQLKNQLY

SEQ ID NO: 37346 - protein, 308 aa, Homo sapiens
LARFRSGGYKMTEPGASPEDPWVKASPVGAHAGEGRAGRARARRGAGRRGASLLSPKSPTLSVPRGCREDSSHPACAKVEYAYSDNSLDPGLFVESTRKGSVVSRANSIGSTSASSVPNTDDEDSDYHQEAYKESYKDRRRRAHTQAEQKRRDAIKRGYDDLQTIVPTCQQQDFSIGSQKLSKAIVLQKTIDYIQFLHKEKKKQEEEVSTLRKDVTALKIMKVNYEQIVKAHQDNPHEGEDQVSDQVKFNVFQGIMDSLFQSFNASISVASFQELSACVFSWIEEHCKPQTLREIVIGVLHQLKNQLY

SEQ ID NO: 37347 - protein, 224 aa, Homo sapiens
LARFRSGGYKMTEPGASPEDPWVKVEYAYSDNSLDPDDEDSDYHQEAYKESYKDRRRRAHTQAEQKRRDAIKRGYDDLQTIVPTCQQQDFSIGSQKLSKAIVLQKTIDYIQFLHKEKKKQEEEVSTLRKDVTALKIMKVNYEQIVKAHQDNPHEGEDQVSDQVKFNVFQGIMDSLFQSFNASISVASFQELSACVFSWIEEHCKPQTLREIVIGVLHQLKNQLY

SEQ ID NO: 37348 - protein, 200 aa, Homo sapiens
LCAEHGISPEGIVEEFATEGTDRKDVFFYQADDEHYIPRAVLLDLEPRVIHSILNSPYAKLYNPENIYLSEHGGGAGNNWASGFSQGEKIHEDIFDIIDREADGSDSLEVPQEASADLFSVSLPGRDERRSGSALQFTPDTQEADAERRLCGGAGQHSPEPDCHRPPAHPEPVLLPDQPAGVHHHVGQHHHPALPRLHEQ

SEQ ID NO: 37349 - protein, 907 aa, Homo sapiens
MSLSRDLLALSKSGTWAWPRSSAPPLPRVSSGPRNSWPPRCTRKSTMRPWTCTRSACACWRWPPLSTRTPSARMPRKSTARSLRFTIQDLLAHAFFREERGVHVELAEEDDGEKPGLKLWLRMEDARRGGRPRDNQAIEFLFQLGRDAAEEVAQEMVALGLVCEADYQPVARAVRERVAAIQRKREKLRKARELEALPPEPGPPPATVPMAPGPPSVFPPEPEEPEADQHQPFLFRHASYSSTTSDCETDGYLSSSGFLDASDPALQPPGGVPSSLAESHLCLPSAFALSIPRSGPGSDFSPGDSYASDAASGLSDVGEGMGQMRRPPGRNLRRRPRSRLRVTSVSDQNDRVVECQLQTHNSKMVTFRFDLDGDSPEEIAAAMVYNEFILPSERDGFLRRIREIIQRVETLLKRDTGPMEAAEDTLSPQEEPAPLPALPVPLPDPSNEELQSSTSLEHRSWTAFSTSSSSPGTPLSPGNPFSPGTPISPGPIFPITSPPCHPSPSPFSPISSQVSSNPSPHPTSSPLPFSSSTPEFPVPLSQCPWSSLPTTSPPTFSPTCSQVTLSSPFFPPCPSTSSFPSTTAAPLLSLASAFSLAVMTVAQSLLSPSPGLLSQSPPAPPSPLPSLPLPPPVAPGGQESPSPHTAEVESEASPPPARPLPGEARLAPISEEGKPQLVGRFQVTSSKEPAEPLPLQPTSPTLSGSPKPSTPQLTSESSDTEDSAGGGPETREALAESDRAAEGLGAGVEEEGDDGKEPQVGGSPQPLSHPSPVWMNYSYSSLCLSSEESESSGEDEEFWAELQSLRQKHLSEVETLQTLQKKEIEDLYSRLGKQPPPGIVAPAAMLSSRQRRLSKGSFPTSRRNSLQRSEPPGPGIMRRNSLSGSSTGSQEQRASKGVTFAGDVGRM

SEQ ID NO: 37350 - protein, 342 aa, Homo sapiens
VNPSRCPKRLVNMDGPMRPRSASLVDFQFGVVATETIEDALLHLAQQNEQAVREASGRLGRFREPQIVEFVFLLSEQWCLEKSVSYQAVEILERFMVKQAENICRQATIQPRDNKRESQNWRALKQQLVNKFTLRLVSCVQLASKLSFRNKIISNITVLNFLQALGYLHTKEELLESELDVLKSLNFRINLPTPLAYVETLLEVLGYNGCLVPAMRLHATCLTLLDLVYLLHEPIYESLLRASIENSTPSQLQGEKFTSVKEDFMLLAVGIIAASAFIQNHECWSQVVGHLQSITGIALASIAEFSYAILTHGVGANTPGRQQSIPPHLAARALKTVASSNT

SEQ ID NO: 37351 - protein, 20 aa, Homo sapiens
LRLMCFHWIFISLNFLHLTI

SEQ ID NO: 37352 - protein, 296 aa, Homo sapiens
VSKPARAVGSRGQPRFLRSLRPPPWSPQRLRCPEDRTRPGPAMASLLKVDQEVKLKVDSFRERITSEAEDLVANFFPKKLLELDSFLKEPILNIHDLTQIHSDMNLPVPDPILLTNSHDGLDGPTYKKRRLDECEEAFQGTKVFVMPNGMLKSNQQLVDIIEKVKPEIRLLIEKCNTVKMWVQLLIPRIEDGNNFGVSIQEETVAELRTVESEAASYLDQISRYYITRAKLVSKIAKYPHVEDYRRTVTEIDEKEYISLRLIISELRNQYVTLHDMILKNIEKIKRPRSSNAETLY

SEQ ID NO: 37353 - protein, 51 aa, Homo sapiens
MCARLDTHLHGHLATLLCVLMPVELNLFPSIVERLRLLPTEQGWVLHLCSV

SEQ ID NO: 37354 - protein, 652 aa, Homo sapiens
VRIHCSPLVESAVPLRGKMNQKTILVLLILAVITIFALVCVLLVGRGGDGGEPSQLPHCPSVSPSAQPWTHPGQSQLFADLSREELTAVMRFLTQRLGPGLVDAAQARPSDNCVFSVELQLPPKAAALAHLDRGSPPPAREALAIVFFGRQPQPNVSELVVGPLPHPSYMRDVTVERHGGPLPYHRRPVLFQEYLDIDQMIFNRELPQASGLLHHCCFYKHRGRNLVTMTTAPRGLQSGDRATWFGLYYNISGAGFFLHHVGLELLVNHKALDPARWTIQKVFYQGRYYDSLAQLEAQFEAGLVNVVLIPDNGTGGSWSLKSPVPPGPAPPLQFYPQGPRFSVQGSRVASSLWTFSFGLGAFSGPRIFDVRFQGERLVYEISLQEALAIYGGNSPAAMTTRYVDGGFGMGKYTTPLTRGVDCPYLATYVDWHFLLESQAPKTIRDAFCVFEQNQGLPLRRHHSDLYSHYFGGLAETVLVVRSMSTLLNYDYVWDTVFHPSGAIEIRFYATGYISSAFLFGATGKYGNQVSEHTLGTVHTHSAHFKVDLDVAGLENWVWAEDMVFVPMAVPWSPEHQLQRLQVTRKLLEMEEQAAFLVGSATPRYLYLASNHSNKWGHPRGYRIQMLSFAGEPLPQNSSMARGFSWERIWWPG

SEQ ID NO: 37355 - protein, 781 aa, Homo sapiens
VRIHCSPLVESAVPLRGKMNQKTILVLLILAVITIFALVCVLLVGRGGDGGEPSQLPHCPSVSPSAQPWTHPGQSQLFADLSREELTAVMRFLTQRLGPGLVDAAQARPSDNCVFSVELQLPPKAAALAHLDRGSPPPAREALAIVFFGRQPQPNVSELVVGPLPHPSYMRDVTVERHGGPLPYHRRPVLFQEYLDIDQMIFNRELPQASGLLHHCCFYKHRGRNLVTMTTAPRGLQSGDRATWFGLYYNISGAGFFLHHVGLELLVNHKALDPARWTIQKVFYQGRYYDSLAQLEAQFEAGLVNVVLIPDNGTGGSWSLKSPVPPGPAPPLQFYPQGPRFSVQGSRVASSLWTFSFGLGAFSGPRIFDVRFQGERLVYEISLQEALAIYGGNSPAAMTTRYVDGGFGMGKYTTPLTRGVDCPYLATYVDWHFLLESQAPKTIRDAFCVFEQNQGLPLRRHHSDLYSHYFGGLAETVLVVRSMSTLLNYDYVWDTVFHPSGAIEIRFYATGYISSAFLFGATGKYGNQVSEHTLGTVHTHSAHFKVDLDVAGLENWVWAEDMVFVPMAVPWSPEHQLQRLQVTRKLLEMEEQAAFLVGSATPRYLYLASNHSNKWGHPRGYRIQMLSFAGEPLPQNSSMARGFSWERYQLAVTQRKEEEPSSSSVFNQNDPWAPTVDFSDFINNETIAGKDLVAWVTAGFLHIPHAEDIPNTVTVGNGVGFFLRPYNFFDEDPSFYSADSIYFRGDQDAGACEVNPLACLPQAAACAPDLPAFSHGGFSHN

SEQ ID NO: 37356 - protein, 65 aa, Homo sapiens
LCPLWYWMFLSIRLQFPRNSVAKAFRSAMHVGNSSSFPPPPNNPFIYLNWRPPLGRKEWGNGTSS

SEQ ID NO: 37357 - protein, 970 aa, Homo sapiens
LPHSMEPQVTLNVTFKNEIQSFLVSDPENTTWADIEAMVKVSFDLNTIQIKYLDEENEEVSINSQGEYEEALKMAVKQGNQLQMQVHEGHHVVDEAPPPVVGAKRLAARAGKKPLAHYSSLVRVLGSDMKTPEDPAVQSFPLVPCDTDQPQDKPPDWFTSYLETFREQVVNETVEKLEQKLHEKLVLQNPSLGSCPSEVSMPTSEETLFLPENQFSWHIACNNCQRRIVGVRYQCSLCPSYNICEDCEAGPYGHDTNHVLLKLRRPVVGSSEPFCHSKYSTPRLPAALEQVRLQKQVDKNFLKAEKQRLRAEKKQRKAEVKELKKQLKLHRKIHLWNSIHGLQSPKSPLGRPESLLQSNTLMLPLQPCTSVMPMLSAAFVDENLPDGTHLQPGTKFIKHWRMKNTGNVKWSADTKLKFMWGNLTLASTEKKDVLVPCLKAGHVGVVSVEFIAPALEGTYTSHWRLSHKGQQFGPRVWCSIIVDPFPSEESPDNIEKGMISSSKTDDLTCQQEETFLLAKEERQLGEVTEQTEGTAACIPQKAKNVASERELYIPSVDLLTAQDLLSFELLDINIVQELERVPHNTPVDVTPCMSPLPHDSPLIEKPGLGQIEEENEGAGFKALPDSMVSVKRKAENIASVEEAEEDLSGTQFVCETVIRSLTLDAAPDHNPPCRQKSLQMTFALPEGPLGNEKEEIIHIAEEEAVMEEEEDEEDEEEEDELKDEVQSQSSASSEDYIIILPECFDTSRPLGDSMYSSALSQPGLERGAEGKPGVEAGQEPAEAGERLPGGENQPQEHSISDILTTSQTLETVPLIPEVVELPPSLPRSSPCVHHHGSPGVDLPVTIPEVSSVPDQIRGEPRGSSGLVNSRQKSYDHSRHHHGSSIAGGLVKGALSVAASAYKALFAGPPVTAQPIISEDQTAALMAHLFEMGFCDRQLNLRLLKKHNYNILQVVTELLQLNNNDWYSQRY

SEQ ID NO: 37358 - protein, 95 aa, Homo sapiens
MCVFPSLVCAFFLFVSENAVLRGFLEKTVGLGGCSTSNKGERFFRVSLLSSRLECSGGMRVHYDLDFLDSDGSPTSASGSNISIISRTLHSFLST

SEQ ID NO: 37359 - protein, 101 aa, Homo sapiens
MCDCDLMAAARLCLSLLLLSTCVALLLQPLLGAQGAPLEPVYPGDNATPEQMAQYAADLRRYINMLTRPRYGKRHKEDTLAFSEWGSPHAAVPRELSPLDL

SEQ ID NO: 37360 - protein, 538 aa, Homo sapiens
LVVVMATALMAVVLRAAAVAPRLRGRGGTGGARRLSCGARRRAARGTSPGRRLSTAWSQPQPPPEEYAGADDVSQSPVAEEPSWVPSPRPPVPHESPEPPSGRSLVQRDIQAFLNQCGASPGEARHWLTQFQTCHHSADKPFAVIEVDEEVLKCQQGVSSLAFALAFLQRMDMKPLVVLGLPAPTAPSGCLSFWEAKAQLAKSCKVLVDALRHNAAAAVPFFGGGSVLRAAEPAPHASYGGIVSVETDLLQWCLESGSIPILCPIGETAARRSVLLDSLEVTASLAKALRPTKIIFLNNTGGLRDSSHKVLSNVNLPADLDLVCNAEWVSTKERQQMRLIVDVLSRLPHHSSAVITAASTLLTELFSNKGSGTLFKNAERMLRVRSLDKLDQGRLVDLVNASFGKKLRDDYLASLRPRLHSIYVSEGYNAAAILTMEPVLGGTPYLDKFVVSSSRQGQGSGQMLWECLRRDLQTLFWRSRVTNPINPWYFKHSDGSFSNKQWIFFWFGLADIRDSYELVNHAKGLPDSFHKPASDPGS

SEQ ID NO: 37361 - protein, 408 aa, Homo sapiens
LAGRGLGLRGVGFGDQRVDAASLPGLWFPPWSKPGPGRQLGRHGVHAGRGHRDSRGATEPASLAGERVALDHLSGRSQDPLSVLLPRGLLRLPPCGHRGALDQPHHRVAQPHLQVVRQRSPPASWSPPPRALSHVFLFGDRPFWWVHESGYYSQAPAQVHQFPSSCETGPGSPSGHCMITGAALWPIMTALSSQVATRARSRWVRVMPSLAYCTFLLAVGLSRIFILAHFPHQVLAGLITGAVLGWLMTPRVPMERELSFYGLTALALMLGTSLIYWTLFTLGLDLSWSISLAFKWCERPEWIHVDSRPFASLSRDSGAALGLGIALHSPCYAQVRRAQLGNGQKIACLVLAMGLLGPLDWLGHPPQISLFYIFNFLKYTLWPCLVLALVPWAVHMFSAQEAPPIHSS

SEQ ID NO: 37362 - protein, 55 aa, Homo sapiens
VFLYIAWVQLWMCAKECECVCVCVKGSVLEPTSVCCESGKRVGEGREMLTLVGAG

SEQ ID NO: 37363 - protein, 750 aa, Homo sapiens
LDSWRMNGEADCPTDLEMAAPKGQDRWSQEDMLTLLECMKNNLPSNDSSKFKTTESHMDWEKVAFKDFSGDMCKLKWVEISNEVRKFRTLTELILDAQEHVKNPYKGKKLKKHPDFPKKPLTPYFRFFMEKRAKYAKLHPEMSNLDLTKILSKKYKELPEKKKMKYIQDFQREKQEFERNLARFREDHPDLIQNAKKSDIPEKPKTPQQLWYTHEKKVYLKVRPDEIMRDYIQKHPELNISEEGITKSTLTKAERQLKDKFDGRPTKPPPNSYSLYCAELMANMKDVPSTERMVLCSQQWKLLSQKEKDAYHKKCDQKKKDYEVELLRFLESLPEEEQQRVLGEEKMLNINKKQATSPASKKPAQEGGKGGSEKPKRPVSAMFIFSEEKRRQLQEERPELSESELTRLLARMWNDLSEKKKAKYKAREAALKAQSERKPGGEREERGKLPESPKRAEEIWQQSVIGDYLARFKNDRVKALKAMEMTWNNMEKKEKLMWIKKAAEDQKRYERELSEMRAPPAATNSSKKMKFQGEPKKPPMNGYQKFSQELLSNGELNHLPLKERMVEIGSRWQRISQSQKEHYKKLAEEQQKQYKVHLDLWVKSLSPQDRAAYKEYISNKRKSMTKLRGPNPKSSRTTLQSKSPRRMMKRMRMTRTRMKKRKMMRMGTPLKMAATPLSPAARTRARMGMRMKRMTRTKTTTRMTMRMKIMSPRAAAPAPPPQGTPQTLTPTEAQPHPRAARESPGAPLPN

SEQ ID NO: 37364 - protein, 732 aa, Homo sapiens
LDSWRMNGEADCPTDLEMAAPKGQDRWSQEDMLTLLECMKNNLPSNDSSKFKTTESHMDWEKVAFKDFSGDMCKLKWVEISNEVRKFRTLTELILDAQEHVKNPYKGKKLKKHPDFPKKPLTPYFRFFMEKRAKYAKLHPEMSNLDLTKILSKKYKELPEKKKMKYIQDFQREKQEFERNLARFREDHPDLIQNAKKSDIPEKPKTPQQLWYTHEKKVYLKVRPDEIMRDYIQKHPELNISEEGITKSTLTKAERQLKDKFDGRPTKPPPNSYSLYCAELMANMKDVPSTERMVLCSQQWKLLSQKEKDAYHKKCDQKKKDYEVELLRFLESLPEEEQQRVLGEEKMLNINKKQATSPASKKPAQEGGKGGSEKPKRPVSAMFIFSEEKRRQLQEERPELSESELTRLLARMWNDLSEKKKAKYKAREAALKAQSERKPGGEREERGKLPESPKRAEEIWQQSVIGDYLARFKNDRVKALKAMEMTWNNMEKKEKLMWIKKAAEDQKRYERELSEMRAPPAATNSSKKMKFQGEPKKPPMNGYQKFSQELLSNGELNHLPLKERMVEIGSRWQRISQSQKEHYKKLAEEQQKQYKVHLDLWVKSLSPQDRAAYKEYISNKRKSMTKLRGPNPKSSRTTLQSKSESEEDDEEDEDDEDEDEEEEDDENGDSSEDGGDSSESSSEDESEDGDENEEDDEDEDDDEDDDEDEDNESEGSSSSSSSSGDSSDSDSN

SEQ ID NO: 37365 - protein, 157 aa, Homo sapiens [sequence omitted]

SEQ ID NO: 37366 - protein, 15 aa, Homo sapiens
MGPPDPGRRAARAPA

SEQ ID NO: 37367 - protein, 612 aa, Homo sapiens
LSATRLLLPKDRGVGRRQTMWTLVSWVALTAGLVAGTRCPDGQFCPVACCLDPGGASYSCCRPLLDKWPTTLSRHLGGPCQVDAHCSAGHSCIFTVSGTSSCCPFPEAVACGDGHHCCPRGFHCSADGRSCFQRSGNNSVGAIQCPDSQFECPDFSTCCVMVDGSWGCCPMPQASCCEDRVHCCPHGAFCDLVHTRCITPTGTHPLAKKLPAQRTNRAVALSSSVMCPDARSRCPDGSTCCELPSGKYGCCPMPNATCCSDHLHCCPQDTVCDLIQSKCLSKENATTDLLTKLPAHTVGDVKCDMEVSCPDGYTCCRLQSGAWGCCPFTQAVCCEDHIHCCPAGFTCDTQKGTCEQGPHQVPWMEKAPAHLSLPDPQALKRDVPCDNVSSCPSSDTCCQLTSGEWGCCPIPEAVCCSDHQHCCPQGYTCVAEGQCQRGSEIVAGLEKMPARRASLSHPRDIGCDQHTSCPVGQTCCPSLGGSWACCQLPHAVCCEDRQHCCPAGYTCNVKARSCEKEVVSAQPATFLARSPHVGVKDVECGEGHFCHDNQTCCRDNRQGWACCPYRQGVCCADRRHCCPAGFRCAARGTKCLRREAPRWDAPLRDPALRQLL

SEQ ID NO: 37368 - protein, 99 aa, Homo sapiens
LLPKDRGVGRRQTMWTLVSWVALTAGLVAGTRCPDGQFCPVACCLDPGGASYSCCRPLLVSAPQPRQELAAWVFPKGHLGLARGGRQAQVCGLSFSLSF

SEQ ID NO: 37369 - protein, 448 aa, Homo sapiens
LPKDRGVGRRQTMWTLVSWVALTAGLVAGTRCPDGQFCPVACCLDPGGASYSCCRPLLDKWPTTLSRHLGGPCQVDAHCSAGHSCIFTVSGTSSCCPFPEAVACGDGHHCCPRGFHCSADGRSCFQRSGNNSVGAIQCPDSQFECPDFSTCCVMVDGSWGCCPMPQAVCCEDHIHCCPAGFTCDTQKGTCEQGPHQVPWMEKAPAHLSLPDPQALKRDVPCDNVSSCPSSDTCCQLTSGEWGCCPIPEAVCCSDHQHCCPQGYTCVAEGQCQRGSEIVAGLEKMPARRASLSHPRDIGCDQHTSCPVGQTCCPSLGGSWACCQLPHAVCCEDRQHCCPAGYTCNVKARSCEKEVVSAQPATFLARSPHVGVKDVECGEGHFCHDNQTCCRDNRQGWACCPYRQGVCCADRRHCCPAGFRCAARGTKCLRREAPRWDAPLRDPALRQLL

SEQ ID NO: 37370 - protein, 162 aa, Homo sapiens
MPPASGPSVLARLLPLLGLLLGSASRAPGKSPPEPPSPQEILIKVQVYVSGELVPLARASVDVFGNRTLLAAGTTDSEGVATLPLSYRLGTWVLVTAARPGFLTNSVPWRVDKLPLYASVSLYLLPERPATLILYEDLVHILLGSPGKAPPHPRQLFFLPLT

SEQ ID NO: 37371 - protein, 1047 aa, Homo sapiens
LGGCGRRKMARALCPLQALWLLEWVLLLLGPCAAPPAWALNLDPVQLTFYAGPNGSQFGFSLDFHKDSHGRVAIVVGAPRTLGPSQEETGGVFLCPWRAEGGQCPSLLFDLRDETRNVGSQTLQTFKARQGLGASVVSWSDVIVACAPWQHWNVLEKTEEAEKTPVGSCFLAQPESGRRAEYSPCRGNTLSRIYVENDFSWDKRYCEAGFSSVVTQAGELVLGAPGGYYFLGLLAQAPVADIFSSYRPGILLWHVSSQSLSFDSSNPEYFDGYWGYSVAVGEFDGDLNTTEYVVGAPTWSWTLGAVEILDSYYQRLHRLRGEQMASYFGHSVAVTDVNGDGRHDLLVGAPLYMESRADRKLAEVGRVYLFLQPRGPHALGAPSLLLTGTQLYGRFGSAIAPLGDLDRDGYNDIAVAAPYGGPSGRGQVLVFLGQSEGLRSRPSQVLDSPFPTGSAFGFSLRGAVDIDDNGYPDLIVGAYGANQVAVYRAQPVVKASVQLLVQDSLNPAVKSCVLPQTKTPVSCFNIQMCVGATGHNIPQKLSLNAELQLDRQKPRQGRRVLLLGSQQAGTTLNLDLGGKHSPICHTTMAFLRDEADFRDKLSPIVLSLNVSLPPTEAGMAPAVVLHGDTHVQEQTRIVLDCGEDDVCVPQLQLTASVTGSPLLVGADNVLELQMDAANEGEGAYEAELAVHLPQGAHYMRALSNVEGFERLICNQKKENETRVVLCELGNPMKKNAQIGIAMLVSVGNLEEAGESVSFQLQIRSKNSQNPNSKIVLLDVPVRAEAQVELRGNSFPASLVVAAEEGEREQNSLDSWGPKVEHTYELHNNGPGTVNGLHLSIHLPGQSQPSDLLYILDIQPQGGLQCFPQPPVNPLKVDWGLPIPSPSPIHPAHHKRDRRQIFLPEPEQPSRLQDPVLVSCDSAPCTVVQCDLQEMARGQRAMVTVLAFLWLPSLYQRPLDQFVLQSHAWFNVSSLPYAVPPLSLPRGEAQVWTQLLRALEERAIPIWWVLVGVLGGLLLLTILVLAMWKVGFFKRNRPPLEEDDEEGE

SEQ ID NO: 37372 - protein, 280 aa, Homo sapiens
LVLGAPGGYYFLGYSVAVGEFDGDLNTTEYVVGAPTWSWTLGAVEILDSYYQRLHRLRGEQMASYFGHSVAVTDVNGDGRHDLLVGAPLYMESRADRKLAEVGRVYLFLQPRGPHALGAPSLLLTGTQLYGRFGSAIAPLGDLDRDGYNDIAVAAPYGGPSGRGQVLVFLGQSEGLRSRPSQVLDSPFPTGSAFGFSLRGAVDIDDNGYPGALDCLQLEMPKKGPWTFAGSAKRHGQGLMPGLVSHYGLPEGLGETSSGGGGVGNPWEDEMRIPCPNRQF

SEQ ID NO: 37373 - protein, 612 aa, Homo sapiens
LRPRVKFAKRRGRRQPQRGGGGEEAQSPGWGRGRGGRQGAGWGAAASMRPRSALPRLLLPLLLLPAAGPAQFHGEKGISIPDHGFCQPISIPLCTDIAYNQTIMPNLLGHTNQEDAGLEVHQFYPLVKVQCSPELRFFLCSMYAPVCTVLEQAIPPCRSICERARQGCEALMNKFGFQWPERLRCEHFPRHGAEQICVGQNHSEDGAPALLTTAPPPGLQPGAGGTPGGPGGGGAPPRYATLEHPFHCPRVLKVPSYLSYKFLGERDCAAPCEPARPDGSMFFSQEETRFARLWILTWSVLCCASTFFTVTTYLVDMQRFRYPERPIIFLSGCYTMVSVAYIAGFVLQERVVCNERFSEDGYRTVVQGTKKEGCTILFMMLYFFSMASSIWWVILSLTWFLAAGMKWGHEAIEANSQYFHLAAWAVPAVKTITILAMGQIDGDLLSGVCFVGLNSLDPLRGFVLAPLFVYLFIGTSFLLAGFVSLFRIRTIMKHDGTKTEKLERLMVRIGVFSVLYTVPATIVIACYFYEQAFREHWERSWVSQHCKSLAIPCPAHYTPRMSPDFTVYMIKYLMTLIVGITSGFWIWSGKTLHSWRKFYTRLTNSRHGETTV

SEQ ID NO: 37374 - protein, 592 aa, Homo sapiens
LGSPSGTPSPPHLPDPSPPRSPRMQGTRLPVCCACPVGSSKPAEAEKEKVRRGHPTVHSETKYVELIVINDHQLFEQMRQSVVLTSNFAKSVVNLADVIYKEQLNTRIVLVAMETWADGDKIQVQDDLLETLARLMVYRREGLPEPSDATHLFSGRTFQSTSSGAAYVGGICSLSHGGGVNEYGNMGAMAVTLAQTLGQNLGMMWNKHRSSAGDCKCPDIWLGCIMEDTGFYLPRKFSRCSIDEYNQFLQEGGGSCLFNKPLKLLDPPECGNGFVEAGEECDCGSVQECSRAGGNCCKKCTLTHDAMCSDGLCCRRCKYEPRGVSCREAVNECDIAETCTGDSSQCPPNLHKLDGYYCDHEQGRCYGGRCKTRDRQCQVLWGHAAADRFCYEKLNVEGTERGSCGRKGSGWVQCSKQDVLCGFLLCVNISGAPRLGDLVGDISSVTFYHQGKELDCRGGHVQLADGSDLSYVEDGTACGPNMLCLDHRCLPASAFNFSTCPGSGERRICSHHGVCSNEGKCICQPDWTGKDCSIHNPLPTSPPTGETERYKGPSGTNIIIGSIAGAVLVAAIVLGGTGWGFKNIRRGRSGGA

SEQ ID NO: 37375 - protein, 21 aa, Homo sapiens
LPRLETEAKAAAAEEVEERRG

SEQ ID NO: 37376 - protein, 114 aa, Homo sapiens [sequence omitted]

SEQ ID NO: 37377 - protein, 531 aa, Homo sapiens
LTHLPRERVLLLQRSGPQTHGLAPGTTCLMQELACPGSSASGHSDLSGVRGALPIAGLRPNPTPSGYARGCCQGHPGIASLAHSFIKPSHPRSEQSQSRMERRRITSAARRSYVSSGEMMVGGLAPGRRLGPGTRLSLARMPPPLPTRVDFSLAGALNAGFKETRASERAEMMELNDRFASYIEKVRFLEQQNKALAAELNQLRAKEPTKLADVYQAELRELRLRLDQLTANSARLEVERDNLAQDLATVRQKLQDETNLRLEAENNLAAYRQEADEATLARLDLERKIESLEEEIRFLRKIHEEEVRELQEQLARQQVHVELDVAKPDLTAALKEIRTQYEAMASSNMHEAEEWYRSKFADLTDAAARNAELLRQAKHEANDYRRQLQSLTCDLESLRGTNESLERQMREQEERHVREAASYQEALARLEEEGQSLKDEMARHLQEYQDLLNVKLALDIEIATYRKLLEGEENRITIPVQTFSNLQIRETSLDTKSVSEGHLKRNIVVKTVEMRDGEVIKESKQEHKDVM

SEQ ID NO: 37378 - protein, 46 aa, Homo sapiens
LSTSVQRLFPLQDHPKMNLKDSLDVAKPADAKNGNSIRLALTVSEA

SEQ ID NO: 37379 - protein, 259 aa, Homo sapiens
VMLLVLVVLIPVLVSSGGPEGHYEMLGTCRMVCDPYPARGPGAGARTDGGDALSEQSGAPPPSTLVQGPQGKPGRTGKPGPPGPPGDPGPPGPVGPPGEKGEPGKPGPPGLPGAGGSGAISTATYTTVPRVAFYAGLKNPHEGYEVLKFDDVVTNLGNNYDAASGKFTCNIPGTYFFTYHVLMRGGDGTSMWADLCKNGQVRASAIAQDADQNYDYASNSVILHLDAGDEVFIKLDGGKAHGGNSNKYSTFSGFIIYSD

SEQ ID NO: 37380 - protein, 132 aa, Homo sapiens
MFLVGLTGGIASGKSSVIQVFQQLGCAVIDVDVMARHVVQPGYPAHRRIVEVFGTEVLLENGDINRKVLGDLIFNQPDRRQLLNAITHPEIRKEMMKETFKYFLREPRTSPRGKKHVPSALKEADSLMRRDT

SEQ ID NO: 37381 - protein, 60 aa, Homo sapiens
LACGLLAAHLIFVPVVPAFFIQPLLGLQLREHHPGGQGLPTGALQCGSAMAVSNQAKEGP

SEQ ID NO: 37382 - protein, 50 aa, Homo sapiens
LGTGTGELHLFVLAFLWAVGGHPFPGSGRKYQMHCCSAQYISLVSNKESS

SEQ ID NO: 37383 - protein, 179 aa, Homo sapiens
LERAGCEWRCWGCFRASLPPQGTGTPKPSFPLGSNSTNPSTESHSPRDLDSEVFCDSLEQLEPELVWTEQRAASGGKRDPRNSPVPPTKKEGLRGSPPGPQELDVWLLGTVRALQESMQEVQARVQSLESMPRPPEQRPQPRPSARPWPLGLPGPALLFFLLWPFVVQWLFRMFRTQKR

SEQ ID NO: 37384 - protein, 75 aa, Homo sapiens
LRSGSANPSSRGDVAGGWRSWICPLMVALLIPGLLKSKERLSMLRHERICSCSSRENGWDRLLRNNSAGKSGRWL

SEQ ID NO: 37385 - protein, 107 aa, Homo sapiens
LRSGSANPSRLECSGEISAHCSLNLPRLKRSSRLSLLSSWDHRGDVAGGWRSWICPLMVALLIPGLLKSKERLSMLRHERICSCSSRENGWDRLLRNNSAGKSGRWL

SEQ ID NO: 37386 - protein, 102 aa, Homo sapiens
LFPTPTQLCEDPCHVLAQPLYGSCGAGLTHSSLLPCSRGDVAGGWRSWICPLMVALLIPGLLKSKERLSMLRHERICSCSSRENGWDRLLRNNSAGKSGRWL

SEQ ID NO: 37387 - protein, 11 aa, Homo sapiens
VSNAFALLIIF

SEQ ID NO: 37388 - protein, 94 aa, Homo sapiens
LIFMVDSNDREQIDEAWEVLTYLLEDDELRNAVLLVFANKQDLPNTMNAAEITDKLGLHSLRYRNWHIQATCATTGHGLYEGLNWLANQFQNQN

SEQ ID NO: 37389 - protein, 27 aa, Homo sapiens
MGVHHHTWLIFVFFVETGSCHVAQAGL

SEQ ID NO: 37390 - protein, 22 aa, Homo sapiens
VSFFTGISILHNTRKVEDYSLF

SEQ ID NO: 37391 - protein, 28 aa, Homo sapiens
VEGRVCALGITVLGLGPLRLQLLHPSLL

SEQ ID NO: 37392 - protein, 14 aa, Homo sapiens
LKMFTLLFTLHHLS

SEQ ID NO: 37393 - protein, 687 aa, Homo sapiens [sequence omitted]

SEQ ID NO: 37394 - protein, 778 aa, Homo sapiens
LHACARAGGGGARAAGAGFAERRAAAAEPDVSAKMAGRSMQAARCPTDELSLTNCAVVNEKDFQSGQHVIVRTSPNHRYTFTLKTHPSVVPGSIAFSLPQRKWAGLSIGQEIEVSLYTFDKAKQCIGTMTIEIDFLQKKSIDSNPYDTDKMAAEFIQQFNNQAFSVGQQLVFSFNEKLFGLLVKDIEAMDPSILKGEPATGKRQKIEVGLVVGNSQVAFEKAENSSLNLIGKAKTKENRQSIINPDWNFEKMGIGGLDKEFSDIFRRAFASRVFPPEIVEQMGCKHVKGILLYGPPGCGKTLLARQIGKMLNAREPKVVNGPEILNKYVGESEANIRKLFADAEEEQRRLGANSGLHIIIFDEIDAICKQRGSMAGSTGVHDTVVNQLLSKIDGVEQLNNILVIGMTNRPDLIDEALLRPGRLEVKMEIGLPDEKGRLQILHIHTARMRGHQLLSADVDIKELAVETKNFSGAELEGLVRAAQSTAMNRHIKASTKVEVDMEKAESLQVTRGDFLASLENDIKPAFGTNQEDYASYIMNGIIKWGDPVTRVLDDGELLVQQTKNSDRTPLVSVLLEGPPHSGKTALAAKIAEESNFPFIKICSPDKMIGFSETAKCQAMKKIFDDAYKSQLSCVVVDDIERLLDYVPIGPRFSNLVLQALLVLLKKAPPQGRKLLIIGTTSRKDVLQEMEMLNAFSTTIHVPNIATGEQLLEALELLGNFKDKERTTIAQQVKGKKVWIGIKKLLMLIEMSLQMDPEYRVRKFLALLREEGASPLDFD

SEQ ID NO: 37395 - protein, 382 aa, Homo sapiens
VDFVPTIGGVAPPLHGRGQTSSSAPLLMEPHLLGLLLGLLLGGTRVLAGYPIWWSLALGQQYTSLGSQPLLCGSIPGLVPKQLRFCRNYIEIMPSVAEGVKLGIQECQHQFRGRRWNCTTIDDSLAIFGPVLDKATRESAFVHAIASAGVAFAVTRSCAEGTSTICGCDSHHKGPPGEGWKWGGCSEDADFGVLVSREFADARENRPDARSAMNKHNNEAGRTTILDHMHLKCKCHGLSGSCEVKTCWWAQPDFRAIGDFLKDKYDSASEMVVEKHRESRGWVETLRAKYSLFKPPTERDLVYYENSPNFCEPNPETGSFGTRDRTCNVTSHGIDGCDLLCCGRGHNTRTEKRKEKCHCIFHWCCYVSCQECIRIYDVHTCK

SEQ ID NO: 37396 - protein, 150 aa, Homo sapiens
LGLLVKDMKIKSLEEIYLFSLPIRESEIIDFFLGASLKHKVLKIMPVQKQTRASQGTRFEAFVAIEDYNGHVGLGVKCSKEVATAICRAINILAKLSIVPVRRGYWGNKIGKPYAVPCKVTGHCGSVLVRLVAPPGARASSWHVCPRSCS

SEQ ID NO: 37397 - protein, 24 aa, Homo sapiens
LIISSINYRTIVPFKIYSKRVNSA

SEQ ID NO: 37398 - protein, 104 aa, Homo sapiens
MAALIPQGFSCLSRVLGWWSRQPVLVTQSAAIVPVRTKKRFTSPIYQPKFKTEKEFMQHARKAGLVIPPEKSDRSIHLACTAGIFDAYVPPEGDARISSLSKER

SEQ ID NO: 37399 - protein, 976 aa, Homo sapiens
LRALLPFPPLRPLPRRQPARQSARTASFPAPSAPAGSLPRPPGSPGRSPPAVARARWMWLAAAAPSLARRLLFLGPPPPPLLLLVFSRSSRRRLHSLGLAAMPEKRPFERLPADVSPINYSLCLKPDLLDFTFEGKLEAAAQVRQATNQIVMNCADIDIITASYAPEGDEEIHATGFNYQNEDEKVTLSFPSTLQTGTGTLKIDFVGELNDKMKGFYRSKYTTPSGEVRYAAVTQFEATDARRAFPCWDEPAIKATFDISLVVPKDRVALSNMNVIDRKPYPDDENLVEVKFARTPVMSTYLVAFVVGEYDFVETRSKDGVCVRVYTPVGKAEQGKFALEVAAKTLPFYKDYFNVPYPLPKIDLIAIADFAAGAMENWGLVTYRETALLIDPKNSCSSSRQWVALVVGHELAHQWFGNLVTMEWWTHLWLNEGFASWIEYLCVDHCFPEYDIWTQFVSADYTRAQELDALDNSHPIEVSVGHPSEVDEIFDAISYSKGASVIRMLHDYIGDKDFKKGMNMYLTKFQQKNAATEDLWESLENASGKPIAAVMNTWTKQMGFPLIYVEAEQVEDDRLLRLSQKKFCAGGSYVGEDCPQWMVPITISTSEDPNQAKLKILMDKPEMNVVLKNVKPDQWVKLNLGTVGFYRTQYSSAMLESLLPGIRDLSLPPVDRLGLQNDLFSLARAGIISTVEVLKVMEAFVNEPNYTVWSDLSCNLGILSTLLSHTDFYEEIQEFVKDVFSPIGERLGWDPKPGEGHLDALLRGLVLGKLGKAGHKATLEEARRRFKDHVEGKQILSADLRSPVYLTVLKHGDGTTLDIMLKLHKQADMQEEKNRIERVLGATLLPDLIQKVLTFALSEEVRPQDTVSVIGGVAGGSKHGRKAAWKFIKDNWEELYNRYQGGFLISRLIKLSVEGFAVDKMAGEVKAFFESHPAPSAERTIQQCCENILLNAAWLKRDAESIHQYLLQRKASPPTV

SEQ ID NO: 37400 - protein, 45 aa, Homo sapiens
LFSASWFHLLFKTIVLQLSVEGFAVDKMAGEVKVRKILFTLHFSV

SEQ ID NO: 37401 - protein, 860 aa, Homo sapiens
VARTTANRRGARRLRGEPTFLVELSRVLANPGNSQVARVAAGLQIKNSLTSKDPDIKAQYQQRWLAIDANARREVKNYVLQTLGTETYRPSSASQCVAGIACAEIPVNQWPELIPQLVANVTNPNSTEHMKESTLEAIGYICQDIDPEQLQDKSNEILTAIIQGMRKEEPSNNVKLAATNALLNSLEFTKANFDKESERHFIMQVVCEATQCPDTRVRVAALQNLVKIMSLYYQYMETYMGPALFAITIEAMKSDIDEVALQGIEFWSNVCDEEMDLAIEASEAAEQGRPPEHTSKFYAKGALQYLVPILTQTLTKQDENDDDDDWNPCKAAGVCLMLLATCCEDDIVPHVLPFIKEHIKNPDWRYRDAAVMAFGCILEGPEPSQLKPLVIQAMPTLIELMKDPSVVVRDTAAWTVGRICELLPEAAINDVYLAPLLQCLIEGLSAEPRVASNVCWAFSSLAEAAYEAADVADDQEEPATYCLSSSFELIVQKLLETTDRPDGHQNNLRSSAYESLMEIVKNSAKDCYPAVQKTTLVIMERLQQVLQMESHIQSTSDRIQFNDLQSLLCATLQNVLRKVQHQDALQISDVVMASLLRMFQSTAGSGGVQEDALMAVSTLVEVLGGEFLKYMEAFKPFLGIGLKNYAEYQVCLAAVGLVGDLCRALQSNIIPFCDEVMQLLLENLGNENVHRSVKPQILSVFGDIALAIGGEFKKYLEVVLNTLQQASQAQVDKSDYDMVDYLNELRESCLEAYTGIVQGLKGDQENVHPDVMLVQPRVEFILSFIDHIAGDEDHTDGVVACAAGLIGDLCTAFGKDVLKLVEARPMIHELLTEGRRSKTNKAKTLATWATKELRKLKNQA

SEQ ID NO: 37402 - protein, 452 aa, Homo sapiens
LGRFLPGPGHCPAARGRPSLPGLSSVLAQGSEEEESCTSEITTSLSEEMLDLRGAERCQKGGCVPGRPMGPPRRRCLPAASGPGADVSLWNILRNNIGKDLSKVSMPVQLNEPLNTLQRLCEELEYSSLLDQASRIADPCERMVYIAAFAVSAYSSTYHRAGCKPFNPVLGETYECERPDRGFRFISEQVSHHPPISACHAESENFAFWQDMKWKNKFWGKSLEIVPVGTVNVSLPRFGDHFEWNKVTSCIHNVLSGQRWIEHYGEVLIRNTQDSSCHCKITFCKAKYWSSNVHEVQGAVLSRSGRVLHRLFGKWHEGLYRGPTPGGQCIWKPNSMPPDHERNFGFTQFALELNELTAELKRSLPSTDTRLRPDQRYLEEGNIQAAEAQKRRIEQLQRDRRKVMEENNIVHQARFFRRQTDSSGKEWWVTNNTYWRLRAEPGYGNMDGAVLW

SEQ ID NO: 37403 - protein, 447 aa, Homo sapiens
LGRFLPGPGHCPAARGRPSLPGLSSVLAQGSEEEESCTSEITTSLSEEMLDLRGAERCQKGRPMGPPRRRCLPAASGPGADVSLWNILRNNIGKDLSKVSMPVQLNEPLNTLQRLCEELEYSSLLDQASRIADPCERMVYIAAFAVSAYSSTYHRAGCKPFNPVLGETYECERPDRGFRFISEQVSHHPPISACHAESENFAFWQDMKWKNKFWGKSLEIVPVGTVNVSLPRFGDHFEWNKVTSCIHNVLSGQRWIEHYGEVLIRNTQDSSCHCKITFCKAKYWSSNVHEVQGAVLSRSGRVLHRLFGKWHEGLYRGPTPGGQCIWKPNSMPPDHERNFGFTQFALELNELTAELKRSLPSTDTRLRPDQRYLEEGNIQAAEAQKRRIEQLQRDRRKVMEENNIVHQARFFRRQTDSSGKEWWVTNNTYWRLRAEPGYGNMDGAVLW

SEQ ID NO: 37404 - protein, 223 aa, Homo sapiens
LVRGEGFKLRTASLGSDSRSGSGWGVGRGSLCRDAARWGGPHPPGTVSLTLSLQVSEASTGQRRLHSLSTSSDTTADSFSSLNPEEQEALYRGPTPGGQCIWKPNSMPPDHERNFGFTQFALELNELTAELKRSLPSTDTRLRPDQRYLEEGNIQAAEAQKRRIEQLQRDRRKVMEENNIVHQARFFRRQTDSSGKEWWVTNNTYWRLRAEPGYGNMDGAVLW

SEQ ID NO: 37405 - protein, 858 aa, Homo sapiens
LLPALHPQQGVASPFSMDFQERDPPFLPESAQSSKPSSAQQASELWEVVEEPRVRLGTEGVMPERQEGHLLKKRKWPLKGWHKRYFVLEDGILHYATTRQDITKGKLHGSIDVRLSVMSINKKAQRIDLDTEDNIYHLKIKSQDLFQSWVAQLRAHRLAHRLDMPRGSLPSTAHRKVPGAQLPTAATASALPGLGPREKVSSWLRDSDGLDRCSHELSECQGKLQELHRLLQSLESLHRIPSAPVIPTHQASVTTERPKKGKRTSRMWCTQSFAKDDTIGRVGRLHGSVPNLSRYLESRDSSGTRGLPPTDYAHLQRSFWALAQKVHSSLSSVLAALTMERDQLRDMHQGSELSRMGVSEASTGQRRLHSLSTSSDTTADSFSSLNPEEQEALYMKGRELTPQLSQTSILSLADSHTEFFDACEVLLSASSSENEGSEEEESCTSEITTSLSEEMLDLRGAERCQKGGCVPGRPMGPPRRRCLPAASGPGADVSLWNILRNNIGKDLSKVSMPVQLNEPLNTLQRLCEELEYSSLLDQASRIADPCERMVYIAAFAVSAYSSTYHRAGCKPFNPVLGETYECERPDRGFRFISEQVSHHPPISACHAESENFAFWQDMKWKNKFWGKSLEIVPVGTVNVSLPRFGDHFEWNKVTSCIHNVLSGQRWIEHYGEVLIRNTQDSSCHCKITFCKAKYWSSNVHEVQGAVLSRSGRVLHRLFGKWHEGLYRGPTPGGQCIWKPNSMPPDHERNFGFTQFALELNELTAELKRSLPSTDTRLRPDQRYLEEGNIQAAEAQKRRIEQLQRDRRKVMEENNIVHQARFFRRQTDSSGKEWWVTNNTYWRLRAEPGYGNMDGAVLW

SEQ ID NO: 37406 - protein, 436 aa, Homo sapiens
LLPALHPQQGVASPFSMDFQERDPPFLPESAQSSKPSSAQQASELWEVVEEPRVRLGTEGVMPERQEGHLLKKRKWPLKGWHKRYFVLEDGILHYATTRQDITKGKLHGSIDVRLSVMSINKKAQRIDLDTEDNIYHLKIKSQDLFQSWVAQLRAHRLAHRLDMPRGSLPSTAHRKVPGAQLPTAATASALPGLGPREKVSSWLRDSDGLDRCSHELSECQGKLQELHRLLQSLESLHRIPSAPVIPTHQASVTTERPKKGKRTSRMWCTQSFAKDDTIGRVGRLHGSVPNLSRYLESRDSSGTRGLPPTDYAHLQRSFWALAQKVHSSLSSVLAALTMERDQLRDMHQGSELSRMGVSEASTGQRRLHSLSTSSDTTADSFSSLNPEEQEALYMKGRELTPQLSQTSILSLADSHTEFFDACEVLLSASSSENEG

SEQ ID NO: 37407 - protein, 127 aa, Homo sapiens
LTCQASVTTERPKKGKRTSRMWCTQSFAKDDTIGRVGRLHGSVPNLSRYLESRDSSGTRGLPPTDYAHLQRSFWALAQKVHSSLSSVLAALTMERDQLRDMHQGSELSRMGVRPGGQGDWCGERASS

SEQ ID NO: 37408 - protein, 108 aa, Homo sapiens [sequence omitted]

SEQ ID NO: 37409 - protein, 74 aa, Homo sapiens
MSSTRPAGLRLMLMSVLTCLFESLNHMLSVILESDPQQVIQKVNFRADDGGLTEQSVAQVLQSAKEQIKWSLLK

SEQ ID NO: 37410 - protein, 115 aa, Homo sapiens
MTIVYKNSIDLFLYVVGSSYENELMLMSVLTCLFESLNHMLRKNVEKRWLLENMDGAFLVLDEIVDGGVILESDPQQVIQKVNFRADDGGLTEQSVAQVSLLRLILLVWNFPPWR

SEQ ID NO: 37411 - protein, 32 aa, Homo sapiens
LRLQEPSLYTIKAVFILDNDGRRLLAKCDSGE

SEQ ID NO: 37412 - protein, 12 aa, Homo sapiens
MWTVEKVSHVGP

SEQ ID NO: 37413 - protein, 59 aa, Homo sapiens
MWSGVCPWPWLHRVCFPLGPSGSSSLVFCQGGVRGLTLRRVTCWLERQSSGLDLSFGRF

SEQ ID NO: 37414 - protein, 208 aa, Homo sapiens
VNWKRAQGRTSSVTLYTRKLAGTMGKKQNKKKVEEVLEEEEEEYVVEKVLDRRVVKGKVEYLLKWKGFSDEDNTWEPEENLDCPDLIAEFLQSQKTAHETDKSEGGKRKADSDSEDKGEESKPKKKKEESEKPRGFARGLEPERIIGATDSSGELMFLMKWKNSDEADLVPAKEANVKCPQVVISFYEERLTWHSYPSEDDDKKDDKN

SEQ ID NO: 37415 - protein, 277 aa, Homo sapiens
VRRVVAPARCERRAAQTARLFCSAEGRAVGRGLRYAASVRDATAATRLAAFLGATPPGDPTRRASSAAPIPLGLLGAALSSVTLYTRKLAGTMGKKQNKKKVEEVLEEEEEEYVVEKVLDRRVVKGKVEYLLKWKGFSDEDNTWEPEENLDCPDLIAEFLQSQKTAHETDKSEGGKRKADSDSEDKGEESKPKKKKEESEKPRGFARGLEPERIIGATDSSGELMFLMKWKNSDEADLVPAKEANVKCPQVVISFYEERLTWHSYPSEDDDKKDDKN

SEQ ID NO: 37416 - protein, 156 aa, Homo sapiens
LGAALSSVTLYTRKLAGTMGKKQNKKKVEEVLEEEEEEYVVEKVLDRRVVKGKVEYLLKWKGFSDEDNTWEPEENLDCPDLIAEFLQSQKTAHETDKSEGGKRKADSDSEDKGEESKPKKKKEESEKPRGFARGLEPERIIGATDSSGELMFLMKW

SEQ ID NO: 37417 - protein, 29 aa, Homo sapiens
MVGRGRCRCGELVLFSGASLDHLLAVHIG

SEQ ID NO: 37418 - protein, 35 aa, Homo sapiens
MVGRGRCRCGELVLFSDVSFQWAFGVGCRRTKNRR

SEQ ID NO: 37419 - protein, 36 aa, Homo sapiens
MVGRGRCRCGELVLFSDVSFQWAFGVGCRRTKNRRR

SEQ ID NO: 37420 - protein, 34 aa, Homo sapiens
MVGRGRCRCGELVLFSDQQQSLYCQDFLCAAPLP

SEQ ID NO: 37421 - protein, 59 aa, Homo sapiens
VPHMLSPQCLRFSRKARGTFSSSPSKEKMSEDLRVGGRGSRKRLPLFEKDPMVVGLRVT

SEQ ID NO: 37422 - protein, 24 aa, Homo sapiens
MSEDLRVGGRGSRKRLPLFEKGQY

SEQ ID NO: 37423 - protein, 238 aa, Homo sapiens
LDRLLGEKSVSRLSRICKGEKIWNHKVENFFLSVWKKPFVMNGICRVRARGGERRKGGEICRLPLALGLDVNIYYVCLFSPRRWLRSAAWNRPRRRGAERGGGGGGSGVSRDPQGCQCPVLRVSGLSKLPPTAQASPSDAESHLLRQRRGCSLRRLFLVPWQQWLRLRCPPPTPISGRHAPGGRLPALSLLAAVPGQRCPTCQEQGAQRQLHEAGSGPRAPVGPAWLTPAQCRTYQCH

SEQ ID NO: 37424 - protein, 205 aa, Homo sapiens
MAAKVFESIGKFGLALAVAGGVVNSALYNVDAGHRAVIFDRFRGVQDIVVGEGTHFLIPWVQKPIIFDCRSRPRNVPVITGSKDLQNVNITLRILFRPVASQLPRIFTSIGEDYDERVLPSITTEILKSVVARFDAGELITQRELVSRQVSDDLTERAATFGLILDDVSLVRSFGRPRRGRGCSSRLGAWLHFWVDAIRSSLLLC

SEQ ID NO: 37425 - protein, 35 aa, Homo sapiens
LGISAVLLCSMMCTLGEESACVRGSSRRKHGCQSV

SEQ ID NO: 37426 - protein, 33 aa, Homo sapiens
LGISAVLLCSMMCTLGEESVRGSSRRKHGCQSV

SEQ ID NO: 37427 - protein, 217 aa, Homo sapiens
MATVEPETTPTPNPPTTEKEKTESNQEVANPEHYIKHPLQNRWALWFFKNDKSKTWQANLWLISKFDTVEDFWALYNHIQLSSNLMPGCDYSLFKDGIEPMWEDEKNKRGGRWLITLNKQQRRSDLDRFWLETLLCLIGESFDDYSDDVCGAVVNVRAKGDKIAIWTTECENREAVTHIGRVYKERLGLPPKIVIGYQSHADTATKSGSTTKNRFVV

SEQ ID NO: 37428 - protein, 454 aa, Homo sapiens
LGVEDLGAWEGVPRQEPAVCSPCGSRLRLGARLLGLGWLCAVRVSSWAAVSLGGAKEACPTGLYTHSGECCKACNLGEGVAQPCGANQTVCEPCLDSVTFSDVVSATEPCKPCTECVGLQSMSAPCVEADDAVCRCAYGYYQDETTGRCEACRVCEAGSGLVFSCQDKQNTVCEECPDGTYSDEANHVDPCLPCTVCEDTERQLRECTRWADAECEEIPGRWITRSTPPEGSDSTAPSTQEPEAPPEQDLIASTVAGVVTTVMGSSQPVVTRGTTDNLIPVYCSILAAVVVGLVAYIAFKRWNSCKQNKQGANSRPVNQTPPPEGEKLHSDSGISVDSQSLHDQQPHTQTASGQALKGDGGLYSSLPPAKREEVEKLLNGSAGDTWRHLAGELGYQPEHIDSFTHEACPVRALLASWATQDSATLDALLAALRRIQRADLVESLCSESTATSPV

SEQ ID NO: 37429 - protein, 376 aa, Homo sapiens
LAMSRVPSPPPPAEMSSGPVAESWCYTQIKVVKFSYMWTINNFSFCREEMGEVIKSSTFSSGANDKLKWCLRVNPKGLDEESKDYLSLYLLLVSCPKSEVRAKFKFSILNAKGEETKAMESQRAYRFVQGKDWGFKKFIRRDFLLDEANGLLPDDKLTLFCEVSVVQDSVNISGQNTMNMVKVPECRLADELGGLWENSRFTDCCLCVAGQEFQAHKAILAARSPVFSAMFEHEMEESKKNRVEINDVEPEVFKEMMCFIYTGKAPNLDKMADDLLAAADKYALERLKVMCEDALCSNLSVENAAEILILADLHSADQLKTQAVDFINYHASDVLETSGWKSMVVSHPHLVAEAYRSLASAQCPFLGPPRKRLKQS

SEQ ID NO: 37430 - protein, 298 aa, Homo sapiens
LLPGCLCLLFLLWDPAGKDNKRKVWGRSQAGDVHLCLNFGLHSMCDQCCVCQDLVDRTRSWLYAACSISYLGAMVSSNSALQFVNYPTQVLGKSCKPIPVMLLGVTLLKKKYPLAKYLCVLLIVAGVALFMYKPKKVVGIEEHTVGYGELLLLLSLTLDGLTGVSQDHMRAHYQTGSNHMMLNINLWSTLLLGMGILFTGELWEFLSFAERYPAIIYNILLFGLTSALGQSFIFMTVVYFGPLTCSIITTTRKFFTILASVILFANPISPMQWVGTVLVFLGLGLDAKFGKGAKKTSH

SEQ ID NO: 37431 - protein, 32 aa, Homo sapiens
LAFLQVANGDSILSARPRAGWIRKMPIFLVSM

SEQ ID NO: 37432 - protein, 674 aa, Homo sapiens
VKEKALQPAAPAQNAPDAERQEALGIVRRIGTDTEAATEPAGATVPAAAAAARIGTVGPQPPAMPRRKRNAGSSSDGTEDSDFSTDLEHTDSSESDGTSRRSARVTRSSARLSQSSQDSSPVRNLQSFGTEEPAYSTRRVTRSQQQPTPVTPKKYPLRQTRSSGSETEQVVDFSDRETKNTADHDESPPRTPTGNAPSSESDIDISSPNVSHDESIAKDMSLKDSGSDLSHRPKRRRFHESYNFNMKCPTPGCNSLGHLTGKHERHFSISGCPLYHNLSADECKVRAQSRDKQIEERMLSHRQDDNNRHATRHQAPTERQLRYKEKVAELRKKRNSGLSKEQKEKYMEHRQTYGNTREPLLENLTSEYDLDLFRRAQARASEDLEKLRLQGQITEGSNMIKTIAFGRYELDTWYHSPYPEEYARLGRLYMCEFCLKYMKSQTILRRHMAKCVWKHPPGDEIYRKGSISVFEVDGKKNKIYCQNLCLLAKLFLDHKTLYYDVEPFLFYVMTEADNTGCHLIGYFSKEKNSFLNYNVSCILTMPQYMRQGYGKMLIDFSYLLSKVEEKVGSPERPLSDLGLISYRSYWKEVLLRYLHNFQGKEISIKEISQETAVNPVDIVSTLQALQMLKYWKGKHLVLKRQDLIDEWIAKEAKRSNSNKTMDPSCLKWTPPKGT

SEQ ID NO: 37433 - protein, 71 aa, Homo sapiens
LPRGHRLKPLSIALSLCLQCPSSVISRPRLSPGPSLSAPPYPKLAPPPVAELRPPTAGAAVPWLWPSALSS

SEQ ID NO: 37434 - protein, 92 aa, Homo sapiens
LHLCEASLLGHRLNSQGMQQEGTKTGKRQRSLGSLCWGTAGSSTERRGPILDRQMLGGYRGDATSHSPLPASLRRPQRDPARPRRERHLNVE

SEQ ID NO: 37435 - protein, 199 aa, Homo sapiens
MRWVWALLKNASLAGAPKYIEHFSKFSPSPLSMKQFLDFGSSNACEKTSFTFLRQELPVRLANIMKEINLLPDRVLSTPSVQLVQSWYVQSLLDIMEFLDKDPEDHRTLSQFTDALVTIRNRHNDVVPTMAQGVLEYKDTYGDDPVSNQNIQYFLDRFYLSRISIRMLINQHSGCRPQRRGAGGGGGGAGAQGRAAEGT

SEQ ID NO: 37436 - protein, 124 aa, Homo sapiens
MFSFVDLRLLLLLAATALLTHGQEEGQVEGQDEDIPPITCVQNGLRYHDRDVWKPEPCRICVCDNGKVLCDDVICDETKNCPGAEVPEGECCPVCPDGSESPTDQETTGVEVISCPRILPLRGP

SEQ ID NO: 37437 - protein, 47 aa, Homo sapiens [sequence omitted]

SEQ ID NO: 37438 - protein, 331 aa, Homo sapiens
LTSDISAPFTRRNPGAGARSAGVTMTKAGSKGGNLRDKLDGNELDLSLSDLNEVPVKELAALPKATILDLSCNKLTTLPSDFCGLTHLVKLDLSKNKLQQLPADFGRLVNLQHLDLLNNKLVTLPVSFAQLKNLKWLDLKDNPLDPVLAKVAGDCLDEKQCKQCANKVLQHMKAVQADQERERQRRLEVEREAEKKREAKQRAKEAQERELRKREKAEEKERRRKEYDALKAAKREQEKKPKKEANQAPKSKSGSRPRKPPPRKHTRSWAVLKLLLLLLLFGVAGGLVACRVTELQQQPLCTSVNTIYDNAVQGLRRHEILQWVLQTDSQQ

SEQ ID NO: 37439 - protein, 116 aa, Homo sapiens
LKQICPEVENAQPGALKSQRWVCPRLPDLTTVISVDAPLPGTLLLDEVVAAGSTRQHLDQLQYNQQFLSCHDPINIQFTSVGQRSPGPKPRWTHAPCPCDTSAGMGRQQRRACLLY

SEQ ID NO: 37440 - protein, 187 aa, Homo sapiens
LLQEGPGEGGSSSRDKDRSATVSSSVPMPAGGKGSHPSSTPQRVPNRLIHEKSPYLLQHAYNPVDWYPWGQEAFDKARKENKPIFLSVGYSTCHWCHMMEEESFQNEEIGRLLSEDFVSVKVDREERPDVDKVYMTFVQATSSGGGWPMNVWLTPNLQPFVGGTYFPPEDGLTRVGFRTVLLRIREQ

SEQ ID NO: 37441 - protein, 548 aa, Homo sapiens
MSHLSSPPKKHKGEHKGHSLPHGSERGSSSRDKDRSATVSSSVPMPAGGKGSHPSSTPQRVPNRLIHEKSPYLLQHAYNPVDWYPWGQEAFDKARKENKPIFLSVGYSTCHWCHMMEEESFQNEEIGRLLSEDFVSVKVDREERPDVDKVYMTFVQATSSGGGWPMNVWLTPNLQPFVGGTYFPPEDGLTRVGFRTVLLRIREQWKQNKNTLLENSQRVTTALLARSEISVGDRQLPPSAATVNNRCFQQLDEGYDEEYGGFAEAPKFPTPVILSFLFSYWLSHRLTQDGSRAQQMALHTLKMMANGGIRDHVGQGFHRYSTDRQWHVPHFEKMLYDQAQLAVAYSQAFQLSGDEFYSDVAKGILQYVARSLSHRSGGFYSAEDADSPPERGQRPKEGAYYVWTVKEVQQLLPEPVLGATEPLTSGQLLMKHYGLTEAGNISPSQDPKGELQGQNVLTVRYSLELTAARFGLDVEAVRTLLNSGLEKLFQARKHRPKPHLDSKMLAAWNGGAAHLRPSLSVGSPFTKPLSFRQRLNAHSPLISVIILS

SEQ ID NO: 37442 - protein, 40 aa, Homo sapiens
MVWTQLPLREAAADWIQMSKANEEAMCQRWQGAGHGGLHQ

SEQ ID NO: 37443 - protein, 1330 aa, Homo sapiens
VPPLCRRRPGPPARPLATMELEDGVVYQEEPGGSGAVMSERVSGLAGSIYREFERLIGRYDEEVVKELMPLVVAVLENLDSVFAQDQEHQVELELLRDDNEQLITQYEREKALRKHAEEKFIEFEDSQEQEKKDLQTRVESLESQTRQLELKAKNYADQISRLEEREAELKKEYNALHQRHTEMIHNYMEHLERTKLHQLSGSDQLESTAHSRIRKERPISLGIFPLPAGDGLLTPDAQKGGETPGSEQWKFQELSQPRSHTSLKDELSDVSQGGSKATTPASTANSDVATIPTDTPLKEENEGFVKVTDAPNKSEISKHIEVQVAQETRNVSTGSAENEEKSEVQAIIESTPELDMDKDLSGYKGSSTPTKGIENKAFDRNTESLFEELSSAGSGLIGDVDEGADLLGMGREVENLILENTQLLETKNALNIVKNDLIAKVDELTCEKDVLQGELEAVKQAKLKLEEKNRELEEELRKARAEAEDARQKAKDDDDSDIPTAQRKRFTRVEMARVLMERNQYKERLMELQEAVRWTEMIRASRENPAMQEKKRSSIWQLLSSFSFSRLFSSSSNTTKKPEPPVNLKYNAPTSHVTPSVKKRSSTLSQLPGDKSKAFDFLSEETEASLASRREQKREQYRQVKAHVQKEDGRVQAFGWSLPQKYKQVTNGQGENKMKNLPVPVYLRPLDEKDTSMKLWCAVGVNLSGGKTRDGGSVVGASVFYKDVAGLDTEGSKQRSASQSSLDKLDQELKEQQKELKNQEELSSLVWICTSTHSATKVLIIDAVQPGNILDSFTVCNSHVLCIASVPGARETDYPAGEDLSESGQVDKASLCGSMTSNSSAETDSLLGGITVVGCSAEGVTGAATSPSTNGASPVMDKPPEMEAENSEVDENVPTAEEATEATEGNAGSAEDTVDISQTGVYTEHVFTDPLGVQIPEDLSPVYQSSNDSDAYKDQISVLPNEQDLVREEAQKMSSLLPTMWLGAQNGCLYVHSSVAQWRKCLHSIKLKDSILSIVHVKGIVLVALADGTLAIFHRGVDGQWDLSNYHLLDLGRPHHSIRCMTVVHDKVWCGYRNKIYVVQPKAMKIEKSFDAHPRKESQVRQLAWVGDGVWVSIRLDSTLRLYHAHTYQHLQDVDIEPYVSKMLGTGKLGFSFVRITALMVSCNRLWVGTGNGVIISIPLTETNKTSGVPGNRPGSVIRVYGDENSDKVTPGTFIPYCSMAHAQLCFHGHRDAVKFFVAVPGQVISPQSSSSGTDLTGDKAGPSAQEPGSQTPLKSMLVISGGEGYIDFRMGDEGGESELLGEDLPLEPSVTKAERSHLIVWQVMYGNE

SEQ ID NO: 37444 - protein, 1339 aa, Homo sapiens
VPPLCRRRPGPPARPLATMELEDGVVYQEEPGGSGAVMSERVSGLAGSIYREFERLIGRYDEEVVKELMPLVVAVLENLDSVFAQDQEHQVELELLRDDNEQLITQYEREKALRKHAEEKFIEFEDSQEQEKKDLQTRVESLESQTRQLELKAKNYADQISRLEEREAELKKEYNALHQRHTEMIHNYMEHLERTKLHQLSGSDQLESTAHSRIRKERPISLGIFPLPAGDGLLTPDAQKGGETPGSEQWKFQELSQPRSHTSLKVSNSPEPQKAVEQEDELSDVSQGGSKATTPASTANSDVATIPTDTPLKEENEGFVKVTDAPNKSEISKHIEVQVAQETRNVSTGSAENEEKSEVQAIIESTPELDMDKDLSGYKGSSTPTKGIENKAFDRNTESLFEELSSAGSGLIGDVDEGADLLGMGREVENLILENTQLLETKNALNIVKNDLIAKVDELTCEKDVLQGELEAVKQAKLKLEEKNRELEEELRKARAEAEDARQKAKDDDDSDIPTAQRKRFTRVEMARVLMERNQYKERLMELQEAVRWTEMIRASRENPAMQEKKRSSIWQFFSRLFSSSSNTTKKPEPPVNLKYNAPTSHVTPSVKKRSSTLSQLPGDKSKAFDFLSEETEASLASRREQKREQYRQVKAHVQKEDGRVQAFGWSLPQKYKQVTNGQGENKMKNLPVPVYLRPLDEKDTSMKLWCAVGVNLSGGKTRDGGSVVGASVFYKDVAGLDTEGSKQRSASQSSLDKLDQELKEQQKELKNQEELSSLVWICTSTHSATKVLIIDAVQPGNILDSFTVCNSHVLCIASVPGARETDYPAGEDLSESGQVDKASLCGSMTSNSSAETDSLLGGITVVGCSAEGVTGAATSPSTNGASPVMDKPPEMEAENSEVDENVPTAEEATEATEGNAGSAEDTVDISQTGVYTEHVFTDPLGVQIPEDLSPVYQSSNDSDAYKDQISVLPNEQDLVREEAQKMSSLLPTMWLGAQNGCLYVHSSVAQWRKCLHSIKLKDSILSIVHVKGIVLVALADGTLAIFHRGVDGQWDLSNYHLLDLGRPHHSIRCMTVVHDKVWCGYRNKIYVVQPKAMKIEKSFDAHPRKESQVRQLAWVGDGVWVSIRLDSTLRLYHAHTYQHLQDVDIEPYVSKMLGTGKLGFSFVRITALMVSCNRLWVGTGNGVIISIPLTETNKTSGVPGNRPGSVIRVYGDENSDKVTPGTFIPYCSMAHAQLCFHGHRDAVKFFVAVPGQVISPQSSSSGTDLTGDKAGPSAQEPGSQTPLKSMLVISGGEGYIDFRMGDEGGESELLGEDLPLEPSVTKAERSHLIVWQVMYGNE

SEQ ID NO: 37445 - protein, 1329 aa, Homo sapiens
VPPLCRRRPGPPARPLATMELEDGVVYQEEPGGSGAVMSERVSGLAGSIYREFERLIGRYDEEVVKELMPLVVAVLENLDSVFAQDQEHQVELELLRDDNEQLITQYEREKALRKHAEEKFIEFEDSQEQEKKDLQTRVESLESQTRQLELKAKNYADQISRLEEREAELKKEYNALHQRHTEMIHNYMEHLERTKLHQLSGSDQLESTAHSRIRKERPISLGIFPLPAGDGLLTPDAQKGGETPGSEQWKFQELSQPRSHTSLKDELSDVSQGGSKATTPASTANSDVATIPTDTPLKEENEGFVKVTDAPNKSEISKHIEVQVAQETRNVSTGSAENEEKSEVQAIIESTPELDMDKDLSGYKGSSTPTKGIENKAFDRNTESLFEELSSAGSGLIGDVDEGADLLGMGREVENLILENTQLLETKNALNIVKNDLIAKVDELTCEKDVLQGELEAVKQAKLKLEEKNRELEEELRKARAEAEDARQKAKDDDDSDIPTAQRKRFTRVEMARVLMERNQYKERLMELQEAVRWTEMIRASRENPAMQEKKRSSIWQFVPTRFSRLFSSSSNTTKKPEPPVNLKYNAPTSHVTPSVKKRSSTLSQLPGDKSKAFDFLSEETEASLASRREQKREQYRQVKAHVQKEDGRVQAFGWSLPQKYKQVTNGQGENKMKNLPVPVYLRPLDEKDTSMKLWCAVGVNLSGGKTRDGGSVVGASVFYKDVAGLDTEGSKQRSASQSSLDKLDQELKEQQKELKNQEELSSLVWICTSTHSATKVLIIDAVQPGNILDSFTVCNSHVLCIASVPGARETDYPAGEDLSESGQVDKASLCGSMTSNSSAETDSLLGGITVVGCSAEGVTGAATSPSTNGASPVMDKPPEMEAENSEVDENVPTAEEATEATEGNAGSAEDTVDISQTGVYTEHVFTDPLGVQIPEDLSPVYQSSNDSDAYKDQISVLPNEQDLVREEAQKMSSLLPTMWLGAQNGCLYVHSSVAQWRKCLHSIKLKDSILSIVHVKGIVLVALADGTLAIFHRGVDGQWDLSNYHLLDLGRPHHSIRCMTVVHDKVWCGYRNKIYVVQPKAMKIEKSFDAHPRKESQVRQLAWVGDGVWVSIRLDSTLRLYHAHTYQHLQDVDIEPYVSKMLGTGKLGFSFVRITALMVSCNRLWVGTGNGVIISIPLTETNKTSGVPGNRPGSVIRVYGDENSDKVTPGTFIPYCSMAHAQLCFHGHRDAVKFFVAVPGQVISPQSSSSGTDLTGDKAGPSAQEPGSQTPLKSMLVISGGEGYIDFRMGDEGGESELLGEDLPLEPSVTKAERSHLIVWQVMYGNE

SEQ ID NO: 37446 - protein, 1325 aa, Homo sapiens
VPPLCRRRPGPPARPLATMELEDGVVYQEEPGGSGAVMSERVSGLAGSIYREFERLIGRYDEEVVKELMPLVVAVLENLDSVFAQDQEHQVELELLRDDNEQLITQYEREKALRKHAEEKFIEFEDSQEQEKKDLQTRVESLESQTRQLELKAKNYADQISRLEEREAELKKEYNALHQRHTEMIHNYMEHLERTKLHQLSGSDQLESTAHSRIRKERPISLGIFPLPAGDGLLTPDAQKGGETPGSEQWKFQELSQPRSHTSLKDELSDVSQGGSKATTPASTANSDVATIPTDTPLKEENEGFVKVTDAPNKSEISKHIEVQVAQETRNVSTGSAENEEKSEVQAIIESTPELDMDKDLSGYKGSSTPTKGIENKAFDRNTESLFEELSSAGSGLIGDVDEGADLLGMGREVENLILENTQLLETKNALNIVKNDLIAKVDELTCEKDVLQGELEAVKQAKLKLEEKNRELEEELRKARAEAEDARQKAKDDDDSDIPTAQRKRFTRVEMARVLMERNQYKERLMELQEAVRWTEMIRASRENPAMQEKKRSSIWQFFSRLFSSSSNTTKKPEPPVNLKYNAPTSHVTPSVKKRSSTLSQLPGDKSKAFDFLSEETEASLASRREQKREQYRQVKAHVQKEDGRVQAFGWSLPQKYKQVTNGQGENKMKNLPVPVYLRPLDEKDTSMKLWCAVGVNLSGGKTRDGGSVVGASVFYKDVAGLDTEGSKQRSASQSSLDKLDQELKEQQKELKNQEELSSLVWICTSTHSATKVLIIDAVQPGNILDSFTVCNSHVLCIASVPGARETDYPAGEDLSESGQVDKASLCGSMTSNSSAETDSLLGGITVVGCSAEGVTGAATSPSTNGASPVMDKPPEMEAENSEVDENVPTAEEATEATEGNAGSAEDTVDISQTGVYTEHVFTDPLGVQIPEDLSPVYQSSNDSDAYKDQISVLPNEQDLVREEAQKMSSLLPTMWLGAQNGCLYVHSSVAQWRKCLHSIKLKDSILSIVHVKGIVLVALADGTLAIFHRGVDGQWDLSNYHLLDLGRPHHSIRCMTVVHDKVWCGYRNKIYVVQPKAMKIEKSFDAHPRKESQVRQLAWVGDGVWVSIRLDSTLRLYHAHTYQHLQDVDIEPYVSKMLGTGKLGFSFVRITALMVSCNRLWVGTGNGVIISIPLTETNKTSGVPGNRPGSVIRVYGDENSDKVTPGTFIPYCSMAHAQLCFHGHRDAVKFFVAVPGQVISPQSSSSGTDLTGDKAGPSAQEPGSQTPLKSMLVISGGEGYIDFRMGDEGGESELLGEDLPLEPSVTKAERSHLIVWQVMYGNE

SEQ ID NO: 37447 - protein, 221 aa, Homo sapiens
LGVDTVLRPRRAGRVGRSCGLGGWALRGVATPRSALRPSSAAGSRVWWSHQLSALPAQRRRPAPPASRTMANLERTFIAIKPDGVQRGLVGEIIKRFEQKGFRLVAMKFLRASEEHLKQHYIDLKDRPFFPGLVKYMNSGPVVAMVWEGLNVVKTGRVMLGETNPADSKPGTIRGDFCIQVGRNIIHGSDSVKSAEKEISLWFKPEELVDYKSCAHDWVYE

SEQ ID NO: 37448 - protein, 106 aa, Homo sapiens
VWWSHQLSALPAQRRRPAPPASRTMANLERTFIAIKPDGVQRGLVGEIIKRFEQKGFRLVAMKFLRASEEHLKQHYIDLKDRPFFPGLVKYMNSGPVVAMEHHSWQ

SEQ ID NO: 37449 - protein, 42 aa, Homo sapiens
LWPWNIIHGSDSVKSAEKEISLWFKPEELVDYKSCAHDWVYE

SEQ ID NO: 37450 - protein, 102 aa, Homo sapiens
LVRLIPAPRGTGIVSAPVPKKLLMIAGIDDCYTSARGCTATLGNFAKATFDAISKTYSYLTPDLWKETVFTKSPCQEFTDHLVKTHTRVFVQQTQAPAVATT

SEQ ID NO: 37451 - protein, 523 aa, Homo sapiens
MTTTLKGRAHTSPPGSLGQRAAKEAQRRMTRCPASGRIKAWVSNSQAGDSGLPAPPARGEKPTWDPSGRPRHSRRLHTPATTRLYHLQPAAQPPRGSRRARCRCAGRPEAPPSRPCPAPSSSRSVPAPRSGSAERTASARAREALGRRGGAKGTERVESGAGERWRRISWARPSGATMAFGKSHRDPYATSVGHLIEKATFAGVQTEDWGQFMHICDIINTTQDGPKDAVKALKKRISKNYNHKEIQLTLSLIDMCVQNCGPSFQSLIVKKEFVKENLVKLLNPRYNLPLDIQNRILNFIKTWSQGFPGGVDVSEVKEVYLDLVKKGVQFPPSEAEAETARQETAQISSNPPTSVPTAPALSSVIAPKNSTVTLVPEQIGKLHSELDMVKMNVRVMSAILMENTPGSENHEDIELLQKLYKTGREMQERIMDLLVVVENEDVTVELIQVNEDLNNAILGYERFTRNQQRILEQNKNQKEATNTTSEPSAPSQDLLDLSPSPRMPRATLGELNTMNNQLSGLSK

SEQ ID NO: 37452 - protein, 570 aa, Homo sapiens
LYHLQPAAQPPRGSRRARCRCAGRPEAPPSRPCPAPSSSRSVPAPRSGSAERTASARAREALGRRGGAKGTERVESGAGERWRRISWARPSGATMAFGKSHRDPYATSVGHLIEKATFAGVQTEDWGQFMHICDIINTTQDGPKDAVKALKKRISKNYNHKEIQLTLSLIDMCVQNCGPSFQSLIVKKEFVKENLVKLLNPRYNLPLDIQNRILNFIKTWSQGFPGGVDVSEVKEVYLDLVKKGVQFPPSEAEAETARQETAQISSNPPTSVPTAPALSSVIAPKNSTVTLVPEQIGKLHSELDMVKMNVRVMSAILMENTPGSENHEDIELLQKLYKTGREMQERIMDLLVVVENEDVTVELIQVNEDLNNAILGYERFTRNQQRILEQNKNQKEATNTTSEPSAPSQDLLDLSPSPRMPRATLGELNTMNNQLSGLNFSLPSSDVTNNLKPSLHPQMNLLALENTEIPPFAQRTSQNLTSSHAYDNFLEHSNSVFLQPVSLQTIAAAPSNQSLPPLPSNHPAMTKSDLQPPNYYEVMEFDPLAPAVTTEAIYEEIDAHQHKGAQNDGD

SEQ ID NO: 37453 - protein, 59 aa, Homo sapiens
VESGAGERWRRISWARPSGATMAFGKSHRDPYATSVGHLIAQTQQLFLGRKGYICWSSD

SEQ ID NO: 37454 - protein, 486 aa, Homo sapiens
VESGAGERWRRISWARPSGATMAFGKSHRDPYATSVGHLIEKATFAGVQTEDWGQFMHICDIINTTQDGPKDAVKALKKRISKNYNHKEIQLTLSLIDMCVQNCGPSFQSLIVKKEFVKENLVKLLNPRYNLPLDIQNRILNFIKTWSQGFPGGVDVSEVKEVYLDLVKKGVQFPPSEAEAETARQETAQISSNPPTSVPTAPALSSVIAPKNSTVTLVPEQIGKLHSELDMVKMNVRVMSAILMENTPGSENHEDIELLQKLYKTGREMQERIMDLLVVVENEDVTVELIQVNEDLNNAILGYERFTRNQQRILEQNKNQKEATNTTSEPSAPSQDLLDLSPSPRMPRATLGELNTMNNQLSGLNFSLPSSDVTNNLKPSLHPQMNLLALENTEIPPFAQRTSQNLTSSHAYDNPVSLQTIAAAPSNQSLPPLPSNHPAMTKSDLQPPNYYEVMEFDPLAPAVTTEAIYEEIDAHQHKGAQNDGD

SEQ ID NO: 37455 - protein, 43 aa, Homo sapiens
LELLFYLIFIIAEMCHHGFDMLVGIVFQASKLHRVYVLESWHL

SEQ ID NO: 37456 - protein, 35 aa, Homo sapiens
MLVTMSLITINILTPLTDPENEPFDEDQHTQITKV

SEQ ID NO: 37457 - protein, 125 aa, Homo sapiens
LKEEIEQSLTKRDEFEFLEKASKLRGISTKPVYIPEVELNHKLIKGIHQSTIDLKNELKQCIGRLQEPTPSSGDPGEHDPASTHKSTRPVKKVSKEEKKSKKPRKLCISATVRFLRLPEHRTKCW

SEQ ID NO: 37458 - protein, 31 aa, Homo sapiens
MELALRRSPVPRWLLLLPLLLGLNAGRSRRF

SEQ ID NO: 37459 - protein, 122 aa, Homo sapiens
MELALRRSPVPRWLLLLPLLLGLNAGAVIDWPTEEGKEVWDYVTVRKDAYMFWWLYYATNSCKNFSELPLVMWLQGGPGGSSTGFGNFEEIGPLDSDLKPRKTTWCTEKPGQCGNLMHFQEN

SEQ ID NO: 37460 - protein, 210 aa, Homo sapiens
MELALRRSPVPRWLLLLPLLLGLNAGAVIDWPTEEGKEVWDYVTVRKDAYMFWWLYYATNSCKNFSELPLVMWLQGGPGGSSTGFGNFEEIGPLDSDLKPRKTTWLQAASLLFVDNPVGTGFSYVNGSGAYAKDLAMVASDMMVLLKTFFSCHKEFQTVPFYIFSESYGGKMAAGIGLELYKAIQRGTIKCNFAGVALGDSWISPVERRQ

SEQ ID NO: 37461 - protein, 227 aa, Homo sapiens
MELALRRSPVPRWLLLLPLLLGLNAGAVIDWPTEEGKEVWDYVTVRKDAYMFWWLYYATNSCKNFSELPLVMWLQGGPGGSSTGFGNFEEIGPLDSDLKPRKTTWLQAASLLFVDNPVGTGFSYVNGSGAYAKDLAMVASDMMVLLKTFFSCHKEFQTVPFYIFSESYGGKMAAGIGLELYKAIQRGTIKCNFAGVALGDSWISPVDSVLSWGPYLYSMQYQIDVPK

SEQ ID NO: 37462 - protein, 82 aa, Homo sapiens
LDMGARRPSGEPGSLGRHEASARLWEVGSGIRSLAGPWWPPWPQDHKGVAKASRRSHLVPPTLPGLATPSLGRAGTRSRRRA

SEQ ID NO: 37463 - protein, 76 aa, Homo sapiens
LPPATRRKLFELARAFSEKTKMRKSKRKHLLKHQSLGAAASTANLLDDVEGHACDEDFRGRRQEAPKVEEGLREGQ

SEQ ID NO: 37464 - protein, 266 aa, Homo sapiens
VMRVLLHLPALLASLILLQAAASTTRAQTTRTSAISDTVSQAKVQVNKAFLDSRTRLKTAMSSETPTSRQLSEYLKHAKGRTRTAIRNGQVWEESLKRLRQKASLTNVTDPSLDLTSLSLEVGCGAPAPVVRCDPCSPYRTITGDCNNRRKPALGAANRALARWLPAEYEDGLSLPFGWTPGKTRNGFPLPLAREVSNKIVGYLNEEGVLDQNRSLLFMQWGQIVDHDLDFAPDTELGSSEYSKAQCDEYCIQGDNCFPIMVRPCS

SEQ ID NO: 37465 - protein, 183 aa, Homo sapiens
VMRVLLHLPALLASLILLQAAASTTRDPSLDLTSLSLEVGCGAPAPVVRCDPCSPYRTITGDCNNRRKPALGAANRALARWLPAEYEDGLSLPFGWTPGKTRNGFPLPLAREVSNKIVGYLNEEGVLDQNRSLLFMQWGQIVDHDLDFAPDTELGSSEYSKAQCDEYCIQGDNCFPIMVRPCS

SEQ ID NO: 37466 - protein, 117 aa, Homo sapiens
MKLLLALAGLLAILATPQPSEGAAPAVLGEVDTSLVLSSMEEAKQLVDKAYKERRERWGTRHCPALGKDVPGLSEKQQAAGSLKHQAAASQRLSQPHGTPILLQAAGGSHQDGGEGR

SEQ ID NO: 37467 - protein, 93 aa, Homo sapiens
LQPQVRIRTFTAAPTGAPQLGASRGLGCWSGWRRVGGVEELGCKPHAGSSGQSALKPSLVKEGKMAPGPQAGKEVSKEEGWRVRRGWQRVRRG

SEQ ID NO: 37468 - protein, 149 aa, Homo sapiens
VRPLLDFSAPARFLKQEKKQFCESTQGQASFPTTHSAADPHPPLTPSVFRLQRKFTERLRAEDSKACKTAPALSCKTCPRSYEPHSALFPRPWSPMGPTTRSPTDTLTSEHSKQARRCRRSFGTVSRAIFADGKNNREIDDHSLCTRRK

SEQ ID NO: 37469 - protein, 37 aa, Homo sapiens
LREQHIILSFYLLWTTGGVGGIWVGGLTDGIEERVGC

SEQ ID NO: 37470 - protein, 33 aa, Homo sapiens
LLSTSCLCLFLVLELNEQNFKYFLPSNSDSADC

SEQ ID NO: 37471 - protein, 119 aa, Homo sapiens
LRKLLFLLVLFMLISPFPLFFFHSQTIDQFEYDGCDNCDAYLQMKGNREMVYDCTSSSFDGIIAMMSPEDSWVSKWQRVSNFKPGVYAVSVTGRLPQGIVRELKSRGVAYKSRDTAIKT

SEQ ID NO: 37472 - protein, 136 aa, Homo sapiens
LRVHRLWSSISLLFFPSAKMALETVPKDLRHLRACLLCSLVKTIDQFEYDGCDNCDAYLQMKGNREMVYDCTSSSFDGIIAMMSPEDSWVSKWQRVSNFKPGVYAVSVTGRLPQGIVRELKSRGVAYKSRDTAIKT

SEQ ID NO: 37473 - protein, 65 aa, Homo sapiens
LLMYLLLCFFSLSRLDHFICCLEKKRTFVSKEVSEMILDFLLRNFSAPTCSMGHLVWLQSKKVEE

SEQ ID NO: 37474 - protein, 41 aa, Homo sapiens
LLMYLLLCFFSLSRLDHFICCLEKKRTFVSKEVSEMILDFL

SEQ ID NO: 37475 - protein, 90 aa, Homo sapiens
LPGRCHFSTFKQCQEWLSRLSRATARPAKPEDLFAFAYHAWCLGLTEEDQHTHLCQPGEHIRCRQEAELARMGFDLQNVWRVSHINSNYK

SEQ ID NO: 37476 - protein, 263 aa, Homo sapiens
LLPVLHLTLRPWVWSKPEAPGTTGCCQGNRPRAPGAGLPLAGGHRFLFPRLRPLDVEFMKALHQRVNIVPILAKADTLTPPEVDHKKRKIREEIEHFGIKIYQFPDCDSDEDEDFKLQDQALKESIPFAVIGSNTVVEARGRRVRGRLYPWGIVEVENPGHCDFVKLRTMLVRTHMQDLKDVTRETHYENYRAQCIQSMTRLVVKERNRKYDQKPGQSWQGEIPSLALGETKPYFCSSIGPGLNLSGCWGPPRLINPFLPLAN

SEQ ID NO: 37477 - protein, 238 aa, Homo sapiens
LSWLQFLFLLTTSAFPFPLAFSCLLSPSSFFPSGSLPGTTHLFYPPRFPQIKRFLEDTTDDGELSKFVKDFSGNASCHPPEAKTWASRPQVPEPRPQAPDLYDDDLEFRPPSRPQSSDNQQYFCAPAPLSPSARPRSPWGKLDPYDSSEVEPPALPLPFSGLLQEDRGQGAECVCVCVCVCVCVCLCVCVSGTYFSPVSALAPRYLPPRALEICSFSKGRRPSWWPQMGTHRSLALLF

SEQ ID NO: 37478 - protein, 99 aa, Homo sapiens
MIARLDTQLKNKLITLMGQKTSLTQETELLESLLQEVEHQLRSCSKSELISKSSEILMMFQQVHRKPMASFVTTPVPPDFTSELVPSYDSATFVLENFR

SEQ ID NO: 37479 - protein, 79 aa, Homo sapiens
VQSEGDLLGSLFFPHGLGGGAQFGVAGNSGRRRLDQSRVPSSCTKGSRHRLVSKPPRLSPLTKEEKTAAEQFKFHMPDL

SEQ ID NO: 37480 - protein, 108 aa, Homo sapiens
VQSEGDLLGSLFFPHGLGGGAQFGVAGNSGRRRLDQSRVPSSCTKGSRHRLVSKPPRFQKAESDLDYIQYRLEYEIKTNHPDSASELSPLTKEEKTAAEQFKFHMPDL

SEQ ID NO: 37481 - protein, 167 aa, Homo sapiens
VQSEGDLLGSLFFPHGLGGGAQFGVAGNSGRRRLDQSRVPSSCTKGSRHRLVSKPPRFQKAESDLDYIQYRLEYEIKTNHPDSASEKNPVTLLKELSVIKSRYQTLYARFKPVAVEQKESKSRICATVKKTMNMIQKLQKQTDLELSPLTKEEKTAAEQFKFHMPDL

SEQ ID NO: 37482 - protein, 263 aa, Homo sapiens
LCCQLFWILCFVFSHSIMSTKCPSVSPVSGEMKKRKAITLEMKLKIIAQHEGGKPVMAIARELGLWQSTISTILRDKKQISDAAKSSASVKSTVITKKRAGPIDDMEKLLVMWMEDQIQKRIPLSLLMIQAKARSLFNMLKDRASDPTYTQMFKASHGWFQRFKRRHNFHNVKITGEAARAGNEGAIAFKEQLHRIIMAKDLCNKELIALEEERGKGVEAVEEVTPTAPRKFTAKKLAEAFAAISSGLHVRRNGRQLREIRHS

SEQ ID NO: 37483 - protein, 48 aa, Homo sapiens
MALMIFMFWVGDMYPVYQPVGPKQYPYNNLYLERGGDPSKEPESVVHY

SEQ ID NO: 37484 - protein, 936 aa, Homo sapiens
LDTQGNSSSPGSSGVLQWLQMSKYLPELLGNTGLLMKLSDLAQSDPEVRRAAVHCMANLCLSVPGQPYLEEPYQNVCFQAFLTILQSPKSSDMDDITFCMLLQNALKGIQSLLNGGRMKLTQTDELGALLAVLKKFMFHGLPGLNIEMPTVLYPTPLPQYDGRTPIKPQQSESSASRPTLNKKKKSKVKPKKIQQGEEEEKESSGEIEAAPVTGTGRVNLHEGNTWCPSSLGVQSLPLDGSGAAEKDGVSSSFSSSSWKRVSSSESDFSDAEGGMQSKMRSYQAKVRQGALVCFLSTIKSIEKKVLYGYWSAFIPDTPELGSPQSVSLMTLTLKDPSPKTRACALQVLSAILEGSKQFLSVAEDTSDHRRAFTPFSVMIACSIRELHRCLLLALVAESSSQTVTQIIKCLANLVSNAPYDRLKLSLLTKVWNQIKPYIRHKDVNVRVSSLTLLGAIVSTHAPLPEVQLLLQQPCSSGLGNSNSATPHLSPPDWWKKAPAGPSLEETSVSSPKGSSEPCWLIRLCISIVVLPKEDSCSGSDAGSAAGSTYEPSPMRLEAFSNLPNDRQMLCITVLLGLNDSKNRLVKAATSRALGVYVLFPCLRQDVIFVADAANAILMSLEDKSLNVRAKAAWSLGNLTDTLIVNMETPDPSFQEEFSGLLLLKMLRSAIEASKDKDKVKSNAVRALGNLLHFLQPSHIEKPTFAEIIEESIQALISTVLTEAAMKVRWNACYAMGNVFKNPALPLGTAPWTSQAYNALTSVVTSCKNFKVRIRSAAALSVPGKREQYGSVDQYARIWNALVTALQKSEDTIDFLEFKYCVSLRTQICQALIHLLSLASASDLPCMKETLELSGNMVQSYILQFLKSGAEGDDTGAPHSPQERDQMVRMALKHMGSIQAPTGDTARRAIMGFLEEILAVCFDSSGSQGALPGLTNQ

SEQ ID NO: 37485 - protein, 63 aa, Homo sapiens
MKLDEMKQSFISRKLHSSYRQRPSHLPRYPATESDQGSGRLRPPLYHQQPSNSNMKLAAFLLL

SEQ ID NO: 37486 - protein, 207 aa, Homo sapiens [sequence omitted]

SEQ ID NO: 37487 - protein, 729 aa, Homo sapiens
LISDCCAGNQRDSVGVGPSEPGCYPCPGPNMNPIALGSRWLAYAENKLIRCHQSRGGACGDNIQSYTATVISAAKTLKSGLTMVGKVVTQLTGTLPSGVTEDDVAIHSNSRRSPLVPGIITVIDTETVGEGQVLVSEDSDSDGIVAHFPAHEKPVCCMAFNTSGMLLVTTDTLGHDFHVFQILTHPWSSSQCAVHHLYTLHRGETEAKVQDICFSHDCRWVVVSTLRGTSHVFPINPYGGQPCVRTHMSPRVVNRMSRFQKSAGLEEIEQELTSKQGGRCSPVPGLSSSPSGSPLHGKLNSQDSYNNFTNNNPGNPRLSPLPSLMVVMPLAQIKQPMTLGTITKRTGPYLFGAGCFSIKAPCKVKPPPQISPSKSMGGEFCVAAIFGTSRSWFANNAGLKREKDQSKQVVVESLYIISCYGTLVEHMMEPRPLSTAPKISDDTPLEMMTSPRASWTLVRTPQWNELQPPFNANHPLLLAADAVQYYQFLLAGLVPPGSPGPITRHGSYDSLASDHSGQEDEEWLSQVEIVTHTGPHRRLWMGPQFQFKTIHPSGQTTVISSSSSVLQSHGPSDTPQPLLDFDTDDLDLNSLRIQPVRSDPVSMPGSSRPVSDRRGVSTVIDAASGTFDRSVTLLEVCGSWPEGFGLRHMSSMEHTEEGLRERLADAMAESPSRDVVGSGTELQREGSIETLSNSSGSTSGSIPRNFDGYRSPLPTNESQPLSLFPTGFP

SEQ ID NO: 37488 - protein, 817 aa, Homo sapiens
VPPLPRPPSRGARRRRRLPGRGVAALRRGPGSAPGLPRGRAERSAAGSGRGPSREERGAAAAAAAAEMMEELHSLDPRRQELLEARFTGVGVSKGPLNSESSNQSLCSVGSLSDKEVETPEKKQNDQRNRKRKAEPYETSQGKGTPRGHKISDYFEFAGGSAPGTSPGRSVPPVARSSPQHSLSNPLPRRVEQPLYGLDGSAAKEATEEQSALPTLMSVMLAKPRLDTEQLAQRGAGLCFTFVSAQQNSPSSTGSGNTEHSCSSQKQISIQHRQTQSDLTIEKISALENSKNSDLEKKEGRIDDLLRANCDLRRQIDEQQKMLEKYKERLNRCVTMSKKLLIEKSKQEKMACRDKSMQDRLRLGHFTTVRHGASFTEQWTDGYAFQNLIKQQERINSQREEIERQRKMLAKRKPPAMGQAPPATNEQKQRKSKTNGAENETLTLAEYHEQEEIFKLRLGHLKKEEAEIQAELERLERVRNLHIRELKRIHNEDNSQFKDHPTLNDRYLLLHLLGRGGFSEVYKAFDLTEQRYVAVKIHQLNKNWRDEKKENYHKHACREYRIHKELDHPRIVKLYDYFSLDTDSFCTVLEYCEGNDLDFYLKQHKLMSEKEARSIIMQIVNALKYLNEIKPPIIHYDLKPGNILLVNGTACGEIKITDFGLSKIMDDDSYNSVDGMELTSQGAGTYWYLPPECFVVGKEPPKISNKVDVWSVGVIFYQCLYGRKPFGHNQSQQDILQENTILKATEVQFPPKPVVTPEAKAFIRRCLAYRKEDRIDVQQLACDPYLLPHIRKSVSTSSPAGAAIASTSGASNNSSSN

SEQ ID NO: 37489 - protein, 838 aa, Homo sapiens
VPPLPRPPSRGARRRRRLPGRGVAALRRGPGSAPGLPRGRAERSAAGSGRGPSREERGAAAAAAAEMMEELHSLDPRRQELLEARFTGVGVSKGPLNSESSNQSLCSVGSLSDKEVETPEKKQNDQRNRKRKAEPYETSQGKGTPRGHKISDYFEFAGGSAPGTSPGRSVPPVARSSPQHSLSNPLPRRVEQPLYGLDGSAAKEATEEQSALPTLMSVMLAKPRLDTEQLAQRGAGLCFTFVSAQQNSPSSTGSGNTEHSCSSQKQISIQHRQTQSDLTIEKISALENSKNSDLEKKEGRIDDLLRANCDLRRQIDEQQKMLEKYKERLNRCVTMSKKLLIEKSKQEKMACRDKSMQDRLRLGHFTTVRHGASFTEQWTDGYAFQNLIKQQERINSQREEIERQRKMLAKRKPPAMGQAPPATNEQKQRKSKTNGAENETPSSGNTELKDTAPALGAHSLLRLTLAEYHEQEEIFKLRLGHLKKEEAEIQAELERLERVRNLHIRELKRIHNEDNSQFKDHPTLNDRYLLLHLLGRGGFSEVYKAFDLTEQRYVAVKIHQLNKNWRDEKKENYHKHACREYRIHKELDHPRIVKLYDYFSLDTDSFCTVLEYCEGNDLDFYLKQHKLMSEKEARSIIMQIVNALKYLNEIKPPIIHYDLKPGNILLVNGTACGEIKITDFGLSKIMDDDSYNSVDGMELTSQGAGTYWYLPPECFVVGKEPPKISNKVDVWSVGVIFYQCLYGRKPFGHNQSQQDILQENTILKATEVQFPPKPVVTPEAKAFIRRCLAYRKEDRIDVQQLACDPYLLPHIRKSVSTSSPAGAAIASTSGASNNSSSN

SEQ ID NO: 37490 - protein, 616 aa, Homo sapiens
MGPGRPAPAPWPRHLLRCVLLLGCLHLGRPGAPGDAALPEPNVFLIFSHGLQGCLEAQGGQVRVTPACNTSLPAQRWKWVSRNRLFNLGTMQCLGTGWPGTNTTASLGMYECDREALNLRWHCRTLGDQLSLLLGARTSNISKPGTLERGDQTRSGQWRIYGSEEDLCALPYHEVYTIQGNSHGKPCTIPFKYDNQWFHGCTSTGREDGHLWCATTQDYGKDERWGFCPIKSNDCETFWDKDQLTDSCYQFNFQSTLSWREAWASCEQQGADLLSITEIHEQTYINGLLTGYSSTLWIGLNDLDTSGGWQWSDNSPLKYLNWESDQPDNPSEENCGVIRTESSGGWQNRDCSIALPYVCKKKPNATAEPTPPDRWANVKVECEPSWQPFQGHCYRLQAEKRSWQESKKACLRGGGDLVSIHSMAELEFITKQIKQEVEELWIGLNDLKLQMNFEWSDGSLVSFTHWHPFEPNNFRDSLEDCVTIWGPEGRWNDSPCNQSLPSICKKAGQLSQGAAEEDHGCRKGWTWHSPSCYWLGEDQVTYSEARRLCTDHGSQLVTITNRFEQAFVSSLIYNWEGEYFWTALQDLNSTGSFFWLSGDEVMYTHWNRDQPGEPLI

SEQ ID NO: 37491 - protein, 228 aa, Homo sapiens
LPSPPLSAEDWGDQRCLTALPYICKRSNVTKETQPPDLPTTALGGCPSDWIQFLNKCFQVQGQEPQSRVKWSEAQFSCEQQEAQLVTITNPLEQAFITASLPNVTFDLWIGLHASQRDFQWVEQEPLMYANWAPGEPSGPSPAPSGNKPTSCAVVLHSPSAHFTGRWDDRSCTEETHGFICQKGTGLSAVLLGLRGAAELRGLAGRGAAAAGGLYLRRCGRGLAHHQL

SEQ ID NO: 37492 - protein, 128 aa, Homo sapiens
MTVRKAEKVDPSEPSPGGSSKHPLFCVEYTPYCSVFAFSPVLQPNTNYCCLLLPLVPPASPVAQEPPDCPLPLVTVPSFTSTASTSPDPVPESPAVLCYFPISCPTPAETPVLCLQGPRRPSRIYLMW

SEQ ID NO: 37493 - protein, 24 aa, Homo sapiens
LLSLSLACSLSLFVLSPSEEGKVC

SEQ ID NO: 37494 - protein, 161 aa, Homo sapiens
MALASLRNLYTPNIKVSRLLILGGANINYRTEVLNNAPILCVQSHLGYTEMVALLLEFGANVDASSESGLTPLGYAAAAGYLSIVVLLCKKRAKVDHLDKNGQCALVHAALRGHLEVVKFLIQCDWTMAGQQQGVFKKSHAIQQALIAAASMGYTEVRSRQ

SEQ ID NO: 37495 - protein, 141 aa, Homo sapiens
MGAASGRRGPGLLLPLPLLLLLPPQPALALDPGLQPGNFSADEAGAQLFAQSYNSSAEQVLFQSVAASWAHDTNITAENARRQEEAALLSQEFAEAWGQKAKELYEPIWQNFTDPQLRRIIGAVRTLGSANLPLAKRQQVG

SEQ ID NO: 37496 - protein, 157 aa, Homo sapiens
MGAASGRRGPGLLLPLPLLLLLPPQPALALDPGLQPGNFSADEAGAQLFAQSYNSSAEQVLFQSVAASWAHDTNITAENARRQEEAALLSQEFAEAWGQKAKELYEPIWQNFTDPQLRRIIGAVRTLGSANLPLAKRQQAASTGRGLRSDPVTLSDT

SEQ ID NO: 37497 - protein, 475 aa, Homo sapiens
MGAASGRRGPGLLLPLPLLLLLPPQPALALDPGLQPGNFSADEAGAQLFAQSYNSSAEQVLFQSVAASWAHDTNITAENARRQEEAALLSQEFAEAWGQKAKELYEPIWQNFTDPQLRRIIGAVRTLGSANLPLAKRQQYNALLSNMSRIYSTAKVCLPNKTATCWSLDPDLTNILASSRSYAMLLFAWEGWHNAAGIPLKPLYEDFTALSNEAYKQDGFTDTGAYWRSWYNSPTFEDDLEHLYQQLEPLYLNLHAFVRRALHRRYGDRYINLRGPIPAHLLGDMWAQSWENIYDMVVPFPDKPNLDVTSTMLQQGWNATHMFRVAEEFFTSLELSPMPPEFWEGSMLEKPADGREVVCHASAWDFYNRKDFRIKQCTRVTMDQLSTVHHEMGHIQYYLQYKDLPVSLRRGANPGFHEAIGDVLALSVSTPEHLHKIGLLDRVTNDTEPSIRGSVLLLPETKPTLMLELSFMFQM

SEQ ID NO: 37498 - protein, 542 aa, Homo sapiens
LASSRSYAMLLFAWEGWHNAAGIPLKPLYEDFTALSNEAYKQDGFTDTGAYWRSWYNSPTFEDDLEHLYQQLEPLYLNLHAFVRRALHRRYGDRYINLRGPIPAHLLGDMWAQSWENIYDMVVPFPDKPNLDVTSTMLQQGWNATHMFRVAEEFFTSLELSPMPPEFWEGSMLEKPADGREVVCHASAWDFYNRKDFRIKQCTRVTMDQLSTVHHEMGHIQYYLQYKDLPVSLRRGANPGFHEAIGDVLALSVSTPEHLHKIGLLDRVTNDTESDINYLLKMALEKIAFLPFGYLVDQWRWGVFSGRTPPSRYNFDWWYLRTKYQGICPPVTRNETHFDAGAKFHVPNVTPYIRYFVSFVLQFQFHEALCKEAGYEGPLHQCDIYRSTKAGAKLRKVLQAGSSRPWQEVLKDMVGLDALDAQPLLKYFQPVTQWLQEQNQQNGEVLGWPEYQWHPPLPDNYPEGIDLVTDEAEASKFVEEYDRTSQVVWNEYAEANWNYNTNITTETSKILVGATSPPPNLSMCIHTEMLSRSPHSGAATTF

SEQ ID NO: 37499 - protein, 548 aa, Homo sapiens
LELKAFKPLPDLTNVMATSRKYEDLLWAWEGWRDKAGRAILQFYPKYVELINQAARLNGYVDAGDSWRSMYETPSLEQDLERLFQELQPLYLNLHAYVRRALHRHYGAQHINLEGPIPAHLLGNMWAQTWSNIYDLVVPFPSAPSMDTTEAMLKQGWTPRRMFKEADDFFTSLGLLPVPPEFWNKSMLEKPTDGREVVCHASAWDFYNGKDFRIKQCTTVNLEDLVVAHHEMGHIQYFMQYKDLPVALREGANPGFHEAIGDVLALSVSTPKHLHSLNLLSSEGGSDEHDINFLMKMALDKIAFIPFSYLVDQWRWRVFDGSITKENYNQEWWSLRLKYQGLCPPVPRTQGDFDPGAKFHIPSSVPYIRYFVSFIIQFQFHEALCQAAGHTGPLHKCDIYQSKEAGQRLATAMKLGFSRPWPEAMQLITGQPNMSASAMLSYFKPLLDWLRTENELHGEKLGWPQYNWTPNSARSEGPLPDSGRVSFLGLDLDAQQARVGQWLLLFLGIALLVATLGLSQRLFSIRHRSLHRHSHGPQFGSEVELRHS

SEQ ID NO: 37500 - protein, 73 aa, Homo sapiens
VATMSLHGKRKEIYKYEAPWTVYAMNWSVRPDKRFRLALGSFVEEYNNKVLFGVHFEKLMKAMDSHCPDITHT

SEQ ID NO: 37501 - protein, 145 aa, Homo sapiens
VATMSLHGKRKEIYKYEAPWTVYAMNWSVRPDKRFRLALGSFVEEYNNKVVILDVRVPCTPVARLNNHRACVNGIAWAPHSSCHICTAADDHQALIWDIQQMPRAIEDPILAYTAEGEINNVQWASTQPDWIAICYNNCLEILRV

SEQ ID NO: 37502 - protein, 14 aa, Homo sapiens
LVVYWAFFGLSVLR

SEQ ID NO: 37503 - protein, 175 aa, Homo sapiens
LAGAGLAGPSRLTSPCRTQRVPLLHPRLPPPTSHVPGCRSRPGHPLSWPPGAAPALTAPLPQDAKGGGSSTVQRSKSFSLRAQVKETCAACQKTVYPMERLVADKLIFHNSCFCCKHCHTKLSLGSYAALHGEFYCKPHFQQLFKSKGNYDEGFGRKQHKELWAHKEVDPGTKTA

SEQ ID NO: 37504 - protein, 16 aa, Homo sapiens
VRPRRPIPPRGPGRAW

SEQ ID NO: 37505 - protein, 72 aa, Homo sapiens
VGLVLYVLSWGTLEQPPSLASPWASCSRVACCSDSPGCGTAGTASQTSSDPPEHGRRLGFKAGSSDCSFPLG

SEQ ID NO: 37506 - protein, 160 aa, Homo sapiens
MSFLVSKPERIRRWVSEKFIVEGLRDLELFGEQPPGDTRRKTNDASSESIASFSKQEVMSSFLPEGGCYELLTVIGKGFEDLMTVNLARYKPTGEYVTVRRINLEACSNEMVTFLQGELHVSKLFNHPNIVPYRATFIADNELWVVTSFMAYGVSKPATS

SEQ ID NO: 37507 - protein, 184 aa, Homo sapiens
LMVTGLLAYIMNYIIGKNKNSRLAQAWFNTHRELLESNFTLVGDDGTNKEATSTGKLNQENEHIYNLWCSGRVCCEGMLIQLRFLKRQDLLNVLARMMRPVSDQVQIKVTMNDEDMDTYVFAVGTRKALVRLQKEMQDLSEFCSDKPKSGAKYGLPDSLAILSEMGGHRRNDGYKDGSLSYTLC

SEQ ID NO: 37508 - protein, 100 aa, Homo sapiens [sequence omitted]

SEQ ID NO: 37509 - protein, 1003 aa, Homo sapiens
VRRWRWWRWRRRWWWWRRRRRRGRRGRSAAGPGRDSAYFGLRDSLRARGCSSCRCSHSSRSVIGTMNWNKGGPGTKRGFGFGGFAISAGKKEEPKLPQQSHSAFGATSSSSGFGKSAPPQLPSFYKIGSKRANFDEENAYFEDEEEDSSNVDLPYIPAENSPTRQQFHSKPVDSDSDDDPLEAFMAEVEDQAARDMKRLEEKDKERKNVKGIRDDIEEEDDQEAYFRYMAENPTAGVVQEEEEDNLEYDSDGNPIAPTKKIIDPLPPIDHSEIDYPPFEKNFYNEHEEITNLTPQQLIDLRHKLNLRVSGAAPPRPGSSFAHFGFDEQLMHQIRKSEYTQPTPIQCQGVPVALSGRDMIGIAKTGSGKTAAFIWPMLIHIMDQKELEPGDGPIAVIVCPTRELCQQIHAECKRFGKAYNLRSVAVYGGGSMWEQAKALQEGAEIVVCTPGRLIDHVKKKATNLQRVSYLVFDEADRMFDMGFEYQVRSIASHVRPDRQTLLFSATFRKKIEKLARDILIDPIRVVQGDIGEANEDVTQIVEILHSGPSKWNWLTRRLVEFTSSGSVLLFVTKKANAEELANNLKQEGHNLGLLHGDMDQSERNKVISDFKKKDIPVLVATDVAARGLDIPSIKTVINYDVARDIDTHTHRIGRTGRAGEKGVAYTLLTPKDSNFAGDLVRNLEGANQHVSKELLDLAMQNAWFRKSRFKGGKGKKLNIGGGGLGYRERPGLGSENMDRGNNNVMSNYEAYKPSTGAMGDRLTAMKAAFQSQYKSHFVAASLSNQKAGSSAAGASGWTSAGSLNSVPTNSAQQGHNSPDSPVTSAAKGIPGFGNTGNISGAPVTYPSAGAQGVNNTASGNNSREGTGGSNGKRERYTENRGSSRHSHGETGNRHSDSPRHGDGGRHGDGYRHPESSSRHTDGHRHGENRHGGSAGRHGENRGANDGRNGESRKEAFNRESKMEPKMEPKVDSSKMDKVDSKTDKTADGFAVPEPPKRKKSRWDS

SEQ ID NO: 37510 - protein, 80 aa, Homo sapiens
LGQTLGRSQRSPAIGRGALLQARWRLICVVITVFLQMAVECLEEVPRGLQEGTISLPPVCPESCFHPSGPRNLQYPELQG

SEQ ID NO: 37511 - protein, 70 aa, Homo sapiens
LFGVWTLLALILCPDPGPSGIETFLKKTQVGKGPQWKEFLLEDVTENSILQCFFSCAGIQKDTSLGITVY

SEQ ID NO: 37512 - protein, 49 aa, Homo sapiens
MILLPSLSLGKSIFTLREGVRNHQTRSFLPNQSRNVHWNVAMVKIKVVL

SEQ ID NO: 37513 - protein, 210 aa, Homo sapiens
LWTAHLAAMATGSRTSLLLAFGLLCLPWLQEGSAFPTIPLSRLFDNAMLRAHRLHQLAFDTYQEFNPQTSLCFSESIPTPSNREETQQKSNLELLRISLLLIQSWLEPVQFLRSVFANSLVYGASDSNVYDLLKDLEEGIQTLMGRLEDGSPRTGQIFKQTYSKFDTNSHNDDALLKNYGLLYCFRKDMDKVETFLRIVQCRSVEGSCGF

SEQ ID NO: 37514 - protein, 225 aa, Homo sapiens
LWTAHLAAMATGSRTSLLLAFGLLCLPWLQEGSAFPTIPLSRLFDNAMLRAHRLHQLAFDTYQEFEEAYIPKEQKYSFLQNPQTSLCFSESIPTPSNREETQQKSNLELLRISLLLIQSWLEPVQFLRSVFANSLVYGASDSNVYDLLKDLEEGIQTLMGRLEDGSPRTGQIFKQTYSKFDTNSHNDDALLKNYGLLYCFRKDMDKVETFLRIVQCRSVEGSCGF

SEQ ID NO: 37515 - protein, 130 aa, Homo sapiens
LWTAHLAAMATGSRTSLLLAFGLLCLPWLQEGSAFPTIPLSRLFDNAMLRAHRLHQLAFDTYQEFRLEDGSPRTGQIFKQTYSKFDTNSHNDDALLKNYGLLYCFRKDMDKVETFLRIVQCRSVEGSCGF

SEQ ID NO: 37516 - protein, 212 aa, Homo sapiens
LLLGLALRKMPSGMLSLALAPTGSACSRIWQSPRFIARKRGFTVKMHCYMNSASGNVSWLWKQEMDENPQQLKLEKGRMEESQNESLATLTIQGIRFEDNGIYFCQQKCNNTSEVYQGCGTELRVMGFSTLAQLKQRNTLKDGIIMIQTLLIILFIIVPIFLLLDKDDSKAGMEEDHTYEGLDIDQTATYEDIVTLRTGEVKWSVGEHPGQE

SEQ ID NO: 37517 - protein, 232 aa, Homo sapiens
VTMARLALSPVPSHWMVALLLLLSAAEPVPAARSEDRYRNPKGSACSRIWQSPRFIARKRGFTVKMHCYMNSASGNVSWLWKQEMDENPQQLKLEKGRMEESQNESLATLTIQGIRFEDNGIYFCQQKCNNTSEVYQGCGTELRVMGFSTLAQLKQRNTLKDGIIMIQTLLIILFIIVPIFLLLDKDDSKAGMEEDHTYEGLDIDQTATYEDIVTLRTGEVKWSVGEHPGQE

SEQ ID NO: 37518 - protein, 231 aa, Homo sapiens
VTMARLALSPVPSHWMVALLLLLSAEPVPAARSEDRYRNPKGSACSRIWQSPRFIARKRGFTVKMHCYMNSASGNVSWLWKQEMDENPQQLKLEKGRMEESQNESLATLTIQGIRFEDNGIYFCQQKCNNTSEVYQGCGTELRVMGFSTLAQLKQRNTLKDGIIMIQTLLIILFIIVPIFLLLDKDDSKAGMEEDHTYEGLDIDQTATYEDIVTLRTGEVKWSVGEHPGQE

SEQ ID NO: 37519 - protein, 43 aa, Homo sapiens
VTMARLALSPVPSHWMVALLLLLSAEPVPAARSEDRYRNPKGQ

SEQ ID NO: 37520 - protein, 50 aa, Homo sapiens
LEDPAWVRGEAASEPQMKDCLLVGEHLGPSEMSFHLFLEETNDRAWFTFI

SEQ ID NO: 37521 - protein, 647 aa, Homo sapiens
VSSSLLFVWGLGSCRGGCHLVAVEGVERERIVRMKAGRFEADEGTSVRFGAPRFGGSRAGPLSGKKFGNPGEKLVKKKWNLDELPKFEKNFYQEHPDLARRTAQEVETYRRSKEITVRGHNCPKPVLNFYEANFPANVMDVIARQNFTEPTAIQAQGWPVALSGLDMVGVAQTGSGKTLSYLLPAIVHINHQPFLERGDGPICLVLAPTRELAQQVQQVAAEYCRACRLKSTCIYGGAPKGPQIRDLERGVEICIATPGRLIDFLECGKTNLRRTTYLVLDEADRMLDMGFEPQIRKIVDQIRPDRQTLMWSATWPKEVRQLAEDFLKDYIHINIGALELSANHNILQIVDVCHDVEKDEKLIRLMEEIMSEKENKTIVFVETKRRCDELTRKMRRDGWPAMGIHGDKSQQERDWVLNEFKHGKAPILIATDVASRGLDVEDVKFVINYDYPNSSEDYIHRIGRTARSTKTGTAYTFFTPNNIKQVSDLISVLREANQAINPKLLQLVEDRGSGRSRGRGGMKDDRRDRYSAGKRGGFNTFRDRENYDRGYSSLLKRDFGAKTQNGVYSAANYTNGSFGSNFVSAGIQTSFRTGNPTGTYQNGYDSTQQYGSNVPNMHNGMNQQAYAYPATAAAPMIGYPMPTGYSQ

SEQ ID NO: 37522 - protein, 582 aa, Homo sapiens
VQLRLVSSVSFLRCRPRKASPSSRPFPATCRTLFYILRSPPTATIDAMSGYSSDRDRGRDRGFGAPRFGGSRAGPLSGKKFGNPGEKLVKKKWNLDELPKFEKNFYQEHPDLARRTAQEVETYRRSKEITVRGDGPICLVLAPTRELAQQVQQVAAEYCRACRLKSTCIYGGAPKGPQIRDLERGVEICIATPGRLIDFLECGKTNLRRTTYLVLDEADRMLDMGFEPQIRKIVDQIRPDRQTLMWSATWPKEVRQLAEDFLKDYIHINIGALELSANHNILQIVDVCHDVEKDEKLIRLMEEIMSEKENKTIVFVETKRRCDELTRKMRRDGWPAMGIHGDKSQQERDWVLNEFKHGKAPILIATDVASRGLDVEDVKFVINYDYPNSSEDYIHRIGRTARSTKTGTAYTFFTPNNIKQVSDLISVLREANQAINPKLLQLVEDRGSGRSRGRGGMKDDRRDRYSAGKRGGFNTFRDRENYDRGYSSLLKRDFGAKTQNGVYSAANYTNGSFGSNFVSAGIQTSFRTGNPTGTYQNGYDSTQQYGSNVPNMHNGMNQQAYAYPATAAAPMIGYPMPTGYSQ

SEQ ID NO: 37523 - protein, 677 aa, Homo sapiens
LPESGRHLIHFYRSLVVQLRLVSSVSFLRCRPRKASPSSRPFPATCRTLFYILRSPPTATIDAMSGYSSDRDRGRDRGFGAPRFGGSRAGPLSGKKFGNPGEKLVKKKWNLDELPKFEKNFYQEHPDLARRTAQEVETYRRSKEITVRGHNCPKPVLNFYEANFPANVMDVIARQNFTEPTAIQAQGWPVALSGLDMVGVAQTGSGKTLSYLLPAIVHINHQPFLERGDGPICLVLAPTRELAQQVQQVAAEYCRACRLKSTCIYGGAPKGPQIRDLERGVEICIATPGRLIDFLECGKTNLRRTTYLVLDEADRMLDMGFEPQIRKIVDQIRPDRQTLMWSATWPKEVRQLAEDFLKDYIHINIGALELSANHNILQIVDVCHDVEKDEKLIRLMEEIMSEKENKTIVFVETKRRCDELTRKMRRDGWPAMGIHGDKSQQERDWVLNEFKHGKAPILIATDVASRGLDVEDVKFVINYDYPNSSEDYIHRIGRTARSTKTGTAYTFFTPNNIKQVSDLISVLREANQAINPKLLQLVEDRGSGRSRGRGGMKDDRRDRYSAGKRGGFNTFRDRENYDRGYSSLLKRDFGAKTQNGVYSAANYTNGSFGSNFVSAGIQTSFRTGNPTGTYQNGYDSTQQYGSNVPNMHNGMNQQAYAYPATAAAPMIGYPMPTGYSQ

SEQ ID NO: 37524 - protein, 453 aa, Homo sapiens
VQLRLVSSVSFLRCRPRKASPSSRPFPATCRTLFYILRSPPTATIDAMSGYSSDRDRGRDRGFGAPRFGGSRAGPLSGKKFGNPGEKLVKKKWNLDELPKFEKNFYQEHPDLARRTAQEVETYRRSKEITVRGHNCPKPVLNFYEANFPANVMDVIARQNFTEPTAIQAQGWPVALSGLDMVGVAQTGSGKTLSYLLPAIVHINHQPFLERGDGPICLVLAPTRELAQQVQQVAAEYCRACRLKSTCIYGGAPKGPQIRDLERGVEICIATPGRLIDFLECGKTNLRRTTYLVLDEADRMLDMGFEPQIRKIVDQIRPDRQTLMWSATWPKEVRQLAEDFLKDYIHINIGALELSANHNILQIVDVCHDVEKDEKLIRLMEEIMSEKENKTIVFVETKRRCDELTRKMRRDGWPAMGIHGDKSQQERDWVLNEFKHGKAPILIATDVASRGLG

SEQ ID NO: 37525 - protein, 131 aa, Homo sapiens
LSLVLNILGIVVTLTYLIKGVEICIATPGRLIDFLECGKTNLRRTTYLVLDEADRMLDMGFEPQIRKIVDQIRPDRQTLMWSATWPKEVRQLAEDFLKDYIHINIGALELSANHNILQIVDVCHDVEKDEK

SEQ ID NO: 37526 - protein, 77 aa, Homo sapiens [sequence omitted]

SEQ ID NO: 37527 - protein, 162 aa, Homo sapiens
LPESGRHLIHFYRSLVVQLRLVSSVSFLRCRPRKASPSSRPFPATCRTLFYILRSPPTATIDAMSGYSSDRDRGRDRGFGAPRFGGSRAGPLSGKKFGNPGEKLVKKKWNLDELPKFEKNFYQEHPDLARRTAQEVETYRRSKEITVRVWKNQSEKNNLPCP

SEQ ID NO: 37528 - protein, 143 aa, Homo sapiens
VQLRLVSSVSFLRCRPRKASPSSRPFPATCRTLFYILRSPPTATIDAMSGYSSDRDRGRDRGFGAPRFGGSRAGPLSGKKFGNPGEKLVKKKWNLDELPKFEKNFYQEHPDLARRTAQMSWMLLQDRISLNPLLFKLRDGQLL

SEQ ID NO: 37529 - protein, 149 aa, Homo sapiens
VQLRLVSSVSFLRCRPRKASPSSRPFPATCRTLFYILRSPPTATIDAMSGYSSDRDRGRDRGFGAPRFGGSRAGPLSGKKFGNPGEKLVKKKWNLDELPKFEKNFYQEHPDLARRTAVSKFMWLHQAVTRSWILVNEILTGVLQITQFW

SEQ ID NO: 37530 - protein, 66 aa, Homo sapiens
VQLRLVSSVSFLRCRPRKASPSSRPFPATCRTLFYILRSPPTATIDAMSGYSSDRDRGRDRGHLKM

SEQ ID NO: 37531 - protein, 22 aa, Homo sapiens
LLSLTVLFRFLPLKLFGSKTAI

SEQ ID NO: 37532 - protein, 641 aa, Homo sapiens
VLAASFTYSSNRFTANLLLSVFIYRIVPSHMACCLCQFKNSIEAVCKTVKLHCNSACLTNTTHCPEEASVGNPEGAFMKVLQARKNYTSTELIIEPEEPSDSSGINLSGFGSEQLDTNDESDVTSTLSYILPYFSAVNLDVKSLLLPFIKLPTTGNSLAKIQTVGKNRQRLNRVLMGPRSIQKRHFKEVGRQSIRREQGAQASVENTAEEKRLGSPAPRELKQPHTQQGPEKLAGNAVYTKPSFTQEHKAAVSVLKPFSKGAPSTSSPAKALPQVRDRWKDLTHAISILESAKARVTNMKTSKPIVHSRKKYRFHKTRSRMTHRTPKVKKSPKVRKKSYLSRLMLSNRLPFSAAKSLINSPSQGAFSSLRDLSPQENPFLEVSAPSEHFIENNNTKDTTARNAFEENVFMENTNMPEGTISENTNYNHPPEADSAGTAFNLGPTVKQTETKWEYNNVGTDLSPEPKSFNYPLLSSPGDQFEIQLTQQLQSVIPNNNVRRLIAHVIRTLKMDCSGAHVQVTCAKLVSRTGHLMKLLSGQQEVKASKIEWDTDQWKTENYINESTEAQSEQKEKSLEFTKELPGYGYTKKLILALIVTGILTILIILLCLIEICCHRRSLQEDEEGFSRDSEAPTEEESEALP

SEQ ID NO: 37533 - protein, 124 aa, Homo sapiens
MQIVRYSEQTLKIAVISKNPVLVSQYEKVDAGEQRLMNEAFQPASDLFGPCILHQIGSPPTLRPPKTLNSSSVILTERYPLQTNAVFIYGPLVNTGNVLVLVRFCNGSVVRNSPGYWSDSDGPF

SEQ ID NO: 37534 - protein, 36 aa, Homo sapiens
MVMIWNKMCLILCYILFLNLNAFSFNSEEISHKCLH

SEQ ID NO: 37535 - protein, 437 aa, Homo sapiens
LARPARPALRVSSLVPSLPGRARAAAALPALEPRCRSRPPPEEEVEGAGGARRGGGGGGKMADFLPSRSVLSVCFPGCLLTSGEAEQQRKSKEIDKCLSREKTYVKRLVKILLLGAGESGKSTFLKQMRIIHGQDFDQRAREEFRPTIYSNVIKGMRVLVDAREKLHIPWGDNSNQQHGDKMMSFDTRAPMAAQGMVETRVFLQYLPAIRALWADSGIQNAYDRRREFQLGESVKYFLDNLDKLGEPDYIPSQQDILLARRPTKGIHEYDFEIKNVPFKMVDVGGQRSERKRWFECFDSVTSILFLVSSSEFDQVLMEDRLTNRLTESLNIFETIVNNRVFSNVSIILFLNKTDLLEEKVQIVSIKDYFLEFEGDPHCLRDVQKFLVECFRNKRRDQQQKPLYHHFTTAINTENIRLVFRDVKDTILHDNLKQLMLQ

SEQ ID NO: 37536 - protein, 50 aa, Homo sapiens
LGRARLPFELGGLLLLSPTGALAVNPSRGQDDNPTPRPAVQAEDGISPKD

SEQ ID NO: 37537 - protein, 312 aa, Homo sapiens
LGGTMADVFPGNDSTASQDVANRFARKGALRQKNVHEVKDHKFIARFFKQPTFCSHCTDFIWGFGKQGFQCQVCCFVVHKRCHEFVTFSCPGADKGPDTDDPRSKHKFKIHTYGSPTFCDHCGSLLYGLIHQGMKCDTCDMNVHKQCVINVPSLCGMDHTEKRGRIYLKAEVADEKLHVTVRDAKNLIPMDPNGLSDPYVKLKLIPDPKNESKQKTKTIRSTLNPQWNESFTFKLKPSDKDRRLSVEIWDWDRTTRNDFMGSLSFGVSELMKMPASGWYKLLNQEEGEYYNVPIPEGDEEGNMELRQKFEWR

SEQ ID NO: 37538 - protein, 676 aa, Homo sapiens
LGGTMADVFPGNDSTASQDVANRFARKGALRQKNVHEVKDHKFIARFFKQPTFCSHCTDFIWGFGKQGFQCQVCCFVVHKRCHEFVTFSCPGADKGPDTDDPRSKHKFKIHTYGSPTFCDHCGSLLYGLIHQGMKCDTCDMNVHKQCVINVPSLCGMDHTEKRGRIYLKAEVADEKLHVTVRDAKNLIPMDPNGLSDPYVKLKLIPDPKNESKQKTKTIRSTLNPQWNESFTFKLKPSDKDRRLSVEIWDWDRTTRNDFMGSLSFGVSELMKMPASGWYKLLNQEEGEYYNVPIPEGDEEGNMELRQKFEKAKLGPAGNKVISPSEDRKQPSNNLDRVKLTDFNFLMVLGKGSFGKVMLADRKGTEELYAIKILKKDVVIQDDDVECTMVEKRVLALLDKPPFLTQLHSCFQTVDRLYFVMEYVNGGDLMYHIQQVGKFKEPQAVFYAAEISIGLFFLHKRGIIYRDLKLDNVMLDSEGHIKIADFGMCKEHMMDGVTTRTFCGTPDYIAPEIIAYQPYGKSVDWWAYGVLLYEMLAGQPPFDGEDEDELFQSIMEHNVSYPKSLSKEAVSVCKGLMTKHPAKRLGCGPEGERDVREHAFFRRIDWEKLENREIQPPFKPKVCGKGAENFDKFFTRGQPVLTPPDQLVIANIDQSDFEGFSYVNPQFVHPILQSAV

SEQ ID NO: 37539 - protein, 9 aa, Homo sapiens
MVYMLGFFF

SEQ ID NO: 37540 - protein, 303 aa, Homo sapiens
MADGGSERADGRIVKMEVDYSATVDQRLPECAKLAKEGRLQEVIETLLSLEKQTRTASDMVSTSRILVAVVKMCYEAKEWDLLNENIMLLSKRRSQLKQAVAKMVQQCCTYVEEITDLPIKLRLIDTLRMVTEGKIYVEIERARLTKTLATIKEQNGDVKEAASILQELQVETYGSMEKKERVEFILEQMRLCLAVKDYIRTQIISKKINTKFFQEENTEKLKLKYYNLMIQLDQHEGSYLSICKHYRAIYDTPCIQAESEKWQQALKSVVLYVILAPFDNEQSDLVHRISGDKKLEEIPKYK

SEQ ID NO: 37541 - protein, 85 aa, Homo sapiens
LHRRGRSGPGEVAANSRARTAPGEPRDSGEGTRAEGASFLPPAPGSREPRLEAPGAPAGQSRAAAAAAASLFSPSRAPERRGDRP

SEQ ID NO: 37542 - protein, 548 aa, Homo sapiens
LNLLPWHIIFSSFSLCLITMSTNENANTPAARLHRFKNKGKDSTEMRRRRIEVNVELRKAKKDDQMLKRRNVSSFPDDATSPLQENRNNQGTVNWSVDDIVKGINSSNVENQLQATQAARKLLSREKQPPIDNIIRAGLIPKFVSFLGRTDCSPIQFESAWALTNIASGTSEQTKAVVDGGAIPAFISLLASPHAHISEQAVWALGNIAGDGSVFRDLVIKYGAVDPLLALLAVPDMSSLACGYLRNLTWTLSNLCRNKNPAPPIDAVEQILPTLVRLLHHDDPEVLADTCWAISYLTDGPNERIGMVVKTGVVPQLVKLLGASELPIVTPALRAIGNIVTGTDEQTQVVIDAGALAVFPSLLTNPKTNIQKEATWTMSNITAGRQDQIQQVVNHGLVPFLVSVLSKADFKTQKEAVWAVTNYTSGGTVEQIVYLVHCGIIEPLMNLLTAKDTKIILVILDAISNIFQAAEKLGETEKLSIMIEECGGLDKIEALQNHENESVYKASLSLIEKYFSVEEEEDQNVVPETTSEGYTFQVQDGAPGTFNF

SEQ ID NO: 37543 - protein, 37 aa, Homo sapiens
LINCPRLYLGIILTGHENETKRSLEAINDKISWRRRP

SEQ ID NO: 37544 - protein, 95 aa, Homo sapiens
MMISFFFHLLLIVTSSLLGSGTTEENKENDLRPSLPQSYAATVARPSASSASTVPGYSEDGGALRGEVIPEHEFATGPVCLDDENEFPPVSIRNP

SEQ ID NO: 37545 - protein, 175 aa, Homo sapiens
LHPDCETQWGPPQAGAEVLGFREGHVQTHEQRDEETPVDFFYFIDFQRHNAEIAAFHLDRILDFRRVPPTVGRIVNVTKEILEVTKNEILQSVFFVSPASNVCFFAKCPYMCKTEYAVCGNPHLLEGSLSAFLPSLNLAPRLSVPNPWIRSYTLAGKEDPRTSSPPQVGGQSPLL

SEQ ID NO: 37546 - protein, 248 aa, Homo sapiens
MYREQMNLTSLDPPLQLRLEASWVQFHLGINRHGLYSRSSPVVSKLLQDMRHFPTISADYSQDEKALLGACDCTQIVKPSGVHLKLVLRFSDFGKAMFKPMRQQRDEETPVDFFYFIDFQRHNAEIAAFHLDRILDFRRVPPTVGRIVNVTKEILEVTKNEILQSVFFVSPASNVCFFAKCPYMCKTEYAVCGNPHLLEGSLSAFLPSLNLAPRLSVPNPWIRSYTLAGKEDPRTSSPPQVGGQSPLL

SEQ ID NO: 37547 - protein, 1130 aa, Homo sapiens
LNSLLLLLCLYIYPHSHQVNDFSSLLTMDLGRVDTFNESRFSVVYTPVTNTTQQIMNKVASTPFLAGKEVLGLPDEESIKEFTANYPEEIVRVTFTNTYSYHLKFLLGHGMPAKKEHKDHTAHCYETNEDVYCEVSVFWKEGFVALQAAINAAIIEITTNHSVMEELMSVTGKNMKMHSFIGQSGVITDLYLFSCIISFSSFIYYASVNVTRERKRMKALMTMMGLRDSAFWLSWGLLYAGFIFIMALFLALVIRSTQFIILSGFMVVFSLFLLYGLSLVALAFLMSILVKKSFLTGLVVFLLTVFWGCLGFTSLYRHLPASLEWILSLLSPFAFMLGMAQLLHLDYDLNSNAFPHPSDGSNLIVATNFMLAFDTCLYLALAIYFEKILPNEYGHRRPPLFFLKSSFWSQTQKTDHVALEDEMDADPSFHDSFEQAPPEFQGKEAIRIRNVTKEYKGKPDKIEALKDLVFDIYEGQITAILGHSGAGKSTLLNILSGLSVPTKGSVTIYNNKLSEMADLENLSKLTGVCPQSNVQFDFLTVRENLRLFAKIKGILPQEVDKEIQRVLLELEMKNIQDVLAQNLSGGQKRKLTFGIAILGDPQIFLLDEPTAGLDPFSRHQVWNLLKERKTDRVILFSTQFMDEADILADRKVFLSQGKLKCAGSSLFLKKKWGIGYHLSLQLNEICVEENITSLVKQHIPDAKLSAKSEGKLIYTLPLERTNKFPELYKDLDSYPDLGIENYGVSMTTLNEVFLKLEGKSTINESDIAILGEVQAEKADDTERLVEMEQVLSSLNKMRKTIGGVALWRQQICAIARVRLLKLKHERKALLALLLILMAGFCPLLVEYTMVKIYQNSYTWELSPHLYFLAPGQQPHDPLTQLLIINKTGASIDDFIQSVEHQNIALEVDAFGTRNGTDDPSYNGAITVCCNEKNYSFSLACNAKRLNCFPVLMDIVSNGLLGMVKPSVHIRTERSTFLENGQDNPIGFLAYIMFWLVLTSSCPPYIAMSSIDDYKNRARSQLRISGLSPSAYWFGQALVDVSLYFLVFVFIYLMSYISNFEDMLLTIIHIIQIPCAVGYSFSLIFMTYVISFIFRKGRKNSGIWSFCFYVVSIFLVDVYCIYLIYNSELIL

SEQ ID NO: 37548 - protein, 12 aa, Homo sapiens
MNNFLLNKELSG

SEQ ID NO: 37549 - protein, 1601 aa, Homo sapiens
LEWTITLFLGLYLCIFSEHFRATRFPEQPPKVLGSVDQFNDSGLVVAYTPVSNITQRIMNKMALASFMKGRTVIGTPDEETMDIELPKKYHEMVGVIFSDTFSYRLKFNWGYRIPVIKEHSEYTEHCWAMHGEIFCYLAKYWLKGFVAFQAAINAAIIEVTTNHSVMEELTSVIGINMKIPPFISKGEIMNEWFHFTCLVSFSSFIYFASLNVARERGKFKKLMTVMGLRESAFWLSWGLTYICFIFIMSIFMALVITSIPIVFHTGFMVIFTLYSLYGLSLIALAFLMSVLIRKPMLAGLAGFLFTVFWGCLGFTVLYRQLPLSLGWVLSLLSPFAFTAGMAQITHLDNYLSGVIFPDPSGDSYKMIATFFILAFDTLFYLIFTLYFERVLPDKDGHGDSPLFFLKSSFWSKHQNTHHEIFENEINPEHSSDDSFEPVSPEFHGKEAIRIRNVIKEYNGKTGKVEALQGIFFDIYEGQITAILGHNGAGKSTLLNILSGLSVSTEGSATIYNTQLSEITDMEEIRKNIGFCPQFNFQFDFLTVRENLRVFAKIKGIQPKEVEQEVKRIIMELDMQSIQDIIAKKLSGGQKRKLTLGIAILGDPQVLLLDEPTAGLDPFSRHRVWSLLKEHKVDRLILFSTQFMDEADILADRKVFLSNGKLKCAGSSLFLKRKWGIGYHLSLHRNEMCDTEKITSLIKQHIPDAKLTTESEEKLVYSLPLEKTNKFPDLYSDLDKCSDQGIRNYAVSVTSLNEVFLNLEGKSAIDEPDFDIGKQEKIHVTRNTGDESEMEQVLCSLPETRKAVSSAALWRRQIYAVATLRFLKLRRERRALLCLLLVLGIAFIPIILEKIMYKVTRETHCWEFSPSMYFLSLEQIPKTPLTSLLIVNNTGSNIEDLVHSLKCQDIVLEIDDFRNRNGSDDPSYNGAIIVSGDQKDYRFSVACNTKKLNCFPVLMGIVSNALMGIFNFTELIQMESTSFSRDDIVLDLGFIDGSIFLLLITNCVSPFIGMSSISDYKKNVQSQLWISGLWPSAYWCGQALVDIPLYFLILFSIHLIYYFIFLGFQLSWELMFVLVVCIIGCAVSLIFLTYVLSFIFRKWRKNNGFWSFGFFIILICVSTIMVSTQYEKLNLILCMIFIPSFTLLGYVMLLIQLDFMRNLDSLDNRINEVNKTILLTTLIPYLQSVIFLFVIRCLEMKYGNEIMNKDPVFRISPRSRETHPNPEEPEEEDEDVQAERVQAANALTAPNLEEEPVITASCLHKEYYETKKSCFSTRKKKIAIRNVSFCVKKGEVLGLLGHNGAGKSTSIKMITGCTKPTAGVVVLQGSRASVRQQHDNSLKFLGYCPQENSLWPKLTMKEHLELYAAVKGLGKEDAALSISRLVEALKLQEQLKAPVKTLSEGIKRKLCFVLSILGNPSVVLLDEPFTGMDPEGQQQMWQILQATVKNKERGTLLTTHYMSEAEAVCDRMAMMVSGTLRCIGSIQHLKNKFGRDYLLEIKMKEPTQVEALHTEILKLFPQAAWQERYSSLMAYKLPVEDVHPLSRAFFKLEAMKQTFNLEEYSLSQATLEQVFLELCKEQELGNVDDKIDTTVEWKLLPQEDP

SEQ ID NO: 37550 - protein, 21 aa, Homo sapiens
LVFWLFYYLNMCIHNYGINSI

SEQ ID NO: 37551 - protein, 22 aa, Homo sapiens
VNMYSIESLCSFLLGVYLGVEL

SEQ ID NO: 37552 - protein, 15 aa, Homo sapiens
LCLLDLFFFLVVLRS

SEQ ID NO: 37553 - protein, 37 aa, Homo sapiens
LTEEQIPEFIEAFSLFDRDNDGTITTKEVETIMRSLG

SEQ ID NO: 37554 - protein, 60 aa, Homo sapiens
LCLLLTGGSRSGVGPRHFPAQLNHISCACPCDLLTGKEEMTEGEGRAFEVFFPLHPGLLL

SEQ ID NO: 37555 - protein, 71 aa, Homo sapiens
LCLLLTGGSRSGVGPRHFPAQLNHISCACPCDLLTGKEEMTEGEGRAFEGRRRGWRKKLDHLVTWKERSEL

SEQ ID NO: 37556 - protein, 31 aa, Homo sapiens
MDVGAGGRMNSERNASTVLSLRITHPTTAWS

SEQ ID NO: 37557 - protein, 39 aa, Homo sapiens
LPPAPGASPRSHPARGDPVSRLMISSLRPPLPTGLGLQI

SEQ ID NO: 37558 - protein, 87 aa, Homo sapiens
LFPAGPGPRQSPARLVAMPRKIEEIKDFLLTARRKDAKSVKIKKNKDNVKFKVRCSRYLYTLVITDKEKAEKLKQSLPPGLAVKELK

SEQ ID NO: 37559 - protein, 198 aa, Homo sapiens
LVTGGGPREGPCVQKANLGVRCVHVCKLGRGGGAEGVTKTDSVLSVRLAPARSQRTVPEVTKSSPEQSYQGDMYPTRGVGYETILKEQKGQSMFVENKAFSMDEPVAAKRPVSPYSGYNGQLLTSVYQPTEMALMHKVPSEGAYDIILPRATANSQVMGSANSTLRAEDMYSAQSHQAATPPKDGKNSQVFRNPYVWD

SEQ ID NO: 37560 - protein, 114 aa, Homo sapiens
LSQAAPGAQPEGAEEPRGELGGIWQSQPCRKCLCIRPGGTWLPIPDCETACSSFQSEGAYDIILPRATANSQVMGSANSTLRAEDMYSAQSHQAATPPKDGKNSQVFRNPYVWD

SEQ ID NO: 37561 - protein, 226 aa, Homo sapiens
MWLPWALLLLWVPGCFALSKCRTVAGPVGGSLSVQCPYEKEHRTLNKYWCRPPQIFLCDKIVETKGSAGKRNGRVSIRDSPANLSFTVTLENLTEEDAGTYWCGVDTPWLRDFHDPVVEVEVSVFPASTSMTPASITAAKTSTITTAFPPVSSTTLFAVGATHSASIQEETEEVVNSQLPLLLSLLALLLLLLVGASLLAWRMFQKWIKAGDHSELSQNPKQVRGL

SEQ ID NO: 37562 - protein, 34 aa, Homo sapiens
MLLMKTVLGKWFCLLTGFTHGDEALECGHFVLYG

SEQ ID NO: 37563 - protein, 107 aa, Homo sapiens
LVLFLLILPATPRKQSEPKTTDAAAPGTADTAGPGTMDTAVPRKAETAVPGKRNTAVPGTADPASPGTADTAEPMRTTTPTVLASWPSLTQSTNSTQPTALTSPLTR

SEQ ID NO: 37564 - protein, 289 aa, Homo sapiens
LNEIRRDHQPDPNLASLPASWSPKRQGLERTGSQNSGPGRTTAESLFLVLKRSVLEERGRLPAWYRAAAAAGNCPVLKTDAARPAELRPKPAAPSGARTELLEALTQSAGRAGAASSKPGMDLQRPDSYQGGAGPDFNDHVLHKTILVGDSGVGKTSLLVQFDQGKFIPGSFSATVGIGFTNKVVTVDGVRVKLQIWDTAGQERFRSVTHAYYRDAQALLLLYDITNKSSFDNIRAWLTEIHEYAQRDVVIMLLGNKVSGSGAGSAQPCTSSALAGPITTQEQLSRHPS

SEQ ID NO: 37565 - protein, 302 aa, Homo sapiens
LNEIRRDHQPDPNLASLPASWSPKRQGLERTGSQNSGPGRTTAESLFLVLKRSVLEERGRLPAWYRAAAAAGNCPVLKTDAARPAELRPKPAAPSGARTELLEALTQSAGRAGAASSKPGMDLQRPDSYQGGAGPDFNDHVLHKTILVGDSGVGKTSLLVQFDQGKFIPGSFSATVGIGFTNKVVTVDGVRVKLQIWDTAGQERFRSVTHAYYRDAQALLLLYDITNKSSFDNIRAWLTEIHEYAQRDVVIMLLGNKADMSSERVIRSEDGETLAREYGVPFLETSAKTGMNVELAFLAIAK

SEQ ID NO: 37566 - protein, 336 aa, Homo sapiens
LNEIRRDHQPDPNLASLPASWSPKRQGLERTGSQNSGPGRTTAESLFLVLKRSVLEERGRLPAWYRAAAAAGNCPVLKTDAARPAELRPKPAAPSGARTELLEALTQSAGRAGAASSKPGMDLQRPDSYQGGAGPDFNDHVLHKTILVGDSGVGKTSLLVQFDQGKFIPGSFSATVGIGFTNKVVTVDGVRVKLQIWDTAGQERFRSVTHAYYRDAQALLLLYDITNKSSFDNIRAWLTEIHEYAQRDVVIMLLGNKADMSSERVIRSEDGETLAREYGVPFLETSAKTGMNVELAFLAIAKELKYRAGHQADEPSFQIRDYVESQKKRSSCCSFM

SEQ ID NO: 37567 - protein, 225 aa, Homo sapiens
VRSDYGNSSAADGVPAARSPRGKQATTGDRSRGWMWLMSEAHGAEPVLLREAARPFTQTLRLCVPSGNSKNKVVTVDGVRVKLQIWDTAGQERFRSVTHAYYRDAQALLLLYDITNKSSFDNIRAWLTEIHEYAQRDVVIMLLGNKADMSSERVIRSEDGETLAREYGVPFLETSAKTGMNVELAFLAIAKELKYRAGHQADEPSFQIRDYVESQKKRSSCCSFM

SEQ ID NO: 37568 - protein, 76 aa, Homo sapiens
LCLFSLVWIFSLALPMYPASPADCQWEDPQPSSGLCRNGGGQYPQVVNCKLAENQGGHPCPQPPSTYLPQNQGLCP

SEQ ID NO: 37569 - protein, 134 aa, Homo sapiens
LVVAALALRTLRLRQRGLAAPAPARPRPPTSCLSPNTAALPCGGPFSVSPARPVHFGRHERPVPPGSPGWLPGAPQGGHPKGAECPRRGWHDPHSLGCLPWQPRVAASHCEPRLPMATCTACPSWCPSEPTSGA

SEQ ID NO: 37570 - protein, 88 aa, Homo sapiens
LDMHHQPVVPMSTPASPSLGTGVFAPCCIVLYWDGAEEHAPSLPPIKCLLFTSHLCGGLLRTQLRQEFCFKMSESQVQLRDTQVPSLP

SEQ ID NO: 37571 - protein, 166 aa, Homo sapiens
VKDPKMAGRKLALKTIDWVAFAEIIPQNQKAIASSLKSWNETLTSRLAALPENPPAIDWAYYKANVAKAGLVDDFEKKFNALKVPVPEDKYTAQVDAEEKEDVKSCAEWVSLSKARIVEYEKEMEKMKNLIPFDQMTIEDLNEAFPETKLDKKKYPYWPHQPIENL

SEQ ID NO: 37572 - protein, 142 aa, Homo sapiens
VKDPKMAGRKLALKTIDWVAFAEIIPQNQKAIASSLKSWNETLTSRLAALPENPPAIDWAYYKANVAKAGLVDDFEKKVKSCAEWVSLSKARIVEYEKEMEKMKNLIPFDQMTIEDLNEAFPETKLDKKKYPYWPHQPIENL

SEQ ID NO: 37573 - protein, 86 aa, Homo sapiens
VKDPKMAGRKLALKTIDWVAFAEIIPQNQKAIASSLKSWNETLTSRLAALPENPPAIDWAYYKANVAKAGLVDDFEKKLSIIAKLS

SEQ ID NO: 37574 - protein, 244 aa, Homo sapiens
LPRNGPARLRAGSSGGGGGPRWRNCSWTRRWRGWEGAPGPGPPERAGGGGAARWVRLNVGGTYFVTTRQTLGREPKSFLCRLCCQEDPELDSDKDETGAYLIDRDPTYFGPILNYLRHGKLIITKELAEEGVLEEAEFYNIASLVRLVKERIRDNENRTSQGPVKHVYRVLQCQEEELTQMVSTMSDGWKFEQLISIGSSYNYGNEDQAEFLCVVSRELNNSTNGIVIEPSEKAKILQERGSRM

SEQ ID NO: 37575 - protein, 104 aa, Homo sapiens
LGQLQTVVSLVLFSVCAWSLQGPVKHVYRVLQCQEEELTQMVSTMSDGWKFEQLISIGSSYNYGNEDQAEFLCVVSRELNNSTNGIVIEPSEKAKILQERGSRM

SEQ ID NO: 37576 - protein, 45 aa, Homo sapiens
MSSNSLPLIKRPFTQNPHLASPPHSLPPGTSGHRLLQRSAQVRKC

SEQ ID NO: 37577 - protein, 36 aa, Homo sapiens
VGLGWVLAILGSFPAWVTEPGSWSPRSQRLHFSADS

SEQ ID NO: 37578 - protein, 355 aa, Homo sapiens
LKGDGRSPPQGPFFPPGLQLPLKTGQFLAVWQEETAGVHFTGSWARCRQFPGALQVLQKYRAKSIALSNWWFVAHLTDLLDHCKLLQSHNLYFGSNMREFLLLEYASGLFAHPSLWQLGVDYFDYCPELGRVSLELHIERIPLNTEQKALKVLRICEQRQMTEQVRSICKILAMKAVRNNRLGSALSWSIRAKDAAFATLVSDRFLRDYCERGCFSDLDLIDNLGPAMMLSDRLTFLGKYREFHRMYGEKRFADAASLLLSLMTSRIAPRSFWMTLLTDALPLLEQKQVIFSAEQTYELMRCLEDLTSRRPVHGESDTEQLQDDDIETTKVEMLRLSLARNLARAIIREGSLEGS

SEQ ID NO: 37579 - protein, 145 aa, Homo sapiens
LGLNVSEPELTLKGWGCLVVPSVRLEGKGWAWVRAWSGALGESPAALAGSLTCFPSFPPPRTSGLVKPTTSPLIPTTTPARPLLPFSTGPGSPLFQPLSFQSQGSPPKGPELSLASIHVPLESIKPSRCWRIEVGGAVGPIATEL

SEQ ID NO: 37580 - protein, 318 aa, Homo sapiens
MAEAEGESLESWLNKATNPSNRQEDWEYIIGFCDQINKELEGPQIAVRLLAHKIQSPQEWEALQALTVLEACMKNCGRRFHNEVGKFRFLNELIKVVSPKYLGDRVSEKVKTKVIELLYSWTMALPEEAKIKDAYHMLKRQGIVQSDPPIPVDRTLIPSPPPRPKNPVFDDEEKSKLLAKLLKSKNPDDLQEANKLIKSMVKEDEARIQKVTKRLHTLEEVNNNVRLLSEMLLHYSQEDSSDGDRELMKVGPPTAKAASRGCAALQELSQHLLSTCLVRDTGCALGSVFMTLLICTAATSVEGGVPICLLGSADLSRV

SEQ ID NO: 37581 - protein, 237 aa, Homo sapiens [sequence omitted]

SEQ ID NO: 37582 - protein, 30 aa, Homo sapiens [sequence omitted]

SEQ ID NO: 37583 - protein, 1320 aa, Homo sapiens
LLSGWALVFHSQAGKIGVPSPSPSWSCRKPQADIHPDFHVAFTPSKISFPSCGGSSRSTFGSIPQYLTRSPLPGTPDLLPRNREPSKGLWHGALTPQLGPVACLCPGLLSVELSPGASMGREQDLILAVKNGDVTGVQKLVAKVKATKTKLLGSTKRLNVNYQDADGFSALHHAALGGSLELIALLLEAQATVDIKDSNGMRPLHYAAWQGRLEPVRLLLRASAAVNAASLDGQIPLHLAAQYGHYEVSEMLLQHQSNPCLVNKAKKTPLDLACEFGRLKVAQLLLNSHLCVALLEGEAKDPCDPNYTTPLHLAAKNGHREVIRQLLRAGIEINRQTKTGTALHEAALYGKTEVVRLLLEGGVDVNIRNTYNQTALDIVNQFTTSQASREIKQLLREASGILKVRALKDFWNLHDPTALNVRAGDVITVLEQHPDGRWKGHIHESQRGTDRIGYFPPGIVEVVSKRVGIPAARLPSAPTPLRPGFSRTPQPPAEEPPHPLTYSQLPRVGLSPDSPAGDRNSVGSEGSVGSIRSAGSGQSSEGTNGHGPGLLIENAQPLPSAGEDQVLPGLHPPSLADNLSHRPLANCRSGEQIFTQDVRPEQLLEGKDAQAIHNWLSEFQLEGYTAHFLQAGYDVPTISRMTPEDLTAIGVTKPGHRKKIASEIAQLSIAEWLPSYIPTDLLEWLCALGLPQYHKQLVSSGYDSMGLVADLTWEELQEIGVNKLGHQKKLMLGVKRLAELRRGLLQGEALSEGGRRLAKGPELMAIEGLENGEGPATAGPRLLTFQGSELSPELQAAMAGGGPEPLPLPPARSPSQESIGARSRGSGHSQEQPAPQPSGGDPSPPQERNLPEGTERPPKLCSSLPGQGPPPYVFMYPQGSPSSPAPGPPPGAPWAFSYLAGPPATPPDPPRPKRRSHSLSRPGPTEGDAEGEAEGPVGSTLGSYATLTRRPGRSALVRTSPSVTPTPARGTPRSQSFALRARRKGPPPPPPKRLSSVSGPSPEPPPLDESPGPKEGATGPRRRTLSEPAGPSEPPGPPAPAGPASDTEEEEPGPEGTPPSRGSSGEGLPFAEEGNLTIKQRPKPAGPPPRETPVPPGLDFNLTESDTVKRRPKCREREPLQTALLAFGVASATPGPAAPLPSPTPGESPPASSLPQPEPSSLPAQGVPTPLAPSPAMQPPVPPCPGPGLESSAASRWNGETEPPAAPAALLKVPGAGTAPKPVSVACTQLAFSGPKLAPRLGPRPVPPPRPESTGTVGPGQAQQRLEQTSSSLAAALRAAEKSIGTKEQEGTPSASTKHILDDISTMFDALADQLDAMLD

SEQ ID NO: 37584 - protein, 441 aa, Homo sapiens
LLSGWALVFHSQAGKIGVPSPSPSWSCRKPQADIHPDFHVAFTPSKISFPSCGGSSRSTFGSIPQYLTRSPLPGTPDLLPRNREPSKGLWHGALTPQLGPVACLCPGLLSVELSPGASMGREQDLILAVKNGDVTGVQKLVAKVKATKTKLLGSTKRLNVNYQDADGFSALHHAALGGSLELIALLLEAQATVDIKDSNGMRPLHYAAWQGRLEPVRLLLRASAAVNAASLDGQIPLHLAAQYGHYEVSEMLLQHQSNPCLVNKAKKTPLDLACEFGRLKVAQLLLNSHLCVALLEGEAKDPCDPNYTTPLHLAAKNGHREVIRQLLRAGIEINRQTKTGTALHEAALYGKTEVVRLLLEGGVDVNIRNTYNQTALDIVNQFTTSQASREIKQLLREASGILKVRALKDFWNLHDPTALNVRAGDVITVRDPKQAFLCKYK

SEQ ID NO: 37585 - protein, 25 aa, Homo sapiens
VGPPETGRGAGSWERKQGAGPRESG

SEQ ID NO: 37586 - protein, 453 aa, Homo sapiens
VATFYYLCLNLWPLFLAKMSSHHTTFPFDPERRVRSTLKKVFGFDSFKTPLQESATMAVVKGNKDVFVCMPTGAGKSLCYQLPALLAKGITIVVSPLIALIQDQVDHLLTLKVRVSSLNSKLSAQERKELLADLEREKPQTKILYITPEMAASSSFQPTLNSLVSRHLLSYLVVDEAHCVSQWGHDFRPDYLRLGALRSRLGHAPCVALTATATPQVQEDVFAALHLKKPVAIFKTPCFRANLFYDVQFKELISDPYGNLKDFCLKALGQEADKGLSGCGIVYCRTREACEQLAIELSCRGVNAKAYHAGLKASERTLVQNDWMEEKVPVIVATISFGMGVDKANVRFVAHWNIAKSMAGYYQESGRAGRDGKPSWCRLYYSRNDRDQVSFLIRKEVAKLQEKRGNKASDKATIMAFDALVTFCEELGRWGRGHGKSLRAAWCSQVVSRHAEL

SEQ ID NO: 37587 - protein, 162 aa, Homo sapiens
MAGKKNVLSSLAVYAEDSEPESDGEAGIEAVGSAAEEKGGLVSDAYGEDDFSRLGGDEDGYEEEEDENSRQSEDDDSETEKPEADDPKEKLGTVTEAPRAQQAHGPACWTQRAEESHSKHDKRRDSTTSAEPGSTHTPHSFPSPGSQKPQEATGRLLASYFT

SEQ ID NO: 37588 - protein, 1830 aa, Homo sapiens
LAGRGRKRMAGPRPSPWARLLLAALISVSLSGTLANRCKKAPVKSCTECVRVDKDCAYCTDEMFRDRRCNTQAELLAAGCQRESIVVMESSFQITEETQIDTTLRRSQMSPQGLRVRLRPGEERHFELEVFEPLESPVDLYILMDFSNSMSDDLDNLKKMGQNLARVLSQLTSDYTIGFGKFVDKVSVPQTDMRPEKLKEPWPNSDPPFSFKNVISLTEDVDEFRNKLQGERISGNLDAPEGGFDAILQTAVCTRDIGWRPDSTHLLVFSTESAFHYEADGANVLAGIMSRNDERCHLDTTGTYTQYRTQDYPSVPTLVRLLAKHNIIPIFAVTNYSYSYYEKLHTYFPVSSLGVLQEDSSNIVELLEEAFNRIRSNLDIRALDSPRGLRTEVTSKMFQKTRTGSFHIRRGEVGIYQVQLRALEHVDGTHVCQLPEDQKGNIHLKPSFSDGLKMDAGIICDVCTCELQKEVRSARCSFNGDFVCGQCVCSEGWSGQTCNCSTGSLSDIQPCLREGEDKPCSGRGECQCGHCVCYGEGRYEGQFCEYDNFQCPRTSGFLCNDRGRCSMGQCVCEPGWTGPSCDCPLSNATCIDSNGGICNGRGHCECGRCHCHQQSLYTDTICEINYSAIHPGLCEDLRSCVQCQAWGTGEKKGRTCEECNFKVKMVDELKRAEEVVVRCSFRDEDDDCTYSYTMEGDGAPGPNSTVLVHKKKDCPPGSFWWLIPLLLLLLPLLALLLLLCWKYCACCKACLALLPCCNRGHMVGFKEDHYMLRENLMASDHLDTPMLRSGNLKGRDVVRWKVTNNMQRPGFATHAASINPTELVPYGLSLRLARLCTENLLKPDTRECAQLRQEVEENLNEVYRQISGVHKLQQTKFRQQPNAGKKQDHTIVDTVLMAPRSAKPALLKLTEKQVEQRAFHDLKVAPGYYTLTADQDARGMVEFQEGVELVDVRVPLFIRPEDDDEKQLLVEAIDVPAGTATLGRRLVNITIIKEQARDVVSFEQPEFSVSRGDQVARIPVIRRVLDGGKSQVSYRTQDGTAQGNRDYIPVEGELLFQPGEAWKELQVKLLELQEVDSLLRGRQVRRFHVQLSNPKFGAHLGQPHSTTIIIRDPDELDRSFTSQMLSSQPPPHGDLGAPQNPNAKAAGSRKIHFNWLPPSGKPMGYRVKYWIQGDSESEAHLLDSKVPSVELTNLYPYCDYEMKVCAYGAQGEGPYSSLVSCRTHQEVPSEPGRLAFNVVSSTVTQLSWAEPAETNGEITAYEVCYGLVNDDNRPIGPMKKVLVDNPKNRMLLIENLRESQPYRYTVKARNGAGWGPEREAIINLATQPKRPMSIPIIPDIPIVDAQSGEDYDSFLMYSDDVLRSPSGSQRPSVSDDTGCGWKFEPLLGEELDLRRVTWRLPPELIPRLSASSGRSSDAEAPHGPPDDGGAGGKGGSLPRSATPGPPGEHLVNGRMDFAFPGSTNSLHRMTTTSAAAYGTHLSPHVPHRVLSTSSTLTRDYNSLTRSEHSHSTTLPRDYSTLTSVSSHDSRLTAGVPDTPTRLVFSALGPTSLRVSWQEPRCERPLQGYSVEYQLLNGGELHRLNIPNPAQTSVVVEDLLPNHSYVFRVRAQSQEGWGREREGVITIESQVHPQSPLCPLPGSAFTLSTPSAPGPLVFTALSPDSLQLSWERPRRPNGDIVGYLVTCEMAQGGGPATAFRVDGDSPESRLTVPGLSENVPYKFKVQARTTEGFGPEREGIITIESQDGGPFPQLGSRAGLFQHPLQSEYSSITTTHTSATEPFLVDGLTLGAQHLEAGGSLTRHVTQEFVSRTLTTSGTLSTHMDQQFFQT

SEQ ID NO: 37589 - protein, 878 aa, Homo sapiens
MAGPRPSPWARLLLAALISVSLSGTLANRCKKAPVKSCTECVRVDKDCAYCTDEMFRDRRCNTQAELLAAGCQRESIVVMESSFQITEETQIDTTLRRSQMSPQGLRVRLRPGEERHFELEVFEPLESPVDLYILMDFSNSMSDDLDNLKKMGQNLARVLSQLTSDYTIGFGKFVDKVSVPQTDMRPEKLKEPWPNSDPPFSFKNVISLTEDVDEFRNKLQGERISGNLDAPEGGFDAILQTAVCTRDIGWRPDSTHLLVFSTESAFHYEADGANVLAGIMSRNDERCHLDTTGTYTQYRTQDYPSVPTLVRLLAKHNIIPIFAVTNYSYSYYEKLHTYFPVSSLGVLQEDSSNIVELLEEAFNRIRSNLDIRALDSPRGLRTEVTSKMFQKTRTGSFHIRRGEVGIYQVQLRALEHVDGTHVCQLPEDQKGNIHLKPSFSDGLKMDAGIICDVCTCELQKEVRSARCSFNGDFVCGQCVCSEGWSGQTCNCSTGSLSDIQPCLREGEDKPCSGRGECQCGHCVCYGEGRYEGQFCEYDNFQCPRTSGFLCNDRGRCSMGQCVCEPGWTGPSCDCPLSNATCIDSNGGICNGRGHCECGRCHCHQQSLYTDTICEINYSAIHPGLCEDLRSCVQCQAWGTGEKKGRTCEECNFKVKMVDELKRAEEVVVRCSFRDEDDDCTYSYTMEGDGAPGPNSTVLVHKKKDCPPGSFWWLIPLLLLLLPLLALLLLLCWKYCACCKACLALLPCCNRGHMVGFKEDHYMLRENLMASDHLDTPMLRSGNLKGRDVVRWKVTNNMQRPGFATHAASINPTELVPYGLSLRLARLCTENLLKPDTRECAQLRQEVEENLNEVYRQISGVHKLQQTKFRQQPNAGKK

SEQ ID NO: 37590 - protein, 964 aa, Homo sapiens
MAGPRPSPWARLLLAALISVSLSGTLANRCKKAPVKSCTECVRVDKDCAYCTDEMFRDRRCNTQAELLAAGCQRESIVVMESSFQITEETQIDTTLRRSQMSPQGLRVRLRPGEERHFELEVFEPLESPVDLYILMDFSNSMSDDLDNLKKMGQNLARVLSQLTSDYTIGFGKFVDKVSVPQTDMRPEKLKEPWPNSDPPFSFKNVISLTEDVDEFRNKLQGERISGNLDAPEGGFDAILQTAVCTRDIGWRPDSTHLLVFSTESAFHYEADGANVLAGIMSRNDERCHLDTTGTYTQYRTQDYPSVPTLVRLLAKHNIIPIFAVTNYSYSYYEKLHTYFPVSSLGVLQEDSSNIVELLEEAFNRIRSNLDIRALDSPRGLRTEVTSKMFQKTRTGSFHIRRGEVGIYQVQLRALEHVDGTHVCQLPEDQKGNIHLKPSFSDGLKMDAGIICDVCTCELQKEVRSARCSFNGDFVCGQCVCSEGWSGQTCNCSTGSLSDIQPCLREGEDKPCSGRGECQCGHCVCYGEGRYEGQFCEYDNFQCPRTSGFLCNDRGRCSMGQCVCEPGWTGPSCDCPLSNATCIDSNGGICNGRGHCECGRCHCHQQSLYTDTICEINYSAIHPGLCEDLRSCVQCQAWGTGEKKGRTCEECNFKVKMVDELKRAEEVVVRCSFRDEDDDCTYSYTMEGDGAPGPNSTVLVHKKKDCPPGSFWWLIPLLLLLLPLLALLLLLCWKYCACCKACLALLPCCNRGHMVGFKEDHYMLRENLMASDHLDTPMLRSGNLKGRDVVRWKVTNNMQRPGFATHAASINPTELVPYGLSLRLARLCTENLLKPDTRECAQLRQEVEENVRTQELGLAGDVAERGLQADLRCTQAPADQVPAAAQCREKARPHHCGHSADGAPLGQAGPAEAYREAGGTEGLPRPQGGPRLLHPHCRPGRPGHGGVPGGRGAGGRTGAPLYPA

SEQ ID NO: 37591 - protein, 458 aa, Homo sapiens
LPPTTQQLDSHGSCGWGRNRLRSGGGASGRGAGLAGMCAPPRGAPPEHPAPTGLCRSSCAELQARVMAALRQPQVAELLAEARRAFREEFGAEPELAVSAPGRVNLIGEHTDYNQGLVLPMALELMTVLVGSPRKDGLVSLLTTSEGADEPQRLQFPLPTAQRSLEPGTPRWANYVKGVIQYYPAAPLPGFSAVVVSSVPLGGGLSSSASLEVATYTFLQQLCPDSGTIAARAQVCQQAEHSFAGMPCGIMDQFISLMGQKGHALLIDCRSLETSLVPLSDPKLAVLITNSNVRHSLASSEYPVRRRQCEEVARALGKESLREVQLEELEAARDLVSKEGFRRARHVVGEIRRTAQAAAALRRGDYRAFGRLMVESHRSLRDDYEVSCPELDQLVEAALAVPGVYGSRMTGGGFGGCTVTLLEASAAPHAMRHIQEHYGGTATFYLSQAADGAKVLCL

SEQ ID NO: 37592 - protein, 101 aa, Homo sapiens
LVVRWAVLVFRSSTAALPRAAEAARRSEKWPKTSALVREIAQDFKTDLRFQSAAIGALQEASEAYLVGLFEDTNLCAIHAKRVTIMPKDIQLARRIRGERA

SEQ ID NO: 37593 - protein, 165 aa, Homo sapiens
LRQAIKIRRRRVRDLQDPPPQMAPEVGVTSLGRELALGSTVVSGTGALLSGPTSRRLGLGTSDPPLPTPPWGEPPGPAEQGLPDGLWATVGLRPCGLRLSEPLPPGWPDPIPYSSSFRRADSIRWGCPCCGVSCSGSSRPPGRRGTPLTSAAEPHFRCWVRSSRH

SEQ ID NO: 37594 - protein, 163 aa, Homo sapiens [sequence omitted]

SEQ ID NO: 37595 - protein, 227 aa, Homo sapiens
LSLGTPVGETMALNKNHSEGGGVIVNNTESILMSYDHVELTFNDMKNVPEAFKGTKKGTVYLTPYRVIFLSKGKDAMQSFMMPFYLMKDCEIKQPVFGANYIKGTVKAEAGASRGEVPSGAYGYSYMPSGAYVYPPPVANGMYPCPPGYPYPPPPPEFYPGPPMMDGAMGYVQPPPPPYPGPMEPPVSGPDVPSTPAGEGPWVLAALRDQPSPPRCRTESLRMARDC

SEQ ID NO: 37596 - protein, 149 aa, Homo sapiens
LERSLLLSSLLTSALRLAEEQDRVLADSQGPLRVTCWGGGVRGSGAPLHTLIRSLSSHSYQLAQRTFRTFDFYKKHQETMTPAGLSFFQCRWDDSVTYIFHQLLDMREPVFEFVRPPPYHPKQKRFPHRQPLRYLDRYRDSHEPTYGIY

SEQ ID NO: 37597 - protein, 591 aa, Homo sapiens
LLRSRSQAAAAAAAVAAAVAVAAAVAAVDVVPEGKKIKKTNALRPDRRGYCSRRQRRLRKTLNFKMGNRHKFTGKKVTEELLTDNRYLLLVLMDAERAWSYAMQLKQEANTEPRKRFHLLSRLRKAVKHAEELERLCESNRVDAKTKLEAQAYTAYLSGMLRFEHQEWKAAIEAFNKCKTIYEKLASAFTEEQAVLYNQRVEEISPNIRYCAYNIGDQSAINELMQMRLRSGGTEGLLAEKLEALITQTRAKQAATMSEVEWRGRTVPVKIDKVRIFLLGLADNEAAIVQAESEETKERLFESMLSECRDAIQVVREELKPDQKQRDYILEGEPGKVSNLQYLHSYLTYIKLSTAIKRNENMAKGLQRALLQQQPEDDSKRSPRPQDLIRLYDIILQNLVELLQLPGLEEDKAFQKEIGLKTLVFKAYRCFFIAQSYVLVKKWSEALVLYDRVLKYANEVNSDAGAFKNSLKDLPDVQELITQVRSEKCSLQAAAILDANDAHQTETSSSQVKDNKPLVERFETFCLDPSLVTKQANLVHFPPGFQPIPCKPLFFDLALNHVAFPPLEDKLEQKTKSGLTGYIKGIFGFRS

SEQ ID NO: 37598 - protein, 29 aa, Homo sapiens
LTLEAHLHWRWVYFTLCACVLAEGELRVA

SEQ ID NO: 37599 - protein, 43 aa, Homo sapiens
LAFPGLWHIITNWKPAVWGRAGGSLLWKGRAILHGRSVSLYKH

SEQ ID NO: 37600 - protein, 38 aa, Homo sapiens
MPWWMKETSILAIAMYCWVLLRSTQMELSVSSPSNRNK

SEQ ID NO: 37601 - protein, 437 aa, Homo sapiens
VVWGAQGHGPRSSPRLRRVSQRLPHPNRGLAVGSTQSAAPRGAGRNRAAGRTMPKKLLLLPPPSASSAFRVPRARPVPPPAMNAARTGYRVFSANSTAACTELAKRITERLGAELGKSVVYQETNGETRVEIKESVRGQDIFIIQTIPRDVNTAVMELLIMAYALKTACARNIIGVIPYFPYSKQSKMRKRGSIVCKLLASMLAKAGLTHIITMDLHQKEIQGFFSFPVDNLRASPFLLQYIQEEIPNYRNAVIVAKSPDAAKRAQSYAERLRLGLAVIHGEAQCTELDMDDGRHSPPMVKNATVHPGLELPLMMAKEKPPITVVGDVGGRIAIIVDDIIDDVESFVAAAEILKERGAYKIYVMATHGILSAEAPRLIEESSVDEVVVTNTVPHEVQKLQCPKIKTVDISLILSEAIRRIHNGESMAYLFRNITVDD

SEQ ID NO: 37602 - protein, 47 aa, Homo sapiens
LDPAGTARGPRKAKAHPPIRARSCGPRDPASQPVPPDPPGDSRVPPV

SEQ ID NO: 37603 - protein, 20 aa, Homo sapiens
MATPVGVEHGEQSQAFSDDD

SEQ ID NO: 37604 - protein, 91 aa, Homo sapiens
LPSGATATWPAASRSRSLAARSLPRSPARPGPNDALLGEHDFRGQGVRAQRFRFSEEPGPGADGAVLEVHVPQVRAAAPARRRLRSGADVG

SEQ ID NO: 37605 - protein, 118 aa, Homo sapiens
LPSGATATWPAASRSRSLAARSLPRSPARPGPNDALLGEHDFRGQGVRAQRFRFSEEPGPGADGAVLEVHVPQVRAAAPARRRLRSCISSMECMFGPVLWSWPSTFGFTEDLCQARPS

SEQ ID NO: 37606 - protein, 89 aa, Homo sapiens
LPSGATATWPAASRSRSLAARSLPRSPARPGPNDALLGEHDFRGQGVRAQRFRFSEEPGPGADGAVLEVHVPQVRAAAPARRRLRLELE

SEQ ID NO: 37607 - protein, 218 aa, Homo sapiens
LPSGATATWPAASRSRSLAARSLPRSPARPGPNDALLGEHDFRGQGVRAQRFRFSEEPGPGADGAVLEVHVPQVLHLQYGMYVWPCAVVLAQYLWFHRRSLPGKAILEIGAGVSLPGILAAKCGAEVILSDSSELPHCLEVCRQSCQMNNLPHLQVVGLTWGHISWDLLALPPQDIILASDVFFEPEDFEDILATIYFLMHKNPKVQLWSTYQVRRQC

SEQ ID NO: 37608 - protein, 235 aa, Homo sapiens
LPSGATATWPAASRSRSLAARSLPRSPARPGPNDALLGEHDFRGQGVRAQRFRFSEEPGPGADGAVLEVHVPQIGAGVSLPGILAAKCGAEVILSDSSELPHCLEVCRQSCQMNNLPHLQVVGLTWGHISWDLLALPPQDIILASDVFFEPEDFEDILATIYFLMHKNPKVQLWSTYQVRSADWSLEALLYKWDMKCVHIPLESFDADKEDIAESTLPGRHTVEMLVISFAKDSL

SEQ ID NO: 37609 - protein, 270 aa, Homo sapiens
LPSGATATWPAASRSRSLAARSLPRSPARPGPNDALLGEHDFRGQGVRAQRFRFSEEPGPGADGAVLEVHVPQVLHLQYGMYVWPCAVVLAQYLWFHRRSLPGKAILEIGAGVSLPGILAAKCGAEVILSDSSELPHCLEVCRQSCQMNNLPHLQVVGLTWGHISWDLLALPPQDIILASDVFFEPEDFEDILATIYFLMHKNPKVQLWSTYQVRSADWSLEALLYKWDMKCVHIPLESFDADKEDIAESTLPGRHTVEMLVISFAKDSL

SEQ ID NO: 37610 - protein, 67 aa, Homo sapiens
LAARSLPRSPARPGPNDALLGEHDFRGQGVRAQRFRFSEEPGPGADGAVLEVHVPQILKTFWLQYIF

SEQ ID NO: 37611 - protein, 166 aa, Homo sapiens
LAARSLPRSPARPGPNDALLGEHDFRGQGVRAQRFRFSEEPGPGADGAVLEVHVPQIGAGVSLPGILAAKCGAEVILSDSSELPHCLEVCRQSCQMNNLPHLQVVGLTWGHISWDLLALPPQDIILASDVFFEPEDFEDILATIYFLMHKNPKVQLWSTYQVRRQC

SEQ ID NO: 37612 - protein, 26 aa, Homo sapiens
LMSPRQHLNSYETKIKIRITSTWIVP

SEQ ID NO: 37613 - protein, 35 aa, Homo sapiens
VAVPGGCGVSPGGGRSAPFAPAARGRPARPRPWHP

SEQ ID NO: 37614 - protein, 46 aa, Homo sapiens
LLFAGVRFPTPFRQSPRAPSALRPGGLSVASPRGELTALGCCLRQS

SEQ ID NO: 37615 - protein, 61 aa, Homo sapiens
LAVGTPRGALARARPPGTTFPSGPSGRRRGCGQVTRSPGRRLSVASPRGELTALGCCLRQS

SEQ ID NO: 37616 - protein, 43 aa, Homo sapiens
LALLRGLCSSVLGSLLRSILTAGLSVASPRGELTALGCCLRQS

SEQ ID NO: 37617 - protein, 51 aa, Homo sapiens
LPVVYFTASVFIGIAAAVLWTAQGNCLTINSDEHSIGRNSGIFWALLQSRE

SEQ ID NO: 37618 - protein, 19 aa, Homo sapiens
MKDFGSRQEFDSVSWFPRV

SEQ ID NO: 37619 - protein, 610 aa, Homo sapiens
VFLEEEEEEEEAERGRATGVRKGRPPLSGTPGLPPLLNISVGMERDRISALKRSFEVEEVETPNSTPPRRVQTPLLRATVASSTQKFQDLGVKNSEPSARHVDSLSQRSPKASLRRVELSGPKAAEPVSRRTELSIDISSKQVENAGAIGPSRFGLKRAEVLGHKTPEPAPRRTEITIVKPQESAHRRMEPPASKVPEVPTAPATDAAPKRVEIQMPKPAEAPTAPSPAQTLENSEPAPVSQLQSRLEPKPQPPVAEATPRSQEATEAAPSCVGDMADTPRDAGLKQAPASRNEKAPVDFGYVGIDSILEQMRRKAMKQGFEFNIMVVGQSGLGKSTLINTLFKSKISRKSVQPTSEERIPKTIEIKSITHDIEEKGVRMKLTVIDTPGFGDHINNENCWQPIMKFINDQYEKYLQEEVNINRKKRIPDTRVHCCLYFIPATGHSLRPLDIEFMKRLSKVVNIVPVIAKADTLTLEERVHFKQRITADLLSNGIDVYPQKEFDEDSEDRLVNEKFREMIPFAVVGSDHEYQVNGKRILGRKTKWGTIEVENTTHCEFAYLRDLLIRTHMQNIKDITSSIHFEAYRVKRLNEGSSAMANGMEEKEPEAPEM

SEQ ID NO: 37620 - protein, 579 aa, Homo sapiens
VALSKPLGSSGPQFRHLQALKRSFEVEEVETPNSTPPRRVQTPLLRATVASSTQKFQDLGVKNSEPSARHVDSLSQRSPKASLRRVELSGPKAAEPVSRRTELSIDISSKQVENAGAIGPSRFGLKRAEVLGHKTPEPAPRRTEITIVKPQESAHRRMEPPASKVPEVPTAPATDAAPKRVEIQMPKPAEAPTAPSPAQTLENSEPAPVSQLQSRLEPKPQPPVAEATPRSQEATEAAPSCVGDMADTPRDAGLKQAPASRNEKAPVDFGYVGIDSILEQMRRKAMKQGFEFNIMVVGQSGLGKSTLINTLFKSKISRKSVQPTSEERIPKTIEIKSITHDIEEKGVRMKLTVIDTPGFGDHINNENCWQPIMKFINDQYEKYLQEEVNINRKKRIPDTRVHCCLYFIPATGHSLRPLDIEFMKRLSKVVNIVPVIAKADTLTLEERVHFKQRITADLLSNGIDVYPQKEFDEDSEDRLVNEKFREMIPFAVVGSDHEYQVNGKRILGRKTKWGTIEVENTTHCEFAYLRDLLIRTHMQNIKDITSSIHFEAYRVKRLNEGSSAMANGMEEKEPEAPEM

SEQ ID NO: 37621 - protein, 14 aa, Homo sapiens
LSHQMGAPEVAPRL

SEQ ID NO: 37622 - protein, 27 aa, Homo sapiens
VQMKGPALQPGGWICKELLSGRGGSCL

SEQ ID NO: 37623 - protein, 115 aa, Homo sapiens
LRLLSQSLLGREGRYLLPRRTEGGTWLGSKFTKALPSSTPRQDSPHFWRLLLPPPYLIAIWLCPQHALKLFSLSDGDAPSSQMQWELFCPWLDSGCHPTEVISPPWPPKVLGLQE

SEQ ID NO: 37624 - protein, 121 aa, Homo sapiens
VAAHLLDIFARLCLLMFHRQWSVLAEAAAPGWGYQESGGWWPHVPQVVSRCIAGGSGQAIPCFSGLTPPLCPSPPSPASSAGPLHLLALPVLRKEEVTPPSHLSLLWNSRGWPYCAPLPCE

SEQ ID NO: 37625 - protein, 34 aa, Homo sapiens [sequence omitted]

SEQ ID NO: 37626 - protein, 217 aa, Homo sapiens
LLKNRGRRRRRLGIISQPGGGDAMPGAGITMPLARLAPCCLIRAKAVSEKEVDSGNDIYGNPIKRIQYEIKQIKMFKGPEKDIEFIYTAPSSAVCGVSLDVGGKKEYLIAGKAEGDGKMHITLCDFIVPWDTLSTTQKKSLNHRYQMGCECKITRCPMIPCYISSPDECLWMDWVTEKNINGHQAKFFACIKRSDGSCAWYRGAAPPKQEFLDIEDP

SEQ ID NO: 37627 - protein, 215 aa, Homo sapiens
VEGGGGGWASSLSLEEETPCRGLGSPCPLPVSHLAAVCNPPAPPAGLDVLSLSLAPGACFRNSPHLCVLCFAVIRAKAVSEKEVDSGNDIYGNPIKRIQYEIKQIKMFKGPEKDIEFIYTAPSSAVCGVSLDVGGKKEYLIAGKAEGDGKMHITLCDFIVPWDTLSTTQKKSLNHRYQMGCECKVSRSCLCWSIASSQCLQMDGRDFDPWLSRTR

SEQ ID NO: 37628 - protein, 466 aa, Homo sapiens
MVTCGWPMGAPPTRAAWRSSTEALGQIFDSQRGCDLSISVNVQGEDALGFCGHTVILTANLEAQALWKEPGSNVTMSVDAECVPMVRDLLRYFYSRRIDITLSSVKCFHKLASAYGARQLQGYCASLFAILLPQDPSFQMPLDLYAYAVATGDALLEKLCLQFLAWNFEALTQAEAWPSVPTDLLQLLLPRSDLAVPSELALLKAVDTWSWGERASHEEVEGLVEKIRFPMMLPEELFELQFNLSLYWSHEALFQKKTLQALEFHTVPFQLLARYKGLNLTEDTYKPRIYTSPTWSAFVTDSSWSARKSQLVYQSRRGPLVKYSSDYFQAPSDYRYYPYQSFQTPQHPSFLFQDKRVSWSLVYLPTIQSCWNYGFSCSSDELPVLGLTKSGGSDRTIAYENKALMLCEGLFVADVTDFEGWKAAIPSALDTNSSKSTSSFPCPAGHFNGFRTVIRPFYLTNSSGVD

SEQ ID NO: 37629 - protein, 625 aa, Homo sapiens
LGEASGSKDQSAEGSCGWKRGGSTRPLQLPQPGSGHPGTAMTPPRLFWVWLLVAGTQGVNDGDMRLADGGATNQGRVEIFYRGQWGTVCDNLWDLTDASVVCRALGFENATQALGRAAFGQGSGPIMLDEVQCTGTEASLADCKSLGWLKSNCRHERDAGVVCTNETRSTHTLDLSRELSEALGQIFDSQRGCDLSISVNVQGEDALGFCGHTVILTANLEAQALWKEPGSNVTMSVDAECVPMVRDLLRYFYSRRIDITLSSVKCFHKLASAYGARQLQGYCASLFAILLPQDPSFQMPLDLYAYAVATGDALLEKLCLQFLAWNFEALTQAEAWPSVPTDLLQLLLPRSDLAVPSELALLKAVDTWSWGERASHEEVEGLVEKIRFPMMLPEELFELQFNLSLYWSHEALFQKKTLQALEFHTVPFQLLARYKGLNLTEDTYKPRIYTSPTWSAFVTDSSWSARKSQLVYQSRRGPLVKYSSDYFQAPSDYRYYPYQSFQTPQHPSFLFQDKRVSWSLVYLPTIQSCWNYGFSCSSDELPVLGLTKSGGSDRTIAYENKALMLCEGLFVADVTDFEGWKAAIPSALDTNSSKSTSSFPCPAGHFNGFRTVIRPFYLTNSSGVD

SEQ ID NO: 37630 - protein, 39 aa, Homo sapiens
VPASLAPVVSVMGILPCVTWSDLVCSCGLTDTLKTPAQP

SEQ ID NO: 37631 - protein, 602 aa, Homo sapiens
LCGASGGGGGGASAGAAAGRRRELAASAAAPAASAPARSGSAMELPAVGEHVFAVESIEKKRIRKGRVEYLVKWRGWSPKYNTWEPEENILDPRLLIAFQNRERQEQLMGYRKRGPKPKPLVVQVPTFARRSNVLTGLQDSSTDNRAKLDLGAQGKGQGHQYELNSKKHHQYQPHSKERAGKPPPPGKSGKYYYQLNSKKHHPYQPDPKMYDLQYQGGHKEAPSPTCPDLGAKSHPPDKWAQGAGAKGYLGAVKPLAGAAGAPGKGSEKGPPNGMMPAPKEAVTGNGIGGKMKIVKNKNKNGRIVIVMSKYMENGMQAVKIKSGEVAEGEARSPSHKKRAADERHPPADRTFKKAAGAEEKKVEAPPKRREEEVSGVSDPQPQDAGSRKLSPTKEAFGEQPLQLTTKPDLLAWDPARNTHPPSHHPHPHPHHHHHHHHHHHHAVGLNLSHVRKRCLSETHGEREPCKKRLTARSISTPTCLGGSPAAERPADLPPAAALPQPEVILLDSDLDEPIDLRCVKTRSEAGEPPSSLQVKPETPASAAVAVAAAAAPTTTAEKPPAEAQDEPAESLSEFKPFFGNIIITDVTANCLTVTFKEYVTV

SEQ ID NO: 37632 - protein, 102 aa, Homo sapiens
LCGASGGGGGGASAGAAAGRRRELAASAAAPAASAPARSGSAMELPAVGEHVFAVESIEKKRIRKGRVEYLVKWRGWSPKYNTWEPEENILDPRLLIAFQNS

SEQ ID NO: 37633 - protein, 102 aa, Homo sapiens
LCGASGGGGGGASAGAAAGRRRELAASAAAPAASAPARSGSAMELPAVGEHVFAVESIEKKRIRKGRVEYLVKWRGWSPKYNTWEPEENILDPRLLIAFQNR

SEQ ID NO: 37634 - protein, 108 aa, Homo sapiens
MATTATMATSGSARKRLLKEEDMTKVEFETSEEVDVTPTFDTMGLREDLLRGIYAYGFEKPSAIQQRAIKQIIKGRDVIAQSQSGTGKTATFSISVLQCLDIQVICHS

SEQ ID NO: 37635 - protein, 11 aa, Homo sapiens
MPVLWLGLILR

SEQ ID NO: 37636 - protein, 117 aa, Homo sapiens [sequence omitted]

SEQ ID NO: 37637 - protein, 273 aa, Homo sapiens [sequence omitted]

SEQ ID NO: 37638 - protein, 96 aa, Homo sapiens [sequence omitted]

SEQ ID NO: 37639 - protein, 14 aa, Homo sapiens
MKLKPWSRDRTCSI

SEQ ID NO: 37640 - protein, 1187 aa, Homo sapiens
MRRVVLLLGLLNEDDACHASFLRVSKMRLSVFLKKQEESQFHPLEWLAREACNQDALQEAGTFRHTLWKRVQGAVTPLLASMISFIDRDGNLELLTRPDTPPWARDLWMFIFSDTMLLNIPLVMNNERHKGEMAYIVVQNHMNLSENASNNVPFSWKIKDYLEELWVQAQYITDAEGLPKKFVDIFQQTPLGRFLAQLHGEPQQELLQCYLKDFILLTMRVSTEEELKFLQMALWSCTRKLKAASEAPEEEVSLPWVHLAYQRFRSRLQNFSRILTIYPQVLHSLMEARWNHELAGCEMTLDAFAAMACTEMLTRNTLKPSPQAWLQLVKNLSMPLELICSDEHMQGSGSLAQAVIREVRAQWSRIFSTALFVEHVLLGTESRVPELQGLVTEHVFLLDKCLRENSDVKTHGPFEAVMRTLCECKETASKTLSRFGIQPCSICLGDAKDPVCLPCDHVHCLRCLRAWFASEQMICPYCLTALPDEFSPAVSQAHREAIEKHARFRQMCNSFFVDLVSTICFKDNAPPEKEVIESLLSLLFVQKGRLRDAAQRHCEHTKSLSPFNDVVDKTPVIRSVILKLLLKYSFHDVKDYIQEYLTLLKKKAFITEDKTELYMLFINCLEDSILEKTSAYSRNDELNHLEEEGRFLKAYSPASRGREPANEASVEYLQEVARIRLCLDRAADFLSEPEGGPEMAKEKQCYLQQVKQFCIRVENDWHRVYLVRKLSSQRGMEFVQGLSKPGRPHQWVFPKDVVKQQGLRQDHPGQMDRYLVYGDEYKALRDAVAKAVLECKPLGIKTALKACKTPQSQQSAYFLLTLFREVAILYRSHNASLHPTPEQCEAVSKFIGECKILSPPDISRFATSLVDNSVPLLRAGPSDSNLDGTVTEMAIHAAAVLLCGQNELLEPLKNLAFSPATMAHAFLPTMPEDLLAQARRWKGLERVHWYTCPNGHPCSVGECGRPMEQSICIDCHAPIGGIDHKPRDGFHLVKDKADRTQTGHVLGNPQRRDVVTCDRGLPPVVFLLIRLLTHLALLLGASQSSQALINIIKPPVRDPKGFLQQHILKDLEQLAKMLGHSADETIGVVHLVLRRLLQEQHQLSSRSEERGKGWAGITQHNGSASRLAVLWATPHTASLSSVCAVAGKNERTHREKTVSREGDAWGWKKEALCLPRGWKELLCSLHSPLPG

SEQ ID NO: 37641 - protein, 559 aa, Homo sapiens
LGNLHIWSFFVGLLNFDTELSTKEMRNNWEKEIAAVISPELEHLDKTLPTMNNLISQDKRISSNPVAKIIYGDPVTFLPHLPRKSVVHCSKIWSCRKRITVEYLQHIVEQKNGKERVPILWHFLQKEAELRLVKFLPEILALQRDLVKQFQNVQQVEYSSIRGFLSKHSSDGLRQLLHNRITVFLSTWNKLRRSLETNGEINLPKDYCSTDLDLDTEFEILLPRRRGLGLCATALVSYLIRLHNEIVYAVEKLSKENNSYSVDAAEVTELHVISYEVERDLTPLILSNCQYQVEEGRETVQEFDLEKIQRQIVSRFLQGKPRLSLKGIPTLVYRHDWNYEHLFMDIKNKMAQDSLPSSVISAISGQLQSYSDACEVLSVVEVTLGFLSTAGGDPNMQLNVYTQDILQMGDQTIHVLKALNRCQLKHTIALWQFLSAHKSEQLLRLHKEPFGEISSRYKADLSPENAKLLSTFLNQTGLDAFLLELHEMIILKLKNPQTQTEERFRPQWSLRDTLVSYMQTKESEILPEMASQFPEEILLASCVSVWKTAAVLKWNREMR

SEQ ID NO: 37642 - protein, 51 aa, Homo sapiens
LLLLWNILSRAHALFVCVCTVHPSDCDSSEDISRPVLRMTFSSTATVSLSY

SEQ ID NO: 37643 - protein, 112 aa, Homo sapiens
LEPSAHGAEQSCSHAGALQEDSRASPGDLEPERTQAPLACSQSGLTLDRAQLLPVVGSPGGRGPGPTPLVLFPCSPSPAWLALVCEEDTSRPWGPRASSCSSLLPLAGAGFR

SEQ ID NO: 37644 - protein, 172 aa, Homo sapiens
LVGVGVLVVSAALPQALREGPWDPRHPRLASAPHPGVGLAPPQPRVKTLLEGRAPRGPRPTLPSPAQPSPALPGAAAREAGGGARASSWQPHRLRGPGPLPPPPLDPRPPALPGCGWTRLRGARGCLSRDHQGPPGALPGNPHPWPQRSGATRVSPWLPAMGPRANPGRTQE

SEQ ID NO: 37645 - protein, 60 aa, Homo sapiens
VAAAGRRALWFGSAFVSVLLPLPPLLPPLASPAPVCGAAGTQDHVSVSLRGDAPAHGKCL

SEQ ID NO: 37646 - protein, 602 aa, Homo sapiens
LGSRESPDRSPSQTPLLGFTRLQGTLPLASPTVGRGRPHTTRARCWRLVCSILSKARGLTLVSVQAHGPCDLSACVAVIPSMGQQRKEGMAVCFPCGCLEARLSDVPDSCSALAPGSRGCTRACGATAHQSGGGGPSCTAGTPGVSCPSALALPCLLFRVHVLELTADVFSLHVQLKSFHNELLTQLEQKVELDSRYLSAALKKYQTEQRSKGDALDKCQAELKKLRKKSQGSKNPQKYSDKELQYIDAISNKQGELENYVSDGYKTALTEERRRFCFLVEKQCAVAKNSAAYHSKGKELLAQKLPLWQQACADPSKIPERAVQLMQQVASNGATLPSALSASKSNLVISDPIPGAKPLPVPPELAPFVGRMSAQESTPIMNGVTGPDGEDYSPWADRKAAQPKSLSPPQSQSKLSDSYSNTLPVRKSVTPKNSYATTENKTLPRSSSMAAGLERNGRMRVKAIFSHAAGDNSTLLSFKEGDLITLLVPEARDGWHYGESEKTKMRGWFPFSYTRVLDSDGSDRLHMSLQQGKSSSTGNLLDKDDLAIPPPDYGAASRAFPAQTASGFKQRPYSVAVPAFSQGLDDYGARSMSSADVEVARF

SEQ ID NO: 37647 - protein, 1102 aa, Homo sapiens
LSPGLGAVLGVAGRQVADPRFGRDWFRIPSPPAESAGPARQAGFAAAPPARAGPALSTMKGTRAIGSVPERSPAGVDLSLTGLPPPVSRRPGSAATTKPIVRSVSVVTGSEQKRKVLEATGPGGSQAINNLRRSNSTTQVSQPRSGSPRPTEPTDFLMLFEGSPSGKKRPASLSTAPSEKGATWNVLDDQPRGFTLPSNARSSSALDSPAGPRRKECTVALAPNFTANNRSNKGAVGNCVTTMVHNRYTPSERAPPLKSSNQTAPSLNNIIKAATCEGSESSGFGKLPKNVSSATHSARNNTGGSTGLPRRKEVTEEEAERFIHQVNQATVTIQRWYRHQVQRRGAGAARLEHLLQAKREEQRQRSGEGTLLDLHQQKEAARRKAREEKARQARRAAIQELQQKRALRAQKASTAERGPPENPRETRVPGMRQPAQELSPTPGGTAHQALKANNTGGGLPAAGPGDRCLPTSDSSPEPQQPPEDRTQDVLAQDAAGDNLEMMAPSRGSAKSRGPLEELLHTLQLLEKEPDVLPRPRTHHRGRYAWASEEDDASSLTADNLEKFGKLSAFPEPPEDGTLLSEAKLQSIMSFLDEMEKSGQDQLDSQQEGWVPEAGPGPLELGSEVSTSVMRLKLEVEEKKQAMLLLQRALAQQRDLTARRVKETEKALSRQLQRQREHYEATIQRHLAFIDQLIEDKKVLSEKCEAVVAELKQEDQRCTERVAQAQAQHELEIKKLKELMSATEKARREKWISEKTKKIKEVTVRGLEPEIQKLIARHKQEVRRLKSLHEAELLQSDERASQRCLRQAEELREQLEREKEALGQQERERARQRQRAELEELRQQLEESSSALTRALRAEFEKGREEQERRHQMELNTLKQQLELERQAWEAGRTRKEEAWLLNREQELREEIRKGRDKEIELVIHRLEADMALAKEESEKAAESRIKRLRDKYEAELSELEQSERKLQERCSELKGQLGEAEGENLRLQGLVRQKERALEDAQAVNEQLSSERSNLAQVIRQEFEDRLAASEEETRQAKAELATLQARQQLELEEVHRRVKTALARKEEAVSSLRTQHEAAVKRADHLEELLEQHRRPTPSTK

SEQ ID NO: 37648 - protein, 1138 aa, Homo sapiens
LSPGLGAVLGVAGRQVADPRFGRDWFRIPSPPAESAGPARQAGFAAAPPARAGPALSTMKGTRAIGSVPERSPAGVDLSLTGLPPPVSRRPGSAATTKPIVRSVSVVTGSEQKRKVLEATGPGGSQAINNLRRSNSTTQVSQPRSGSPRPTEPTDFLMLFEGSPSGKKRPASLSTAPSEKGATWNVLDDQPRGFTLPSNARSSSALDSPAGPRRKECTVALAPNFTANNRSNKGAVGNCVTTMVHNRYTPSERAPPLKSSNQTAPSLNNIIKAATCEGSESSGFGKLPKNVSSATHSARNNTGGSTGLPRRKEVTEEEAERFIHQVNQATVTIQRWYRHQVQRRGAGAARLEHLLQAKREEQRQRSGEGTLLDLHQQKEAARRKAREEKARQARRAAIQELQQKRALRAQKASTAERGPPENPRETRVPGMRQPAQELSPTPGGTAHQALKANNTGGGLPAAGPGDRCLPTSDSSPEPQQPPEDRTQDVLAQDAAGDNLEMMAPSRGSAKSRGPLEELLHTLQLLEKEPDVLPRPRTHHRGRYAWASEEDDASSLTADNLEKFGKLSAFPEPPEDGTLLSEAKLQSIMSFLDEMEKSGQDQLDSQQEGWVPEAGPGPLELGSEVSTSVMRLKLEVEEKKQAMLLLQRALAQQRDLTARRVKETEKALSRQLQRQREHYEATIQRHLAFIDQLIEDKKVLSEKCEAVVAELKQEDQRCTERVAQAQAQHELEIKKLKELMSATEKARREKWISEKTKKIKEVTVRGLEPEIQKLIARHKQEVRRLKSLHEAELLQSDERASQRCLRQAEELREQLEREKEALGQQERERARQRFQQHLEQEQWALQQQRQRLYSEVAEERERLGQQAARQRAELEELRQQLEESSSALTRALRAEFEKGREEQERRHQMELNTLKQQLELERQAWEAGRTRKEEAWLLNREQELREEIRKGRDKEIELVIHRLEADMALAKEESEKAAESRIKRLRDKYEAELSELEQSERKLQERCSELKGQLGEAEGENLRLQGLVRQKERALEDAQAVNEQLSSERSNLAQVIRQEFEDRLAASEEETRQAKAELATLQARQQLELEEVHRRVKTALARKEEAVSSLRTQHEAAVKRADHLEELLEQHRRPTPSTK

SEQ ID NO: 37649 - protein, 1105 aa, Homo sapiens
LSPGLGAVLGVAGRQVADPRFGRDWFRIPSPPAESAGPARQAGFAAAPPARAGPALSTMKGTRAIGSVPERSPAGVDLSLTGLPPPVSRRPGSAATTKPIVRSVSVVTGSEQKRKVLEATGPGGSQAINNLRRSNSTTQVSQPRSGSPRPTEPTDFLMLFEGSPSGKKRPASLSTAPSEKGATWNVLDDQPRGFTLPSNARSSSALDSPAGPRRKECTVALAPNFTANNRSNKGAVGNCVTTMVHNRYTPSERAPPLKSSNQTAPSLNNIIKAATCEGSESSGFGKLPKNVSSATHSARNNTGGSTGLPRRKEVTEEEAERFIHQVNQATVTIQRWYRHQVQRRGAGAARLEHLLQAKREEQRQRSGEGTLLDLHQQKEAARRKAREEKARQARRAAIQELQQKRALRAQKASTAERGPPENPRETRVPGMRQPAQELSPTPGGTAHQALKANNTGGGLPAAGPGDRCLPTSDSSPEPQQPPEDRTQDVLAQDAAGDNLEMMAPSRGSAKSRGPLEELLHTLQLLEKEPDVLPRPRTHHRGRYAWASEVTTEDDASSLTADNLEKFGKLSAFPEPPEDGTLLSEAKLQSIMSFLDEMEKSGQDQLDSQQEGWVPEAGPGPLELGSEVSTSVMRLKLEVEEKKQAMLLLQRALAQQRDLTARRVKETEKALSRQLQRQREHYEATIQRHLAFIDQLIEDKKVLSEKCEAVVAELKQEDQRCTERVAQAQAQHELEIKKLKELMSATEKARREKWISEKTKKIKEVTVRGLEPEIQKLIARHKQEVRRLKSLHEAELLQSDERASQRCLRQAEELREQLEREKEALGQQERERARQRQRAELEELRQQLEESSSALTRALRAEFEKGREEQERRHQMELNTLKQQLELERQAWEAGRTRKEEAWLLNREQELREEIRKGRDKEIELVIHRLEADMALAKEESEKAAESRIKRLRDKYEAELSELEQSERKLQERCSELKGQLGEAEGENLRLQGLVRQKERALEDAQAVNEQLSSERSNLAQVIRQEFEDRLAASEEETRQAKAELATLQARQQLELEEVHRRVKTALARKEEAVSSLRTQHEAAVKRADHLEELLEQHRRPTPSTK

SEQ ID NO: 37650 - protein, 86 aa, Homo sapiens
LRIHPCGKWHLIMVGALVPFQLPILLKGTSDDDVPCPGYLFEEIAKISHESPGSSQCLLEYLLSRLHSSSGHGKLKVSPWVVKGQA

SEQ ID NO: 37651 - protein, 18 aa, Homo sapiens
LWHRFQNVLAVVLLQLLV

SEQ ID NO: 37652 - protein, 53 aa, Homo sapiens
MVSSPRSWSGTSLLGRSRQSRGGSPHPGHPSAQAPASAGRPNYRREKYVETLG

SEQ ID NO: 37653 - protein, 73 aa, Homo sapiens
MGSLESLLWKRCIYSATVSTLKIPIGIQNKVTFTDLIVLHSVVSRKQPPTMDPHSGRWLGARPPAEKPSPPAC

SEQ ID NO: 37654 - protein, 86 aa, Homo sapiens
VCACVAIFVLGFPLEMHCSQPSWVPTGAPGTTEASRGRGQRPREGQVGPLTAPSDLLGGRPCKMKVGQVYLLSVHLLEKKCWSRGW

SEQ ID NO: 37655 - protein, 266 aa, Homo sapiens
LSLTKPPLVPSQIMFETFNTPAMYVAIQAVLSLYASGRTTGIVMDSGDGVTHTVPIYEGYALPHAILRLDLAGRDLTDYLMKILTERGYSFTTTAEREIVRDIKEKLCYVALDFEQEMATAASSSSLEKSYELPDGQVITIGNERFRCPEALFQPSFLGMESCGIHETTFNSIMKCDVDIRKDLYANTVLSGGTTMYPGIADRMQKEITALAPSTMKIKIIAPPERKYSVWIGGSILASLSTFQQMWISKQEYDESGPSIVHRKCF

SEQ ID NO: 37656 - protein, 336 aa, Homo sapiens
LQGVMVGMGQKDSYVGDEAQSKRGILTLKYPIEHGIVTNWDDMEKIWHHTFYNELRVAPEEHPVLLTEAPLNPKANREKMTQIMFETFNTPAMYVAIQAVLSLYASGRTTGIVMDSGDGVTHTVPIYEGYALPHAILRLDLAGRDLTDYLMKILTERGYSFTTTAEREIVRDIKEKLCYVALDFEQEMATAASSSSLEKSYELPDGQVITIGNERFRCPEALFQPSFLGMESCGIHETTFNSIMKCDVDIRKDLYANTVLSGGTTMYPGIADRMQKEITALAPSTMKIKIIAPPERKYSVWIGGSILASLSTFQQMWISKQEYDESGPSIVHRKCF

SEQ ID NO: 37657 - protein, 398 aa, Homo sapiens
VAVGRGPCYRRARLSPSFSGQVAMEEEIAALVIDNGSGMCKAGFAGDDAPRAVFPSIVGRPRHQGVMVGMGQKDSYVGDEAQSKRGILTLKYPIEHGIVTNWDDMEKIWHHTFYNELRVAPEEHPVLLTEAPLNPKANREKMTQIMFETFNTPAMYVAIQAVLSLYASGRTTGIVMDSGDGVTHTVPIYEGYALPHAILRLDLAGRDLTDYLMKILTERGYSFTTTAEREIVRDIKEKLCYVALDFEQEMATAASSSSLEKSYELPDGQVITIGNERFRCPEALFQPSFLGMESCGIHETTFNSIMKCDVDIRKDLYANTVLSGGTTMYPGIADRMQKEITALAPSTMKIKIIAPPERKYSVWIGGSILASLSTFQQMWISKQEYDESGPSIVHRKCF

SEQ ID NO: 37658 - protein, 408 aa, Homo sapiens
LDVAGLRPPTPAGPASSCRGLVAPSPGTKGGVAMEEEIAALVIDNGSGMCKAGFAGDDAPRAVFPSIVGRPRHQGVMVGMGQKDSYVGDEAQSKRGILTLKYPIEHGIVTNWDDMEKIWHHTFYNELRVAPEEHPVLLTEAPLNPKANREKMTQIMFETFNTPAMYVAIQAVLSLYASGRTTGIVMDSGDGVTHTVPIYEGYALPHAILRLDLAGRDLTDYLMKILTERGYSFTTTAEREIVRDIKEKLCYVALDFEQEMATAASSSSLEKSYELPDGQVITIGNERFRCPEALFQPSFLGMESCGIHETTFNSIMKCDVDIRKDLYANTVLSGGTTMYPGIADRMQKEITALAPSTMKIKIIAPPERKYSVWIGGSILASLSTFQQMWISKQEYDESGPSIVHRKCF

SEQ ID NO: 37659 - protein, 379 aa, Homo sapiens
LPVAMEEEIAALVIDNGSGMCKAGFAGDDAPRAVFPSIVGRPRHQGVMVGMGQKDSYVGDEAQSKRGILTLKYPIEHGIVTNWDDMEKIWHHTFYNELRVAPEEHPVLLTEAPLNPKANREKMTQIMFETFNTPAMYVAIQAVLSLYASGRTTGIVMDSGDGVTHTVPIYEGYALPHAILRLDLAGRDLTDYLMKILTERGYSFTTTAEREIVRDIKEKLCYVALDFEQEMATAASSSSLEKSYELPDGQVITIGNERFRCPEALFQPSFLGMESCGIHETTFNSIMKCDVDIRKDLYANTVLSGGTTMYPGIADRMQKEITALAPSTMKIKIIAPPERKYSVWIGGSILASLSTFQQMWISKQEYDESGPSIVHRKCF

SEQ ID NO: 37660 - protein, 438 aa, Homo sapiens
LPALALCSSAAPPSRFSAGERPAPGPELDVAGLRPPTPAGPASSCRGLVAPSPGTKGGVGRVAMEEEIAALVIDNGSGMCKAGFAGDDAPRAVFPSIVGRPRHQGVMVGMGQKDSYVGDEAQSKRGILTLKYPIEHGIVTNWDDMEKIWHHTFYNELRVAPEEHPVLLTEAPLNPKANREKMTQIMFETFNTPAMYVAIQAVLSLYASGRTTGIVMDSGDGVTHTVPIYEGYALPHAILRLDLAGRDLTDYLMKILTERGYSFTTTAEREIVRDIKEKLCYVALDFEQEMATAASSSSLEKSYELPDGQVITIGNERFRCPEALFQPSFLGMESCGIHETTFNSIMKCDVDIRKDLYANTVLSGGTTMYPGIADRMQKEITALAPSTMKIKIIAPPERKYSVWIGGSILASLSTFQQMWISKQEYDESGPSIVHRKCF

SEQ ID NO: 37661 - protein, 290 aa, Homo sapiens
LPVAMEEEIAALVIDNGSGMCKAGFAGDDAPRAVFPSIVGRPRHQGVMVGMGQKDSYVGDEAQSKRGILTLKYPIEHGIVTNWDDMEKIWHHTFYNELRVAPEEHPVLLTEAPLNPKANREKMTQIMFETFNTPAMYVAIQAVLSLYASGRTTGIVMDSGDGVTHTVPIYEGYALPHAILRLDLAGRDLTDYLMKILTERGYSFTTTAEREIVRDIKEKLCYVALDFEQEMATAASSSSLEKSYELPDGQVITIGNERFRCPEALFQPSFLGRCCELKVSTLTSSVTQHH

SEQ ID NO: 37662 - protein, 202 aa, Homo sapiens
LPVAMEEEIAALVIDNGSGMCKAGFAGDDAPRAVFPSIVGRPRHQGVMVGMGQKDSYVGDEAQSKRGILTLKYPIEHGIVTNWDDMEKIWHHTFYNELRVAPEEHPVLLTEAPLNPKANREKMTQALFLSRHFLPEASRLCLRPSTPRPCTWPSRPCCPSTPLGAPLALSWTLETGSPTRCPSTRATPSPTPSCVWTWLAGT

SEQ ID NO: 37663 - protein, 164 aa, Homo sapiens
LPVAMEEEIAALVIDNGSGMCKAGFAGDDAPRAVFPSIVGRPRHQGVMVGMGQKDSYVGDEAQSKRGILTLKYPIEHGIVTNWDDMEKIWHHTFYNELRVAPEEHPVLLTEAPLNPKANREKMTQALFLSRHFLPEASRFLIWFLPAFFSFLHTSHWHAACCGV

SEQ ID NO: 37664 - protein, 47 aa, Homo sapiens
VGELGHRCRCSGPPQYAASSHCTAWLRALGAVPLVRAIWDLPGALHN

SEQ ID NO: 37665 - protein, 679 aa, Homo sapiens
LVSRPRARGERIERGTGTSAAGGAGRAKLERRWRRRREAGAGAEAAAGSARPLGRQAAAARGSSPEAGAAAMAESIIIRVQSPDGVKRITATKRETAATFLKKVAKEFGFQNNGFSVYINRNKTGEITASSNKSLNLLKIKHGDLLFLFPSSLAGPSSEMETSVPPGFKVFGAPNVVEDEIDQYLSKQDGKIYRSRDPQLCRHGPLGKCVHCVPLEPFDEDYLNHLEPPVKHMSFHAYIRKLTGGADKGKFVALENISCKIKSGCEGHLPWPNGICTKCQPSAITLNRQKYRHVDNIMFENHTVADRFLDFWRKTGNQHFGYLYGRYTEHKDIPLGIRAEVAAIYEPPQIGTQNSLELLEDPKAEVVDEIAAKLGLRKVGWIFTDLVSEDTRKGTVRYSRNKDTYFLSSEECITAGDFQNKHPNMCRLSPDGHFGSKFVTAVATGGPDNQVHFEGYQVSNQCMALVRDECLLPCKDAPELGYAKESSSEQYVPDVFYKDVDKFGNEITQLARPLPVEYLIIDITTTFPKDPVYTFSISQNPFPIENRDVLGETQDFHSLATYLSQNTSSVFLDTISDFHLLLFLVTNEVMPLQDSISLLLEAVRTRNEELAQTWKRSEQWATIEQLCSTVGGQLPGLHEYGAVGGSTHTATAAMWACQHCTFMNQPGTGHCEMCSLPRT

SEQ ID NO: 37666 - protein, 660 aa, Homo sapiens
LERRWRRRREAGAGAEAAAGSARPLGRQAAAARGSSPEAGAAAMAESIIIRVQSPDGVKRITATKRETAATFLKKVAKEFGFQNNGFSVYINRNKTGEITASSNKSLNLLKIKHGDLLFLFPSSLAGPSSEMETSVPPGFKVFGAPNVVEDEIDQYLSKQDGKIYRSRDPQLCRHGPLGKCVHCVPLEPFDEDYLNHLEPPVKHMSFHAYIRKLTGGADKGKFVALENISCKIKSGCEGHLPWPNGICTKCQPSAITLNRQKYRHVDNIMFENHTVADRFLDFWRKTGNQHFGYLYGRYTEHKDIPLGIRAEVAAIYEPPQIGTQNSLELLEDPKAEVVDEIAAKLGLRKVGWIFTDLVSEDTRKGTVRYSRNKDTYFLSSEECITAGDFQNKHPNMCRLSPDGHFGSKFVTAVATGGPDNQVHFEGYQVSNQCMALVRDECLLPCKDAPELGYAKESSSEQYVPDVFYKDVDKFGNEITQLARPLPVEYLIIDITTTFPKDPVYTFSISQNPFPIENRDVLGETQDFHSLATYLSQNTSSVFLDTISDFHLLLFLVTNEVMPLQDSISLLLEAVRTRNEELAQTWKRSEQWATIEQLCSEYPHPLPRHPVAGAGEQPTLHSSPLPVVPWIPHPAASWQVPSAMQRVETRPPCQARGRLR

SEQ ID NO: 37667 - protein, 178 aa, Homo sapiens
LERRWRRRREAGAGAEAAAGSARPLGRQAAAARGSSPEAGAAAMAESIIIRVQSPDGVKRITATKRETAATFLKKVAKEFGFQNNGFSVYINRNKTGEITASSNKSLNLLKIKHGDLLFLFPSSLAGPSSEMETSVPPGFKVFGAPNVVEDEIDQYLSKQDGKIYRSRDPQLHSMRTI

SEQ ID NO: 37668 - protein, 88 aa, Homo sapiens
VVRFFRLVPQRWWGLVILVEVLGWPGAYRVTPLAYWCPQSSHLSWRCRVPPPPPTMCLSAHPAPGPDPGTSCESHRVIPMTSIAQWGN

SEQ ID NO: 37669 - protein, 19 aa, Homo sapiens
LFPKLCLKLLWAGRGGLLL

SEQ ID NO: 37670 - protein, 85 aa, Homo sapiens
LWASFIAGGCATFLCQPLDVLKTRLMNSKGEYQGVFHCAVETAKLGPLAFYKGLVPAGIRLIPHTVLTFVFLEQLRKNFGIKVPS

SEQ ID NO: 37671 - protein, 223 aa, Homo sapiens
LATVLPVLGLRPPRLSLRRGGSRPLSGLDRFKLCVCLARLASSLLPRRVAWSPLAACGWTPACGGHPGRQRDHALCSHLKGGGRCALRLPLLLCWRGWPCVPCLRWLLFQRLRGSGGGALGSDAPAMTSSPVSRVVYNGKRTSSPRSPPSSSEIFTPAHEENVRFIYEAWQGVERDLRGQVPGGERGLVEEYVEKVPNPSLKTFKPIDLSDLKRRSTQDAKKS

SEQ ID NO: 37672 - protein, 109 aa, Homo sapiens
VSDMLRRALLCLAVAALVRADAPEEEDHVLVLRKSNFAEALAAHKYLLVEFYAPWCGHCKALAPEYAKAAGKLKAEGSEIRPPRRSLSPVWEGRSRTGHGHSVPPAVSP

SEQ ID NO: 37673 - protein, 511 aa, Homo sapiens
VSDMLRRALLCLAVAALVRADAPEEEDHVLVLRKSNFAEALAAHKYLLVEFYAPWCGHCKALAPEYAKAAGKLKAEGSEIRLAKVDATEESDLAQQYGVRGYPTIKFFRNGDTASPKEYTAGREADDIVNWLKKRTGPAATTLPDGAAAESLVESSEVAVIGFFKDVESDSAKQFLQAAEAIDDIPFGITSNSDVFSKYQLDKDGVVLFKKFDEGRNNFEGEVTKENLLDFIKHNQLPLVIEFTEQTAPKIFGGEIKTHILLFLPKSVSDYDGKLSNFKTAAESFKGKILFIFIDSDHTDNQRILEFFGLKKEECPAVRLITLEEEMTKYKPESEELTAERITEFCHRFLEGKIKPHLMSQELPEDWDKQPVKVLVGKNFEDVAFDEKKNVFVEFYAPWCGHCKQLAPIWDKLGETYKDHENIVIAKMDSTANEVEAVKVHSFPTLKFFPASADRTVIDYNGERTLDGFKKFLESGGQDGAGDDDDLEDLEEAEEPDMEEDDDQKAVKDEL

SEQ ID NO: 37674 - protein, 467 aa, Homo sapiens
VSDMLRRALLCLAVAALVRADAPEEEDHVLVLRKSNFAEALAAHKYLLVEFYAPWCGHCKALAPEYAKAAGKLKAEGSEIRLAKVDATEESDLAQQYGVRGYPTIKFFRNGDTASPKEYTGDVESDSAKQFLQAAEAIDDIPFGITSNSDVFSKYQLDKDGVVLFKKFDEGRNNFEGEVTKENLLDFIKHNQLPLVIEFTEQTAPKIFGGEIKTHILLFLPKSVSDYDGKLSNFKTAAESFKGKILFIFIDSDHTDNQRILEFFGLKKEECPAVRLITLEEEMTKYKPESEELTAERITEFCHRFLEGKIKPHLMSQELPEDWDKQPVKVLVGKNFEDVAFDEKKNVFVEFYAPWCGHCKQLAPIWDKLGETYKDHENIVIAKMDSTANEVEAVKVHSFPTLKFFPASADRTVIDYNGERTLDGFKKFLESGGQDGAGDDDDLEDLEEAEEPDMEEDDDQKAVKDEL

SEQ ID NO: 37675 - protein, 77 aa, Homo sapiens
LAPEYAKAAGKLKAEGSEIRLAKVDATEESDLAQQYGVRGYPTIKFFRNGDTASPKEYTGRGVGLCQAVFAGSRGHR

SEQ ID NO: 37676 - protein, 131 aa, Homo sapiens
VSDMLRRALLCLAVAALVRADAPEEEDHVLVLRKSNFAEALAAHKYLLVEFYAPWCGHCKALAPEYAKAAGKLKAEGSEIRLAKVDATEESDLAQQYGVRGYPTIKFFRNGDTASPKEYTGVAVALPLNCL

SEQ ID NO: 37677 - protein, 57 aa, Homo sapiens
VSDMLRRALLCLAVAALVRADAPEEEDHVLVLRKSNFAEALAAHKCPLVWPLQGSGP

SEQ ID NO: 37678 - protein, 101 aa, Homo sapiens
VSRPRLSLSMAEQEPTAEQLAQIAAENEEDEHSVNYKPPAQKSIQEIQELDKDDESLRKYKEALLGRVAVSADPNVPNVVVTGLTLVCSSAPGPLELDLTG

SEQ ID NO: 37679 - protein, 142 aa, Homo sapiens
VAAPSPDAAAHQSAGVPMARSATLAAAALALCLLLAPPGLAWYKPAAGHSSYSVGRAAGLLSGLRRSPYARRSQPYRGAEPPGGAGASPELQLHPRLRSLAVCVQDVAPNLQRCERLPDGRGTYQCKANVFLSLRAADCLAA

SEQ ID NO: 37680 - protein, 150 aa, Homo sapiens [sequence omitted]

SEQ ID NO: 37681 - protein, 395 aa, Homo sapiens
LPLPETLAGKRATQLASTSGLRARVERQPAPTGPLVWLQLGAGKGPPTGGAGWAGVPSLPVVLFLEEIAKHKGPPVFTQEERYKMVQAIKWVDEVVPAAPYVTTLETLDKYNCDFCVHGNDITLTVDGRDTYEEVKQAGRYRECKRTQGVSTTDLVGRMLLVTKAHHSSQEMSSEYREYADSFGKCPGGRNPWTGVSQFLQTSQKIIQFASGKEPQPGETVIYVAGAFDLFHIGHVDFLEKVHRLAERPYIIAGLHFDQEVNHYKGKNYPIMNLHERTLSVLACRYVSEVVIGAPYAVTAELLSHFKVDLVCHGKTEIIPDRDGSDPYQEPKRRGIFRQIDSGSNLTTDLIVQRIITNRLEYEARNQKKEAKELAFLEAARQQAAQPLGERDGDF

SEQ ID NO: 37682 - protein, 170 aa, Homo sapiens
LGGVLVRHGPGLAGCGARLPGGSGCRGSAPCRGRPRLPLAEAPPGHADLSGAATALRSGATASLLLRNHQQPACPAPVQGFPWPPGERPCSYDMVHYGHSNQLRQARAMGDYLIVGVHTDAKEKGHLLPTTASEAPKPSGAEHLLVRRNLCLCLRPSQGREPPSWPALVG

SEQ ID NO: 37683 - protein, 120 aa, Homo sapiens
LPGCPRRRCGAMIRNGRGAAGGAEQPGPGGRRAVRVWCDGCYDMVHYGHSNQLRQARAMGDYLIVGVHTDAKEKGHLLPTTASEAPKPSGAEHLLVRRNLCLCLRPSQGREPPSWPALVG

SEQ ID NO: 37684 - protein, 320 aa, Homo sapiens
MPGPRRRSPSACPQVSRILRKAAAERSAEEGRLLAESADLVTELQGRSRRREGLKRRQEEVCDDPEELRGKVRELASAVRNAKYLVVYTGAGISTAASIPDYRGPNGVWTLLQKGRSVSAADLSEAEPTLTHMSITRLHEQKLVQHVVSQNCDGLHLRSGLPRTAISELHGNMYIEVCTSCVPNREYVRVFDVTERTALHRHQTGRTCHKCGTQLRDTIVHFGERGTLGQPLNWEAATEAASRADTILCLGSSLKVLKKYPRLWCMTKPPSRRPKLYIVNLQWTPKDDWAALKLHGKCDDVMRLLMAELGLEIPAYSRVL

SEQ ID NO: 37685 - protein, 72 aa, Homo sapiens
LKPLTKREWAQKAFSWQQDKGCPRVQPCCSPGAERWVQAELISPCLPCLGLARGGCVCGRRPRDLLGWDGGY

SEQ ID NO: 37686 - protein, 38 aa, Homo sapiens
MANLAALSLCFLLFSFLPLFPTLLSSLQSTTCTPGAPG

SEQ ID NO: 37687 - protein, 219 aa, Homo sapiens
VRSARPAQAASPPSPGPGPLAPVPAPRGLGARAAPPRPGLGPPGPQCESACSLCPRVMTTPNKGNKALKVKREPGENGTSLTDEELVTMSVRELNQHLRGLSKEEIVQLKQRRRTLKNRGYAASCRVKRVTQKEELEKQKAELQQEVEKLASENASMKLELDALRSKYEALQTFARTVARSPVAPARGPLAAGLGPLVPGKVAATSVITIVKSKTDARS

SEQ ID NO: 37688 - protein, 33 aa, Homo sapiens
LDFLLHPLPFAAVNPGRGRVAAPPAELKVFRGQ

SEQ ID NO: 37689 - protein, 94 aa, Homo sapiens
LGKGLLGLLVNFCGHHLLLLTSLGGCYQFCPGPFSFISWFPAPSVLTSVCHMRREALPVWEGGYCGWNSGGLQLIRQGPPTSWRASALLIKMSM

SEQ ID NO: 37690 - protein, 354 aa, Homo sapiens
LGWGRAPGMVGGGRRVGRDEPVPSVGALGQGSPDSMSVGFIGAGQLAFALAKGFTAAGVLAAHKIMASSPDMDLATVSALRKMGVKLTPHNKETVQHSDVLFLAVKPHIIPFILDEIGADIEDRHIVVSCAAGVTISSIEKKLSAFRPAPRVIRCMTNTPVVVREGATVYATGTHAQVEDGRLMEQLLSSVGFCTEVEEDLIDAVTGLSGSGPAYAFTALDALADGGVKMGLPRRLAVRLGAQALLGAAKMLLHSEQHPGQLKDNVSSPGGATIHALHVLESGGFRSLLINAVEASCIRTRELQSMADQEQVSPAAIKKTILDKVKLDSPAGTALSPSGHTKLLPRSLAPAGKD

SEQ ID NO: 37691 - protein, 224 aa, Homo sapiens
LLHCAGGSEGRKTWRRRGQQPPPPPRTEAAPAAGQPVESFPLDFTAVEGNMDSFMAQVKSLAQSLYPCSAQQLNEDLRLHLLLNTSVTCNDGSPAGYYLKESRGSRRWLLFLEGGWYCFNRENCDSRYDTMRRLMSSRDWPRTRTGQRRALGKASRREAREEAAPASWSPSQAPTPHIMPSLAPGFTKSKGRPSLLPFGAHSTLAFRRLPSGSGPPQGQSRARG

SEQ ID NO: 37692 - protein, 13 aa, Homo sapiens
LPTFLPPDIKAGV

SEQ ID NO: 37693 - protein, 275 aa, Homo sapiens
LRRHGAVPRGPPGAGHRGRQRWAAGKGGQRPAAGRGGQGTPSLSPLPAGIGRGTVQALHATGARVVAVSRTQADLDSLVRECPGIEPVCVDLGDWEATERALGSVGPVDLLVNNAAVALLQPFLEVTKEAFDRSFEVNLRAVIQVSQIVARGLIARGVPGAIVNVSSQCSQRAVTNHSVYCSTKGALDMLTKVMALELGPHKIRVNAVNPTVVMTSMGQATWSDPHKAKTMLNRIPLGKFAEVEHVVNAILFLLSDRSGMTTGSTLPVEGGFWAC

SEQ ID NO: 37694 - protein, 102 aa, Homo sapiens
LVNNAAVALLQPFLEVTKEAFDRSFEVNLRAVIQVSQIVARGLIARGVPGAIVNVSSQCSQRAVTNHSVYCSTKGALDMLTKVMALELGPHKVSRAGVPPPT

SEQ ID NO: 37695 - protein, 102 aa, Homo sapiens
LRRHGAVPRGPPGAGHRGRQRWAAGKGGQRPAAGRGGQGTPSLSPLPAGIGRGTVQALHATGARVVAVSRTQADLDSLVREVTSPSPQLCRLLGTEPLVTAP

SEQ ID NO: 37696 - protein, 139 aa, Homo sapiens
LFLAGRRVLVTGAGKGIGRGTVQALHATGARVVAVSRTQADLDSLVREVGPAGSQRCEAASQEGAAASGGGTSVRDSASPRGRCASHRGLGARAPSLGAGGLRGRPGGRQSRRGPRAQKEAEMAAKQAPGRSRSGAGRK

SEQ ID NO: 37697 - protein, 87 aa, Homo sapiens
VKWRISGLTFLVLFLKTSACPKKCRLCPSSLRLGSRTPPAHFKAKGKNLDNQLRLEKTPMSAELRFHLWAKDYLDAKLPKREAPPVL

SEQ ID NO: 37698 - protein, 489 aa, Homo sapiens
VPGAWPMLQGAVEPMQIDVDPQEDPQNAPDVNYVVENPSLDLEQYAASYSGLMRIERLQFIADHCPTLRVEALKMALSFVQRTFNVDMYEEIHRKLSEATRSSLRELQNAPDAIPESGVEPPALDTAWVEATRKKALLKLEKLDTDLKNYKGNSIKESIRRGHDDLGDHYLDCGDLSNALKCYSRARDYCTSAKHVINMCLNVIKVSVYLQNWSHVLSYVSKAESTPEIAEQRGERDSQTQAILTKLKCAAGLAELAARKYKQAAKCLLLASFDHCDFPELLSPSNVAIYGGLCALATFDRQELQRNVISSSSFKLFLELEPQVRDIIFKFYESKYASCLKMLDEMKDNLLLDMYLAPHVRTLYTQIRNRALIQYFSPYVSADMHRMAAAFNTTVAALEDELTQLILEGLISARVDSHSKILYARDVDQRSTTFEKSLLMGKEFQRRAKAMMLRAAVLRNQIHVKSPPREGSQGELTPANSQSRMSTNM

SEQ ID NO: 37699 - protein, 272 aa, Homo sapiens
LAPVTAAILMARSSLRELQNAPDAIPESGVEPPALDTAWVEATRKKALLKLEKLDTDLKNYKGNSIKESIRRGHDDLGDHYLDCGDLSNALKCYSRARDYCTSAKHVINMCLNVIKVSVYLQNWSHVLSYVSKAESTPEIAEVRATSSETLPPGFLTTAGPSCPPPPHSPPDLNLPSSPLSLGAGHRALGNVEHGPHACGFLLQQRGERDSQTQAILTKLKCAAGEGLGHAQLTPRSPVAKSSQPRAVGWSLPQPGKTSLAGRRMLWAHVQV

SEQ ID NO: 37700 - protein, 191 aa, Homo sapiens
LWAGKLLPLSLPGGRTDKAARPAAAPQPTCFLSVSCRMVPPASPHPLLTEGKADVASLHPLPSLSLLAWLATAGMDAISRLRAGGRGSPHSQGTLALTHQHPFVLFLAKYAKCDQCGNPKGNRCVFSLCRGCCKKRASKETADCPGHGLLFKTKLEKSLAWKEAQPELQEPQPAAPGTPGGFSEVMGSALA

SEQ ID NO: 37701 - protein, 362 aa, Homo sapiens
LLQGLTKRGPMEAEDQGELFLHLRSVARAPQTLSMHRLQRKLKEAARKIISLRLEKEQLIEMGNRLRAELGRPERWLLHHALPPAPEARKPGEEPRRPLDRSPPLGQVQPHFTSQDAKSAEDEAPSRHLGKHQPRSAQVGSRLDALQGPKTQHSIHTVTCKSPRQKEDRSPKPPQAPQHPEEHGRQSHSSSSFASGTLQDMWRLLDLGSSPSGVTSQGDSTPEMGSHYVTQAGLELLGSSSPAALASQSAEMTGVGPTPSLAWSGALHPNMNQEASLVRSTWAPGMRGGMNGGSSSVCKNMQRGPHWSPSQQPCSGIRTVLLSRKERTLLSCFSLPAPVVLVPLLLSGQAVTERAGHAGDIL

SEQ ID NO: 37702 - protein, 304 aa, Homo sapiens
MLNRYFSKRRPMANGLAAAGSPVFLCALSPLGQLLQDRYGWRGGFLILGGLLLNCCVCAALMRPLVVTAQPGSGPPRPSRRLLDLSVFRDRGFVLYAVAASVMVLGLFVPPVFVVSYAKDLGVPDTKAAFLLTILGFIDIFARPAAGFVAGLGKVRPYSVYLFSFSMFFNGLADLAGSTAGDYGGLVVFCIFFGISYGMVGALQFEVLMAIVGTHKFSSAIGLVLLMEAVAVLVGPPSGGVLLSPRLEGSGTITAPCSLNLPNSSHPPASASRVAETTDVSHCTWPVSFSSLPPKCLSRNHPFC

SEQ ID NO: 37703 - protein, 36 aa, Homo sapiens
VVTVVFVALLPLHSVHFLSTQCSCADWHSVCMNACA

SEQ ID NO: 37704 - protein, 528 aa, Homo sapiens
LLGEVTSQRDGGGSFRQLKGDLGPEDPSPSAAGRGQAGPVGAGAAAAALGLSHPPRIEALGAAGRQESDGESGAVRGAEPGAGPAVAAAAAPPPRVQTQEAAGRAGANRAAAAMELRVGNRYRLGRKIGSGSFGDIYLGTDIAAGEEVAIKLECVKTKHPQLHIESKIYKMMQGGVGIPTIRWCGAEGDYNVMVMELLGPSLEDLFNFCSRKFSLKTVLLLADQMISRIEYIHSKNFIHRDVKPDNFLMGLGKKGNLVYIIDFGLAKKYRDARTHQHIPYRENKNLTGTARYASINTHLGIEQSRRDDLESLGYVLMYFNLGSLPWQGLKAATKRQKYERISEKKMSTPIEVLCKGYPSEFATYLNFCRSLRFDDKPDYSYLRQLFRNLFHRQGFSYDYVFDWNMLKFGASRAADDAERERRDREERLRHSRNPATRGLPSTASGRLRGTQEVAPPTPLTPTSHTANTSPRPVSGMERERKVSMRLHRGAPVNISSSDLTGRQDTSRMSTSQIPGRVASSGLQSVVHR

SEQ ID NO: 37705 - protein, 505 aa, Homo sapiens
LKGDLGPEDPSPSAAGRGQAGPVGAGAAAAALGLSHPPRIEALGAAGRQESDGESGAVRGAEPGAGPAVAAAAAPPPRVQTQEAAGRAGANRAAAAMELRVGNRYRLGRKIGSGSFGDIYLGTDIAAGEEVAIKLECVKTKHPQLHIESKIYKMMQGGVGIPTIRWCGAEGDYNVMVMELLGPSLEDLFNFCSRKFSLKTVLLLADQMISRIEYIHSKNFIHRDVKPDNFLMGLGKKGNLVYIIDFGLAKKYRDARTHQHIPYRENKNLTGTARYASINTHLGIEQSRRDDLESLGYVLMYFNLGSLPWQGLKAATKRQKYERISEKKMSTPIEVLCKGYPSEFATYLNFCRSLRFDDKPDYSYLRQLFRNLFHRQGFSYDYVFDWNMLKFGASRAADDAERERRDREERLRHSRNPATRGLPSTASGRLRGTQEVAPPTPLTPTSHTANTSPRPVSGMERERKVSMRLHRGAPVNISSSDLTGRQDTSRMSTSQNSIPFEHHGK

SEQ ID NO: 37706 - protein, 248 aa, Homo sapiens
LGELGVGNMAGPPRLLLLPLLLALARGLPGALAAQEVQQSPHCTTVPVGASVNITCSTSGGLRGIYLRQLGPQPQDIIYYEDGVVPTTDRRFRGRIDFSGSQDNLTITMHRLQLSDTGTYTCQAITEVNVYGSGTLVLVTEEQSQGWHRCSDAPPRASALPAPPTGSALPDPQTASALPDPPAASALPAALAVISFLLGLGLGVACVLARTQIKKLCSWRDKNSAACVVYEDMSHSRCNTLSSPNQYQ

SEQ ID NO: 37707 - protein, 229 aa, Homo sapiens
LGELGVGNMAGPPRLLLLPLLLALARGLPGALAAQEVQQSPHCTTVPVGASVNITCSTSGGLRGIYLRQLGPQPQDIIYYEDGVVPTTDRRFRGRIDFSGSQDNLTITMHRLQLSDTGTYTCQAITEVNVYGSGTLVLVTEEQSQGWHRCSDAPPRASALPAPPTGSALPDPQTASALPDPPAASALPAALAVISFLLGLGLGVACVLARTQVSVSPSCHLHPKDCSLS

SEQ ID NO: 37708 - protein, 174 aa, Homo sapiens
LGELGVGNMAGPPRLLLLPLLLALARGLPGALAAQEVQQSPHCTTVPVGASVNITCSTSGGLRGIYLRQLGPQPQDIIYYEDGVVPTTDRRFRGRIDFSGSQDNLTITMHRLQLSDTGTYTCQAITEVNVYGSGTLVLVTGRECAHPRPPSQPQLLARLCSPSPCRGTLPPTCA

SEQ ID NO: 37709 - protein, 43 aa, Homo sapiens
LGELGVGNMAGPPRLLLLPLLLALARGLPGALAAQAGACVGST

SEQ ID NO: 37710 - protein, 36 aa, Homo sapiens
LGELGVGNMAGPPRLLLLPLLLALARGLPGALAAQD

SEQ ID NO: 37711 - protein, 36 aa, Homo sapiens
LVAKAVLAGPAASRTLSGSGWWAPSWVGSRLSLGRP

SEQ ID NO: 37712 - protein, 95 aa, Homo sapiens
LRAPPMLLAHKSPWATAPPHQAWPCQRPASQGPGSECPHQGGSWRRCAGSHGPSAGSRVGLLLPLCPGIKLMVRLGAVAHTCNLSTAGGRGRRIT

SEQ ID NO: 37713 - protein, 77 aa, Homo sapiens
LVIVALSGDRRPSEGCGRGCGSMATSLSSPLPGRVSFFTSGSENLHRVEKVHWGTRYAITIAFSCNPDHGIEDPAFP

SEQ ID NO: 37714 - protein, 278 aa, Homo sapiens
LALCSPHSCSGAAWGPTTGSQRSWPAVARSWQGDSSRCPALRTTTVTAGCTPRKCGRGVTDVVITREEAERIRSVAEKGLSLGGSDGGASILDLHSGALSVGKHFVNLYRYFGDKIQNIFSEEDFRLYREVRQKVQLTIAEAFGISASSLHLTKPTFFSRINSTEARTAHDEYWHAHVDKVTYGSFDYTSLLYLSNYLEDFGGGRFMFMEEGANKTVEPRAGCFCFRMMSCGFQEVNGPRASEAAGAKAGVRCPPGTHHPPERGETHAILEAESIAYC

SEQ ID NO: 37715 - protein, 279 aa, Homo sapiens
LEPLTCLLSHPVLLMQKYRRCGFPQLWAASAFKGATGPSQAVPPVEHHLRNHVQWLQVAGSGPTDSLQGIILTGWQRYDHYSVLCELLPAGVPSLAACLQLLLRGMSGLATPSPTGPSPKDPEGRRPSTQCSNHPAGLWWSSQSEDGLTAPAQPPTCPEVHPGWACVWVSRPKPKAGWRVTREAPLRHSESAEMHAGRRWGTAPPLLHTRPAHLAEQVWGSGARPWKAPHPGPSTHTSRSPEGAAGPMGRGRHRGTPWGRQGAWPEELCVWKLAGHTGN

SEQ ID NO: 37716 - protein, 147 aa, Homo sapiens
LCSRLGWKLFYVTGCLFVAVQNLEDWEEAIFDKSTGKVVLKTFSLYKKLLTLFRAGHDQVVVLLHDVRDVSVEEEKVRYFGKGYMVVLRLATGFSHPLTQSAVMGHRSDVEAIAKLITSFLELHCLESPTELSQSSDSEAGDPASQS

SEQ ID NO: 37717 - protein, 85 aa, Homo sapiens
LLRRGDRCALDPSSCREWCCPLGMYLQVETRTSSRLHLKRAPGIRSWSLLVGKALHVPPQNPRTGSLTFKKDENETKYFLFFLLP

SEQ ID NO: 37718 - protein, 37 aa, Homo sapiens
MYFLWRRGFATLPWLVLNSVTQTIRTPRPPKVLRLQA

SEQ ID NO: 37719 - protein, 332 aa, Homo sapiens
LPARPPSLESPPDPGRVRGRGGNMEELLRRELGCSSVRATGHSGGGCISQGRSYDTDQGRVFVKVNPKAEARRMFEGEMASLTAILKTNTVKVPKPIKVLDAPGGGSVLVMEHMDMRHLSSHAAKLGAQLADLHLDNKKLGEMRLKEAGTVGRGGGQEERPFVARFGFDVVTCCGYLPQVNDWQEDWVVFYARQRIQPQMDMVEKESGDREALQLWSALQLKIPDLFRDLEIIPALLHGDLWGGNVAEDSSGPVIFDPASFYGHSEYELAIAGMFGGFSSSFYSAYHGKIPKAPGFEKRLQLYQLFHYLNHWNHFGSGYRGSSLNIMRNLVK

SEQ ID NO: 37720 - protein, 17 aa, Homo sapiens
LADLFRPAPAPGAAGPH

SEQ ID NO: 37721 - protein, 262 aa, Homo sapiens
LTVSLLCSGLTHEAHRKEVEQVYLRCAAGAVEWMYPTGALIVNLRPNTFSPARHLTVCIRSFTDSSGANIYLEKTGELRLLVPDGDGRPGRVQCFGLEQGGLFVEATPQQDIGRRTTGFQYELVRRHRASDLHELSAPCRPCSDTEVLLAVCTSDFAVRGSIQQVTHEPERQDSAIHLRVSRLYRQKSRVFEPVPEGDGHWQGRVRTLLECGVRPGHGDFLFTGHMHFGEARLGCAPRFKDFQRMYRDAQERGLNPCEVGTD

SEQ ID NO: 37722 - protein, 115 aa, Homo sapiens [sequence omitted]

SEQ ID NO: 37723 - protein, 528 aa, Homo sapiens
LQSLRSCTGVLRVAASSPVAGLNETRRTEAAATTAPPPRPPPQLLLVPVPLPPSSGPALLRRRLPPRPAMPLYSVTVKWGKEKFEGVELNTDEPPMVFKAQLFALTGVQPARQKVMVKGGTLKDDDWGNIKIKNMELPCGLTNLGNTCYMNATVQCIRSVPELKDALKRYAGALRASGEMASAQYITAALRDLFDSMDKTSSSIPPIILLQFLHMAFPQFAEKGEQGQYLQQDANECWIQMMRVLQQKLEAIEDDSVKETDSSSASAATPSKKKSLIDQFFGVEFETTMKCTESEEEEVTKGKENQLQLSCFINQEVKYLFTGLKLRLQEEITKQSPTLQRNALYIKSSKISRLPAYLTIQMVRFFYKEKESVNAKVLKDVKFPLMLDMYELCTPELQEKMVSFRSKFKDLEDKKVNQQPNTSDKKSSPQKEVKYEPFSFADDIGSNNCGYYDLQAVLTHQGRSSSSGHYVSWVKRKQDEWIKFDDDKVSIVTPEDILRLSGGGDWHIAYVLLYGPRRVEIMEEESEQ

SEQ ID NO: 37724 - protein, 534 aa, Homo sapiens
VAGLNETRRTEAAATTAPPPRPPPQLLLVPVPLPPSSGPALLRRRLPPRPAMPLYSVTVKWGKEKFEGVELNTDEPPMVFKAQLFALTGVQPARQKVMVKGGTLKGMTLLMMGSADALPEEPSAKTVFVEDMTEEQLASAMELPCGLTNLGNTCYMNATVQCIRSVPELKDALKRYAGALRASGEMASAQYITAALRDLFDSMDKTSSSIPPIILLQFLHMAFPQFAEKGEQGQYLQQDANECWIQMMRVLQQKLEAIEDDSVKETDSSSASAATPSKKKSLIDQFFGVEFETTMKCTESEEEEVTKGKENQLQLSCFINQEVKYLFTGLKLRLQEEITKQSPTLQRNALYIKSSKISRLPAYLTIQMVRFFYKEKESVNAKVLKDVKFPLMLDMYELCTPELQEKMVSFRSKFKDLEDKKVNQQPNTSDKKSSPQKEVKYEPFSFADDIGSNNCGYYDLQAVLTHQGRSSSSGHYVSWVKRKQDEWIKFDDDKVSIVTPEDILRLSGGGDWHIAYVLLYGPRRVEIMEEESEQ

SEQ ID NO: 37725 - protein, 377 aa, Homo sapiens
MSPTPPLFSLPEARTRFTKSTREALNNKNIKPLLSTFSQVPGSENEKKCTLDQAFRGILEEEIINHSSCENVLAIISLAIGGVTEGICTASTPFVLLGDVLDCLPLDQCDTIFTFVEKNVATWKSNTFYSAGKNYLLRMCNDLLRRLSKSQNTVFCGRIQLFLARLFPLSEKSGLNLQSQFNLENVTVFNTNEQESTLGQKHTEDREEGMDVEEGEMGDEEAPTTCSIPIDYNLYRKFWSLQDYFRNPVQCYEKISWKTFLKYSEEVLAVFKSYKLDDTQASRKKMEELKTGGEHVYFAKFLTSEKLMDLQLSDSNFRRHILLQYLILFQYLKGQVKFKSSNYVLTDEQSLWIEDTTKSVYQVSSTRNKPMIEKMEI

SEQ ID NO: 37726 - protein, 96 aa, Homo sapiens
MAWSLFPPLPRPLVSMSPPHALFQIMLGIFFNVHSAVLIEDVPFTEKDFENGPQNIYNLYEQVSYNCFIAAGLYLLLGGFSFCQVRLNKRKEYMVR

SEQ ID NO: 37727 - protein, 88 aa, Homo sapiens
LVKEKIVQKENLYPRVNLMTANERDAAEKPGDFARTLDPKQRIGATDCSEELMFLMECKDSDEADLVLAKRQTQRGKHEVSSNCKLFL

SEQ ID NO: 37728 - protein, 32 aa, Homo sapiens
LGPGPVRSAPRVPFSSGVAGRGSDVVHGQERV

SEQ ID NO: 37729 - protein, 1097 aa, Homo sapiens
LERREAPEPLAFAGGALAAGSLVAGAPIRRAPDPGRRGAPAARGMWQPRRPWPRVPWRWALALLALVGAGLCHAGPQPGYPARPSARNKNWCAYIVNKNVSCSVLEGSESFIQAQYNCAWNQMPCPSALVYRVNFRPRYVTRYKTVTQLEWRCCPGFRGGDCQEGPKDPVKTLRPTPARPRNSLKKATDNEPSQFSEPRKTLSPTGTAQPSWGVDPKEGPQELQEKKIQVLEEKVLRLTRTVLDLQSSLAGVSENLKHATQDDASRTRAPGLSSQHPKPDTTVSGDTETGQSPGVFNTKESGMKDIKSELAEVKDTLKNKSDKLEELDGKVKGYEGQLRQLQEAAQGPTVTMTTNELYQAYVDSKIDALREELMEGMDRKLADLKNSCEYKLTGLQQQCDDYGSSYLGVIELIGEKETSLRKEINNLRARLQEPSAQANCCDSEKNGDIGQQIKTLDQKIERVAEATRMLNGRLDNEFDRLIVPEPDVDFDAKWNELDARINVTEKNAEEHCFYIEETLRGAINGEVGDLKQLVDQKIQSLEDRLGSVLLQMTNNTGAELSPPGAAALPGVSGSGDERVMMELNHLKDKVQVVEDICLLNIQGKPHGMEGALPNREDRAVRDSLHLLKSLNDTMHRKFQETEQTIQKLQQDFSFLYSQLNHTENDVTHLQKEMSNCRAGENAGMGRFTKVGEQERTVDTLPSPQHPVAHCCSQLEERWQRLQSQVISELDACKECTQGVQREVSMVEGRVSHMEKTCSKLDSISGNLQRIKEGLNKHVSSLWNCVRQMNGTLRSHSRDISGLKNSVQQFYSHVFQISTDLQDLVKFQPSAKAPSPPPPAEAPKEPLQPEPAPPRPSGPATAEDPGRRPVLPQRPPEERPPQPPGSTGVIAETGQAGPPAGAGVSGRGLPRGVDGQTGSGTVPGAEGFAGAPGYPKSPPVASPGAPVPSLVSFSAGLTQKPFPSDGGVVLFNKVLVNDGDVYNPSTGVFTAPYDGRYLITATLTPERDAYVEAVLSVSNASVAQLHTAGYRREFLEYHRPPGALHTCGGPGAFHLIVHLKAGDAVNVVVTGGKLAHTDFDEMYSTFSGVFLYPFLSHL

SEQ ID NO: 37730 - protein, 83 aa, Homo sapiens
LSESILGCPRNDSWKAPQCSSVFRKTQWARAIALSSPLTLLLKRPHSAPKGTCSRAAGAGPRQKVGDDYLLLSLLRRWVWNIG

SEQ ID NO: 37731 - protein, 14 aa, Homo sapiens
VVWTQLTMAWTVLG

SEQ ID NO: 37732 - protein, 288 aa, Homo sapiens
VSFAIVAVLIKQLTTGPCPFLGIVAASGSETEDEDSMDIPLDLSSSAGSGKRRRRGNLPKESVQILRDWLYEHRYNAYPSEQEKALLSQQTHLSTLQVCNWFINARRRLLPDMLRKDGKDPNQFTISRRGAKISETSSVESVMGIKNFMPALEETPFHSCTAGPNPTLGRPLSPKPSSPGSVLARPSVICHTTVTALKDVPFSLCQSVGVGQNTDIQQIAAKNFTDTSLMYPEDTCKSGPSTNTQSGLFNTPPPTPPDLNQDFSGFQLLVDVALKRAAEMELQAKLTA

SEQ ID NO: 37733 - protein, 15 aa, Homo sapiens
MKISSTCTMGPWRQE

SEQ ID NO: 37734 - protein, 54 aa, Homo sapiens
LCLSFSLDLKKKRAKQQKVFQGVRKAARLDSPHPGLTGLPTDQAHVMVKKRGSS

SEQ ID NO: 37735 - protein, 49 aa, Homo sapiens
MEFLYYHVCCRVIFVLNLFYFSFNSFETGSCSVTQAHCNKVIFPPQPPE

SEQ ID NO: 37736 - protein, 88 aa, Homo sapiens
LRFGRRNLQDTASRTPSASGNRQHRRRERPPPPRLLSRVLPVTSLRAGPGRGDISLLPPRLVGPTDGRSQRGPDCGTRPEQLNIRYPE

SEQ ID NO: 37737 - protein, 108 aa, Homo sapiens
LVIMVLAFTELFQGLCVRVYVSLISTYHNGPGGKFIYGEKFDDENFILKHTGPGILSMENAEPNTHGSQFFICPAKTEWLDGKHVVFGKVKEGMTIVEAMEHFGSRNG

SEQ ID NO: 37738 - protein, 40 aa, Homo sapiens
MPGAGRTTSLRTGCGGCCARKPTCWPGSVRRPTWWLSLDV

SEQ ID NO: 37739 - protein, 1018 aa, Homo sapiens
LCPCNCPEVLRWPPPPRLGGQAGRGWLSSHGLWAWAPAAAPRSLGVSCNRGRGEQRRAALGCGFLPTPESPAHRRRGRAPEPSPHAAARPGSLLIPEQSTMTTESGSDSESKPDQEAEPQEAAGAQGRAGAPVPEPPKEEQQQALEQFAAAAAHSTPVRREVTDKEQEFAARAAKQLEYQQLEDDKLSQKSSSSKLSRSPLKIVKKPKSMQCKVILLDGSEYTCDVEKRSRGQVLFDKVCEHLNLLEKDYFGLTYRDAENQKNWLDPAKEIKKQVRSGAWHFSFNVKFYPPDPAQLSEDITRYYLCLQLRDDIVSGRLPCSFVTLALLGSYTVQSELGDYDPDECGSDYISEFRFAPNHTKELEDKVIELHKSHRGMTPAEAEMHFLENAKKLSMYGVDLHHAKDSEGVEIMLGVCASGLLIYRDRLRINRFAWPKVLKISYKRNNFYIKIRPGEFEQFESTIGFKLPNHRAAKRLWKVCVEHHTFFRLLLPEAPPKKFLTLGSKFRYSGRTQAQTRRASALIDRPAPYFERSSSKRYTMSRSLDGASVNENHEIYMKDSMSAAEVGTGQYATTKGISQTNLITTVTPEKKAEEERDEEEDKRRKGEEVTPISAIRHEGKTDSERTDTAADGETTATESDQEEDAELKAQELEKTQDDLMKHQTNISELKRTFLETSTDTAVTNEWEKRLSTSPVRLAARQEDAPMIEPLVPEETKQSSGEKLMDGSEIFSLLESARKPTEFIGGVTSTSQSWVQKMETKTESSGIETEPTVHHLPLSTEKVVQETVLVEERRVVHASGDASYSAGDSGDAAAQPAFTGIKGKEGSALTEGAKEEGGEEVAKAVLEQEETAAASRERQEEQSAAIHISETLEQKPHFESSTVKTETISFGSVSPGGVKLEISTKEVPVVHTETKTITYESSQVDPGTDLEPGVLMSAQTITSETTSTTTTTHITKTVKGGISETRIEKRIVITGDADIDHDQALAQAIKEAKEQHPDMSVTKVVVHKETEITPEDGED

SEQ ID NO: 37740 - protein, 1187 aa, Homo sapiens
LCPCNCPEVLRWPPPPRLGGQAGRGWLSSHGLWAWAPAAAPRSLGVSCNRGRGEQRRAALGCGFLPTPESPAHRRRGRAPEPSPHAAARPGSLLIPEQSTMTTESGSDSESKPDQEAEPQEAAGAQGRAGAPVPEPPKEEQQQALEQFAAAAAHSTPVRREVTDKEQEFAARAAKQLEYQQLEDDKLSQKSSSSKLSRSPLKIVKKPKSMQCKVILLDGSEYTCDVEKRSRGQVLFDKVCEHLNLLEKDYFGLTYRDAENQKNWLDPAKEIKKQVRSGAWHFSFNVKFYPPDPAQLSEDITRYYLCLQLRDDIVSGRLPCSFVTLALLGSYTVQSELGDYDPDECGSDYISEFRFAPNHTKELEDKVIELHKSHRGMTPAEAEMHFLENAKKLSMYGVDLHHAKDSEGVEIMLGVCASGLLIYRDRLRINRFAWPKVLKISYKRNNFYIKIRPGEFEQFESTIGFKLPNHRAAKRLWKVCVEHHTFFRLLLPEAPPKKFLTLGSKFRYSGRTQAQTRRASALIDRPAPYFERSSSKRYTMSRSLDGEVGTGQYATTKGISQTNLITTVTPEKKAEEERDEEEDKRRKGEEVTPISAIRHEGKSPGLGTDSCPLSPPSTHCAPTSPTELRRRCKENDCKLPGYEPSRAEHLPGEPALDSDGPGRPYLGDQDVAFSYRQQTGKGTTLFSFSLQLPESFPSLLDDDGYLSFPNLSETNLLPQSLQHYLPIRSPSLVPCFLFIFFFLLSASFSVPYALTLSFPLALCLCYLEPKAASLSASLDNDPSDSSEEETDSERTDTAADGETTATESDQEEDAELKAQELEKTQDDLMKHQTNISELKRTFLETSTDTAVTNEWEKRLSTSPVRLAARQEDAPMIEPLVPEETKQSSGEKLMDGSEIFSLLESARKPTEFIGGVTSTSQSWVQKMETKTESSGIETEPTVHHLPLSTEKVVQETVLVEERRVVHASGDASYSAGDSGDAAAQPAFTGIKGKEGSALTEGAKEEGGEEVAKAVLEQEETAAASRERQEEQSAAIHISETLEQKPHFESSTVKTETISFGSVSPGGVKLEISTKEVPVVHTETKTITYESSQVDPGTDLEPGVLMSAQTITSETTSTTTTTHITKTVKGGISETRIEKRIVITGDADIDHDQALAQAIKEAKEQHPDMSVTKVVVHKETEITPEDGED

SEQ ID NO: 37741 - protein, 965 aa, Homo sapiens
LCPCNCPEVLRWPPPPRLGGQAGRGWLSSHGLWAWAPAAAPRSLGVSCNRGRGEQRRAALGCGFLPTPESPAHRRRGRAPEPSPHAAARPGSLLIPEQSTMTTESGSDSESKPDQEAEPQEAAGAQGRAGAPVPEPPKEEQQQALEQFAAAAAHSTPVRREVTDKEQEFAARAAKQLEYQQLEDDKLSQKSSSSKLSRSPLKIVKKPKSMQCKVILLDGSEYTCDVEKRSRGQVLFDKVCEHLNLLEKDYFGLTYRDAENQKNWLDPAKEIKKQVRSGAWHFSFNVKFYPPDPAQLSEDITRYYLCLQLRDDIVSGRLPCSFVTLALLGSYTVQSELGDYDPDECGSDYISEFRFAPNHTKELEDKVIELHKSHRGMTPAEAEMHFLENAKKLSMYGVDLHHAKDSEGVEIMLGVCASGLLIYRDRLRINRFAWPKVLKISYKRNNFYIKIRPGEFEQFESTIGFKLPNHRAAKRLWKVCVEHHTFFRLLLPEAPPKKFLTLGSKFRYSGRTQAQTRRASALIDRPAPYFERSSSKRYTMSRSLDGASVNENHEIYMKDSMSAAEVGTGQYATTKGISQTNLITTVTPEKKAEEERDEEEDKRRKGEEVTPISAIRHEGKTDSERTDTAADGETTATEELEKTQDDLMKHQTNISELKRTFLETSTDTAVTNEWEKRLSTSPVRLAARQEDAPMIEPLVPEEKMETKTESSGIETEPTVHHLPLSTEKVVQETVLVEERRVVHASGDASYSAGDSGDAAAQPAFTGIKGKEGSALTEGAKEEGGEEVAKAVLEQEETAAASRERQEEQSAAIHISETLEQKPHFESSTVKTETISFGSVSPGGVKLEISTKEVPVVHTETKTITYESSQVDPGTDLEPGVLMSAQTITSETTSTTTTTHITKTVKGGISETRIEKRIVITGDADIDHDQALAQAIKEAKEQHPDMSVTKVVVHKETEITPEDGED

SEQ ID NO: 37742 - protein, 727 aa, Homo sapiens
LDPGEFEGKSPCGGTCEQPYLSLPLRYFFSPRKVVPAGCEQAPGGAPKEGFGDSDSESKPDQEAEPQEAAGAQGRAGAPVPEPPKEEQQQALEQFAAAAAHSTPVRREVTDKEQEFAARAAKQLEYQQLEDDKLSQKSSSSKLSRSPLKIVKKPKSMQCKVILLDGSEYTCDVEKRSRGQVLFDKVCEHLNLLEKDYFGLTYRDAENQKNWLDPAKEIKKQVRSGAWHFSFNVKFYPPDPAQLSEDITRYYLCLQLRDDIVSGRLPCSFVTLALLGSYTVQSELGDYDPDECGSDYISEFRFAPNHTKELEDKVIELHKSHRGMTPAEAEMHFLENAKKLSMYGVDLHHAKDSEGVEIMLGVCASGLLIYRDRLRINRFAWPKVLKISYKRNNFYIKIRPGEFEQFESTIGFKLPNHRAAKRLWKVCVEHHTFFRLLLPEAPPKKFLTLGSKFRYSGRTQAQTRRASALIDRPAPYFERSSSKRYTMSRSLDGASVNENHEIYMKDSMSAAEVGTGQYATTKGISQTNLITTVTPEKKAEEERDEEEDKRRKGEEVTPISAIRHEGKTDSERTDTAADGETTATESDQEEDAELKAQELEKTQDDLMKHQTNISELKRTFLETSTDTAVTNEWEKRLSTSPVRLAARQEDAPMIEPLVPEETKEETEISEKVIFLQQGSAPFLESQVKTKHKGFSRRNWSSDFSVIKMLLVFIFPLTFILFKTKVGT

SEQ ID NO: 37743 - protein, 747 aa, Homo sapiens
MLVPVFVLGPAPRHARLTMEVEDSGGVVLTAYHSYARAQPPNAESRCAPRAAASHPLSRKSIPRCRRINRMLSNESLHPPAFSRSNSEASVDSASMEDFWREIESIKDSSMGGQEEPPPAEVTPVDEGELEAEWLQDVGLSTLISGDEEEDGKALLSTLTRTQAAAVQKRYHTYTQTMRKKDKQSIRDVRDIFGVSESPPRDTCGNHTNQLDGTKEERELPRVIKTSGSMPDDASLNSTTLSDASQDKEGSFAVPRSDSVAILETIPVLPVHSNGSPEPGQPVQNAISDDDFLEKNIPPEAEELSFEVSYSEMVTEALKRNKLKKSEIKKEDYVLTKFNVQKTRFGLTEAGDLSAEDMKKIRHLSLIELTAFFDAFGIQLKRNKTEKVKGRDNGIFGVPLTVLLDGDRKKDPGVKVPLVLQKFFEKVEESGLESEGIFRLSGCTAKVKQYREELDAKFNADKFKWDKMCHREAAVMLKAFFRELPTSLFPVEYIPAFISLMERGPHVKVQFQALHLMVMALPDANRDAAQALMTFFNKVIANESKNRMSLWNISTVMAPNLFFSRSKHSDYEELLLANTAAHIIRLMLKYQKILWKVPSFLITQVRRMNEATMLLKKQLPSVRKLLRRKTLERETASPKTSKVLQKSPSARRMSDVPEGVIRVHAPLLSKVSMAIQLNNQTKAKDILAKFQYENSHGSSECIKIQNQRLYEIGGNIGEHCLDPDAYILDVYRINPQAEWVIKPQQSS

SEQ ID NO: 37744 - protein, 393 aa, Homo sapiens
MRGGVLLVLLLCVAAQCRQRGLFPAILNLASNAHISTNATCGEKGPEMFCKLVEHVPGRPVRNPQCRICDGNSANPRERHPISHAIDGTNNWWQSPSIQNGREYHWVTITLDLRQVFQVAYVIIKAANAPRPGNWILERSLDGTTFSPWQYYAVSDSECLSRYNITPRRGPPTYRADDEVICTSYYSRLVPLEHGEIHTSLINGRPSADDLSPKLLEFTSARYIRLRLQRIRTLNADLMTLSHREPKELDPIVTRRYYYSIKDISVGGMCICYGHASSCPWDETTKKLQCQCEHNTCGESCNRCCPGYHQQPWRPGTVSSGNTCEACNCHNKAKDCYYDESVAKQKKSLNTAGQFRGGGVCINCLQNTMGINCETCIDGYYRPHKVRVFLCHC

SEQ ID NO: 37745 - protein, 1645 aa, Homo sapiens
VSAPFSRPAGHRQSVGEQEPRAQPARARSSARRRPGLGLGLPVERRRAERARPRPRPPPRPRPAARVPGPGQGKGRGGELSNRNRGKILAPRARPPLPLPAAPDAEWGQGQGRRTQDPVPAPLEPLEFGLLQLLALWGLGLALCCLPVSPRCLGTKAPGPLRPRAPTHRRRGAARPALSTMRGLGTCLATLAGLLLTAAGETFSGGCLFDEPYSTCGYSQSEGDDFNWEQVNTLTKPTSDPWMPSGSFMLVNASGRPEGQRAHLLLPQLKENDTHCIDFHYFVSSKSNSPPGLLNVYVKVNNGPLGNPIWNISGDPTRTWNRAELAISTFWPNFYQVIFEVITSGHQGYLAIDEVKVLGHPCTRTPHFLRIQNVEVNAGQFATFQCSAIGRTVAGDRLWLQGIDVRDAPLKEIKVTSSRRFIASFNVVNTTKRDAGKYRCMIRTEGGVGISNYAELVVKEPPVPIAPPQLASVGATYLWIQLNANSINGDGPIVAREVEYCTASGSWNDRQPVDSTSYKIGHLDPDTEYEISVLLTRPGEGGTGSPGPALRTRTKCADPMRGPRKLEVVEVKSRQITIRWEPFGYNVTRCHSYNLTVHYCYQVGGQEQVREEVSWDTENSHPQHTITNLSPYTNVSVKLILMNPEGRKESQELIVQTDEDLPGAVPTESIQGSTFEEKIFLQWREPTQTYGVITLYEITYKAVSSFDPEIDLSNQSGRVSKLGNETHFLFFGLYPGTTYSFTIRASTAKGFGPPATNQFTTKISAPSMPAYELETPLNQTDNTVTVMLKPAHSRGAPVSVYQIVVEEERPRRTKKTTEILKCYPVPIHFQNASLLNSQYYFAAEFPADSLQAAQPFTIGDNKTYNGYWNTPLLPYKSYRIYFQAASRANGETKIDCVQVATKGAATPKPVPEPEKQTDHTVKIAGVIAGILLFVIIFLGVVLVMKKRKLAKKRKETMSSTRQEMTVMVNSMDKSYAEQGTNCDEAFSFMDTHNLNGRSVSSPSSFTMKTNTLSTSVPNSYYPDPFVPTAILVPINDETHTMASDTSSLVQSHTYKKREPADVPYQTGQLHPAIRVADLLQHITQMKCAEGYGFKEEYESFFEGQSAPWDSAKKDENRMKNRYGNIIAYDHSRVRLQTIEGDTNSDYINGNYIDGYHRPNHYIATQGPMQETIYDFWRMVWHENTASIIMVTNLVEVGRVKCCKYWPDDTEIYKDIKVTLIETELLAEYVIRTFAVEKRGVHEIREIRQFHFTGWPDHGVPYHATGLLGFVRQVKSKSPPSAGPLVVHCSAGAGRTGCFIVIDIMLDMAEREGVVDIYNCVRELRSRRVNMVQTEEQYVFIHDAILEACLCGDTSVPASQVRSLYYDMNKLDPQTNSSQIKEEFRTLNMVTPTLRVEDCSIALLPRNHEKNRCMDILPPDRCLPFLITIDGESSNYINAALMDSYKQPSAFIVTQHPLPNTVKDFWRLVLDYHCTSVVMLNDVDPAQLCPQYWPENGVHRHGPIQVEFVSADLEEDIISRIFRIYNAARPQDGYRMVQQFQFLGWPMYRDTPVSKRSFLKLIRQVDKWQEEYNGGEGRTVVHCLNGGGRSGTFCAISIVCEMLRHQRTVDVFHAVKTLRNNKPNMVDLLDQYKFCYEVALEYLNSG

SEQ ID NO: 37746 - protein, 1632 aa, Homo sapiens
VSAPFSRPAGHRQSVGEQEPRAQPARARSSARRRPGLGLGLPVERRRAERARPRPRPPPRPRPAARVPGPGQGKGRGGELSNRNRGKILAPRARPPLPLPAAPDAEWGQGQGRRTQDPVPAPLEPLEFGLLQLLALWGLGLALCCLPVSPRCLGTKAPGPLRPRAPTHRRRGAARPALSTMRGLGTCLATLAGLLLTAAGETFSGGCLFDEPYSTCGYSQSEGDDFNWEQVNTLTKPTSDPWMPSGSFMLVNASGRPEGQRAHLLLPQLKENDTHCIDFHYFVSSKSNSPPGLLNVYVKVNNGPLGNPIWNISGDPTRTWNRAELAISTFWPNFYQVIFEVITSGHQGYLAIDEVKVLGHPCTRTPHFLRIQNVEVNAGQFATFQCSAIGRTVAGDRLWLQGIDVRDAPLKEIKVTSSRRFIASFNVVNTTKRDAGKYRCMIRTEGGVGISNYAELVVKEPPVPIAPPQLASVGATYLWIQLNANSINGDGPIVAREVEYCTASGSWNDRQPVDSTSYKIGHLDPDTEYEISVLLTRPGEGGTGSPGPALRTRTKCADPMRGPRKLEVVEVKSRQITIRWEPFGYNVTRCHSYNLTVHYCYQVGGQEQVREEVSWDTENSHPQHTITNLSPYTNVSVKLILMNPEGRKESQELIVQTDEDLPGAVPTESIQGSTFEEKIFLQWREPTQTYGVITLYEITYKAVSSFDPEIDLSNQSGRVSKLGNETHFLFFGLYPGTTYSFTIRASTAKGFGPPATNQFTTKISAPSMPAYELETPLNQTDNTVTVMLKPAHSRGAPVSVYQIVVEEERPRRTKKTTEILKCYPVPIHFQNASLLNSQYYFAAEFPADSLQAAQPFTIGDNKTYNGYWNTPLLPYKSYRIYFQAASRANGETKIDCVQVATKGAATPKPVPEPEKQTDHTVKIAGVIAGILLFVIIFLGVVLVMKKRKLAKKRKETMSSTRQEMTVMVNSMDKSYAEQGTNCDEAFSFMDTHNLNGRSVSSPSSFTMKTNTLSTSVPNSYYPDETHTMASDTSSLVQSHTYKKREPADVPYQTGQLHPAIRVADLLQHITQMKCAEGYGFKEEYESFFEGQSAPWDSAKKDENRMKNRYGNIIAYDHSRVRLQTIEGDTNSDYINGNYIDGYHRPNHYIATQGPMQETIYDFWRMVWHENTASIIMVTNLVEVGRVKCCKYWPDDTEIYKDIKVTLIETELLAEYVIRTFAVEKRGVHEIREIRQFHFTGWPDHGVPYHATGLLGFVRQVKSKSPPSAGPLVVHCSAGAGRTGCFIVIDIMLDMAEREGVVDIYNCVRELRSRRVNMVQTEEQYVFIHDAILEACLCGDTSVPASQVRSLYYDMNKLDPQTNSSQIKEEFRTLNMVTPTLRVEDCSIALLPRNHEKNRCMDILPPDRCLPFLITIDGESSNYINAALMDSYKQPSAFIVTQHPLPNTVKDFWRLVLDYHCTSVVMLNDVDPAQLCPQYWPENGVHRHGPIQVEFVSADLEEDIISRIFRIYNAARPQDGYRMVQQFQFLGWPMYRDTPVSKRSFLKLIRQVDKWQEEYNGGEGRTVVHCLNGGGRSGTFCAISIVCEMLRHQRTVDVFHAVKTLRNNKPNMVDLLDQYKFCYEVALEYLNSG

SEQ ID NO: 37747 - protein, 20 aa, Homo sapiens
VEKDQYKFCYEVALEYLNSG

SEQ ID NO: 37748 - protein, 13 aa, Homo sapiens
LDHSVSSTNGHRW

SEQ ID NO: 37749 - protein, 34 aa, Homo sapiens
VEMIPGKGKKRSILHYNHFDNFLSHFVIQVRAIH

SEQ ID NO: 37750 - protein, 25 aa, Homo sapiens
LWFVWSVVVVCTGRKLLNTACRCFS

SEQ ID NO: 37751 - protein, 40 aa, Homo sapiens
LGHCWSGTGRQIPPLDPHENGNNGTIKVEKPTMQASRRCC

SEQ ID NO: 37752 - protein, 11 aa, Homo sapiens
LHIILGLGGLV

SEQ ID NO: 37753 - protein, 21 aa, Homo sapiens
LSFFVWAPVLTVLQCSWQVEW

SEQ ID NO: 37754 - protein, 125 aa, Homo sapiens
MASASGAMAKHEQILVLDPPTDLKFKGPFTDVVTTNLKLRNPSDRKVCFKVKTTAPRRYCVRPNSGIIDPGSTVTVSVMLQPFDYDPNEKSKHKFMVQTIFAPPNTSDMEAVVSIEEEFVLGSGV

SEQ ID NO: 37755 - protein, 217 aa, Homo sapiens
LPSARFSAGPPTQRSRPTMSNMEKHLFNLKFAAKELSRSAKKCDKEEKAEKAKIKKAIQKGNMEVARIHAENAIRQKNQAVNFLRMSARVDAVAARVQTAVTMGKVTKSMAGVVKSMDATLKTMNLEKISALMDKFEHQFETLDVQTQQMEDTMSSTTTLTTPQNQVDMLLQEMADEAGLDLNMELPQGQTGSVGTSVASAEQDELSQRLARLRDQV

SEQ ID NO: 37756 - protein, 35 aa, Homo sapiens
VDCAISVYPLGFGFCFFFFCLHSETANDCSHNVYY

SEQ ID NO: 37757 - protein, 61 aa, Homo sapiens
LLCCLLGHCQLLWWLQPRLVLSGHTHSACEVHHGGRVPELSVPSFSWRNRNNPSFIMGTDA

SEQ ID NO: 37758 - protein, 32 aa, Homo sapiens
VKGLPHRPVLPICLALCAELESMAVVCILAPV

SEQ ID NO: 37759 - protein, 119 aa, Homo sapiens
LGWARHGAGRRVGSGKQDARLPRPAGCPSRQRRCGTGGGLGTELREQAQGVWSLAAGRRDPVGAGVPPRGAGGGGARRGRDEAERRGPGGAGGRPLGGVLPGGRAAGAAGRTDHQKSPY

SEQ ID NO: 37760 - protein, 323 aa, Homo sapiens [sequence omitted]

SEQ ID NO: 37761 - protein, 31 aa, Homo sapiens
MREIVHIQAGQCGNQIGTKLRNMCPGPPWWT

SEQ ID NO: 37762 - protein, 509 aa, Homo sapiens
LCAPGSSEPGADPRGPQGGSARGVAGRGPSTLRSPPPSQLGAAAGGSGAPGIRPPGRLGWARVAASRALGSERLSPRLALPKFWEVISDEHGIDPAGGYVGDSALQLERINVYYNESSSQKYVPRAALVDLEPGTMDSVRSGPFGQLFRPDNFIFGQTGAGNNWAKGHYTEGAELVDAVLDVVRKECEHCDCLQGFQLTHSLGGGTGSGMGTLLISKIREEFPDRIMNTFSVMPSPKVSDTVVEPYNATLSVHQLVENTDETYCIDNEALYDICFRTLKLTTPTYGDLNHLVSATMSGVTTSLRFPGQLNADLRKLAVNMVPFPRLHFFMPGFAPLTSRGSQQYRALTVPELTQQMFDARNMMAACDPRHGRYLTVATVFRGPMSMKEVDEQMLAIQSKNSSYFVEWIPNNVKVAVCDIPPRGLKMASTFIGNSTAIQELFKRISEQFSAMFRRKAFLHWFTGEGMDEMEFTEAESNMNDLVSEYQQYQDATANDGEEAFEDEEEEIDG

SEQ ID NO: 37763 - protein, 34 aa, Homo sapiens
LACGKGCFLFVAHSSFLFLLSSPVQMGCEIKLES

SEQ ID NO: 37764 - protein, 27 aa, Homo sapiens
LDTLCDLYETLTITQAVIFLNTKHTVN

SEQ ID NO: 37765 - protein, 58 aa, Homo sapiens
LHKFEQLISIYLIFLCLLILILNVQDAARNSNVEIQHLLSVTDELLHVYIRMSWDLCL

SEQ ID NO: 37766 - protein, 18 aa, Homo sapiens
VFLHLLGLIVLIGPPLSL

SEQ ID NO: 37767 - protein, 153 aa, Homo sapiens
LVQKLELDVRSVTSIRRGAEAKTVLPKKEKMKLRREQCLQKIEAIKLAEQKHREERRRRATVVVGHLHPLRDALPELLGLEAGSRRQACSRESNKPWPSELSRMSAAQRQQLLEEGRTRFQELLSSPAYRASTLVAIGQTLARQMQLEDGGQL

SEQ ID NO: 37768 - protein, 58 aa, Homo sapiens
LGESLGRYIFFKRCCLFGFIRKCLSVVIEQSFPHMSKRKGLSLSSGTAITIKISSWKE

SEQ ID NO: 37769 - protein, 81 aa, Homo sapiens [sequence omitted]

SEQ ID NO: 37770 - protein, 33 aa, Homo sapiens
MVLSNFLHELWWLRHRVYILGQKLNGSTKGNLY

SEQ ID NO: 37771 - protein, 56 aa, Homo sapiens
VLSDPEGDGAARMKLVRFLMKLSHETVTIELKNGTQVHGTITVYLWIHYLWMLNLR

SEQ ID NO: 37772 - protein, 159 aa, Homo sapiens
VGLSLILGFSVAYAFYYLSSIAKKPQLVTGGESFSRFLQDHCPVVTETYYPTVWCWEGRGQTLLRPFITSKPPVQYRNELIKTADGGQISLDWFDNDNSTCYMDASTRPTILLLPGLTGTSKESYILHMIHLSEELGYRCVVFNNRGVAGENLLVSKFK

SEQ ID NO: 37773 - protein, 1069 aa, Homo sapiens
LGSGFGLRGDRAAAPVSYSHVPRGSLPPPPTPRVRPGPNSLTGPPAAAAAAAAAAAEPTARAPMSNSRNNRVMVEGVGARVVRGPDWKWGKQDGGEGHVGTVRSFESPEEVVVVWDNGTAANYRCSGAYDLRILDSAPTGIKHDGTMCDTCRQQPIIGIRWKCAECTNYDLCTVCYHGDKHHLRHRFYRITTPGSERVLLESRRKSKKITARGIFAGARVVRGVDWQWEDQDGGNGRRGKVTEIQDWSASSPHSAAYVLWDNGAKNLYRVGFEGMSDLKCVQDAKGGSFYRDHCPVLGEQNGNRNPGGLQIGDLVNIDLDLEIVQSLQHGHGGWTDGMFETLTTTGTVCGIDEDHDIVVQYPSGNRWTFNPAVLTKANIVRSGDAAQGAEGGTSQFQVGDLVQVCYDLERIKLLQRGHGEWAEAMLPTLGKVGRVQQIYSDSDLKVEVCGTSWTYNPAAVSKVASAGSAISNASGERLSQLLKKLFETQESGDLNEELVKAAANGDVAKVEDLLKRPDVDVNGQCAGHTAMQAASQNGHVDILKLLLKQNVDVEAEDKDGDRAVHHAAFGDEGAVIEVLHRGSADLNARNKRRQTPLHIAVNKGHLQVVKTLLDFGCHPSLQDSEGDTPLHDAISKKRDDILAVLLEAGADVTITNNNGFNALHHAALRGNPSAMRVLLSKLPRPWIVDEKKDDGYTALHLAALNNHVEVAELLVHQGNANLDIQNVNQQTALHLAVERQHTQIVRLLVRAGAKLDIQDKDGDTPLHEALRHHTLSQLRQLQDMQDVGKVDAAWEPSKNTLIMGLGTQGAEKKSAASIACFLAANGADLSIRNKKGQSPLDLCPDPNLCKALAKCHKEKVSGQVGSRSPSMISNDSETLEECMVCSDMKRDTLFGPCGHIATCSLCSPRVKKCLICKEQVQSRTKIEECVVCSDKKAAVLFQPCGHMCACENCANLMKKCVQCRAVVERRVPFIMCCGGKSSEDATDDISSGNIPVLQKDKDNTNVNADVQKLQQQLQDIKEQTMCPVCLDRLKNMIFLCGHGTCQLCGDRMSECPICRKAIERRILLY

SEQ ID NO: 37774 - protein, 29 aa, Homo sapiens
LEVQIITAGLSILLFDAILTSATTGCELS

SEQ ID NO: 37775 - protein, 37 aa, Homo sapiens
MYLAMVLLGATHGLIFLPVLLSYIDDLKVPVLQSETG

SEQ ID NO: 37776 - protein, 29 aa, Homo sapiens
LCSISLFFCSWRLPIHCLLYMLCPDRWVV

SEQ ID NO: 37777 - protein, 228 aa, Homo sapiens
LWPGMDVCTFEKVGIRGTNIVVLGVEKKSVAKLQDERTVRKICALDDHVCMAFAGLTADARVVINRARVECQSHKLTVEDPVTVEYITRFIATLKQKYTQSNGRRPFGISALIVGFDDDGISRLYQTDPSGTYHAWKANAIGRSAKTVREFLEKNYTEDAIASDSEAIKLAIKALLEVVQSGGKNIELAIIRRNQPLKMFSAKEVELYVTEIEKEKEEAEKKKSKKSV

SEQ ID NO: 37778 - protein, 917 aa, Homo sapiens
VQRAPVTDFAAAAPAPLPSDAVEPEPHRSRLPRAKPPLTSAPGTAAPKLPLSPWGMPAGLTEPAGAAPPAAVSASGTVTMAPAGALPVRVESTPVALGAVTKAPVSVCVEPTASQPLRSPVGTLVTKVAPVSAPPKVSSGPRLPAPQIVAVKAPNTTTIQFPANLQLPPGTVLIKSNSGPLMLVSPQQTVTRAETTSNITSRPAVPANPQTVKICTVPNSSSQLIKKVAVTPVKKLAQIGTTVVTTVPKPSSVQSVAVPTSVVTVTPGKPLNTVTTLKPSSLGASSTPSNEPNLKAENSAAVQINLSPTMLENVKKCKNFLAMLIKLACSGSQSPEMGQNVKKLVEQLLDAKIEAEEFTRKLYVELKSSPQPHLVPFLKKSVVALRQLLPNSQSFIQQCVQQTSSDMVIATCTTTVTTSPVVTTTVSSSQSEKSIIVSGATAPRTVSVQTLNPLAGPVGAKAGVVTLHSVGPTAATGGTTAGTGLLQTSKPLVTSVANTVTTVSLQPEKPVVSGTAVTLSLPAVTFGETSGAAICLPSVKPVVSSAGTTSDKPVIGTPVQIKLAQPGPVLSQPAGIPQAVQVKQLVVQQPSGGNEKQVTTISHSSTLTIQKCGQKTMPVNTIIPTSQFPPASILKQITLPGNKILSLQASPTQKNRIKENVTSCFRDEDDINDVTSMAGVNLNEENACILATNSELVGTLIQSCKDEPFLFIGALQKRILDIGKKHDITELNSDAVNLISQATQERLRGLLEKLTAIAQHRMTTYKASENYILCSDTRSQLKFLEKLDQLEKQRKDLEEREMLLKAAKSRSNKEDPEQLRLKQKAKELQQLELAQIQHRDANLTALAAIGPRKKRPLESGIEGLKDNLLASGTSSLTATKQLHRPRITRICLRDLIFCMEQEREMKYSRALYLALLK

SEQ ID NO: 37779 - protein, 922 aa, Homo sapiens
VQRAPVTDFAAAAPAPLPSDAVEPEPHRSRLPRAKPPLTSAPGTAAPKLPLSPWGMPAGLTEPAGAAPPAAVSASGTVTMAPAGALPVRVESTPVALGAVTKAPVSVCVEPTASQPLRSPVGTLVTKVAPVSAPPKVSSGPRLPAPQIVAVKAPNTTTIQFPANLQLPPGTVLIKSNSGPLMLVSPQQTVTRAETTSNITSRPAVPANPQTVKICTVPNSSSQLIKKVAVTPVKKLAQIGTTVVTTVPKPSSVQSVAVPTSVVTVTPGKPLNTVTTLKPSSLGASSTPSNEPNLKAENSAAVQINLSPTMLENVKKCKNFLAMLIKLACSGSQSPEMGQNVKKLVEQLLDAKIEAEEFTRKLYVELKSSPQPHLVPFLKKSVVALRQLLPNSQSFIQQCVQQTSSDMVIATCTTTVTTSPVVTTTVSSSQSEKSIIVSGATAPRTVSVQTLNPLAGPVGAKAGVVTLHSVGPTAATGGTTAGTGLLQTSKPLVTSVANTVTTVSLQPEKPVVSGTAVTLSLPAVTFGETSGAAICLPSVKPVVSSAGTTSDKPVIGTPVQIKLAQPGPVLSQPAGIPQAVQVKQLFSLFQVVQQPSGGNEKQVTTISHSSTLTIQKCGQKTMPVNTIIPTSQFPPASILKQITLPGNKILSLQASPTQKNRIKENVTSCFRDEDDINDVTSMAGVNLNEENACILATNSELVGTLIQSCKDEPFLFIGALQKRILDIGKKHDITELNSDAVNLISQATQERLRGLLEKLTAIAQHRMTTYKASENYILCSDTRSQLKFLEKLDQLEKQRKDLEEREMLLKAAKSRSNKEDPEQLRLKQKAKELQQLELAQIQHRDANLTALAAIGPRKKRPLESGIEGLKDNLLASGTSSLTATKQLHRPRITRICLRDLIFCMEQEREMKYSRALYLALLK

SEQ ID NO: 37780 - protein, 328 aa, Homo sapiens
LAGEGMSDRPTARRWGKCGPLCTRENIMVAFKGVWTQAFWKAVTAEFLAMLIFVLLSLGSTINWGGTEKPLPVDMVLISLCFGLSIATMVQCFGHISGGHINPAVTVAMVCTRKISIAKSVFYIAAQCLGAIIGAGILYLVTPPSVVGGLGVTMVHGNLTAGHGLLVELIITFQLVFTIFASCDSKRTDVTGSIALAIGFSVAIGHLFAINYTGASMNPARSFGPAVIMGNWENHWIYWVGPIIGAVLAGGLYEYVFCPDVEFKRRFKEAFSKAAQQTKGSYMEVEDNRSQVETDDLILKPGVVHVIDVDRGEEKKGKDQSGEVLSSV

SEQ ID NO: 37781 - protein, 1039 aa, Homo sapiens
LHPSRLPLRSGPEPSRLRCHSSRLHTLADAHTLSLPVPPPPPQLLDLWVCFITPGASPADSAARYLSSARSPLAGSGEQRRRGWGGEGKGRGWKLPGAVSPRRCWCCRCLLLLRRRRRRRRLLRLFARPLSASMCRIAGALRTLLPLLAALLQASVEASGEIALCKTGFPEDVYSAVLSKDVHEGQPLLNVKFSNCNGKRKVQYESSEPADFKVDEDGMVYAVRSFPLSSEHAKFLIYAQDKETQEKWQVAVKLSLKPTLTEESVKESAEVEEIVFPRQFSKHSGHLQRQKRDWVIPPINLPENSRGPFPQELVRIRSDRDKNLSLRYSVTGPGADQPPTGIFIINPISGQLSVTKPLDREQIARFHLRAHAVDINGNQVENPIDIVINVIDMNDNRPEFLHQVWNGTVPEGSKPGTYVMTVTAIDADDPNALNGMLRYRIVSQAPSTPSPNMFTINNETGDIITVAAGLDREKVQQYTLIIQATDMEGNPTYGLSNTATAVITVTDVNDNPPEFTAMTFYGEVPENRVDIIVANLTVTDKDQPHTPAWNAVYRISGGDPTGRFAIQTDPNSNDGLVTVVKPIDFETNRMFVLTVAAENQVPLAKGIQHPPQSTATVSVTVIDVNENPYFAPNPKIIRQEEGLHAGTMLTTFTAQDPDRYMQQNIRYTKLSDPANWLKIDPVNGQITTIAVLDRESPNVKNNIYNATFLASDNGIPPMSGTGTLQIYLLDINDNAPQVLPQEAETCETPDPNSINITALDYDIDPNAGPFAFDLPLSPVTIKRNWTITRLNGDFAQLNLKIKFLEAGIYEVPIIITDSGNPPKSNISILRVKVCQCDSNGDCTDVDRIVGAGLGTGAIIAILLCIIILLILVLMFVVWMKRRDKERQAKQLLIDPEDDVRDNILKYDEEGGGEEDQDYDLSQLQQPDTVEPDAIKPVGIRRMDERPIHAEPQYPVRSAAPHPGDIGDFINEGLKAADNDPTAPPYDSLLVFDYEGSGSTAGSLSSLNSSSSGGEQDYDYLNDWGPRFKKLADMYGGGDD

SEQ ID NO: 37782 - protein, 920 aa, Homo sapiens
LHLGRSRSRHPPGARVLLALPGIPMAAAGPRRSVRGAVCLHLLLTLVIFSRAGEACKKVILNVPSKLEADKIIGRVNLEECFRSADLIRSSDPDFRVLNDGSVYTARAVALSDKKRSFTIWLSDKRKQTQKEVTVLLEHQKKVSKTRHTRETVLRRAKRRWAPIPCSMQENSLGPFPLFLQQVESDAAQNYTVFYSISGRGVDKEPLNLFYIERDTGNLFCTRPVDREEYDVFDLIAYASTADGYSADLPLPLPIRVEDENDNHPVFTEAIYNFEVLESSRPGTTVGVVCATDRDEPDTMHTRLKYSILQQTPRSPGLFSVHPSTGVITTVSHYLDREVVDKYSLIMKVQDMDGQFFGLIGTSTCIITVTDSNDNAPTFRQNAYEAFVEENAFNVEILRIPIEDKDLINTANWRVNFTILKGNENGHFKISTDKETNEGVLSVVKPLNYEENRQVNLEIGVNNEAPFARDIPRVTALNRALVTVHVRDLDEGPECTPAAQYVRIKENLAVGSKINGYKAYDPENRNGNGLRYKKLHDPKGWITIDEISGSIITSKILDREVETPKNELYNITVLAIDKDDRSCTGTLAVNIEDVNDNPPEILQEYVVICKPKMGYTDILAVDPDEPVHGAPFYFSLPNTSPEISRLWSLTKVNDTAARLSYQKNAGFQEYTIPITVKDRAGQAATKLLRVNLCECTHPTQCRATSRSTGVILGKWAILAILLGIALLFSVLLTLVCGVFGATKGKRFPEDLAQQNLIISNTEAPGDDRVCSANGFMTQTTNNSSQGFCGTMGSGMKNGGQETIEMMKGGNQTLESCRGAGHHHTLDSCRGGHTEVDNCRYTYSEWHSFTQPRLGEKLHRCNQNEDRMPSQDYVLTYNYEGRGSPAGSVGCCSEKQEEDGLDFLNNLEPKFITLAEACTKR

SEQ ID NO: 37783 - protein, 863 aa, Homo sapiens
LHLGRSRSRHPPGARVLLALPGIPMAAAGPRRSVRGAVCLHLLLTLVIFSRAGEACKKVILNVPSKLEADKIIGRVNLEECFRSADLIRSSDPDFRVLNDGSVYTARAVALSDKKRSFTIWLSDKRKQTQKEVTVLLEHQKKVSKTRHTRETVLRRAKRRWAPIPCSMQENSLGPFPLFLQQVESDAAQNYTVFYSISGRGVDKEPLNLFYIERDTGNLFCTRPVDREEYDVFDLIAYASTADGYSADLPLPLPIRVEDENDNHPVFTEAIYNFEVLESSRPGTTVGVVCATDRDEPDTMHTRLKYSILQQTPRSPGLFSVHPSTGVITTVSHYLDREVVDKYSLIMKVQDMDGQFFGLIGTSTCIITVTDSNDNAPTFRQNAYEAFVEENAFNVEILRIPIEDKDLINTANWRVNFTILKGNENGHFKISTDKETNEGVLSVVKPLNYEENRQVNLEIGVNNEAPFARDIPRVTALNRALVTVHVRDLDEGPECTPAAQYVRIKENLAVGSKINGYKAYDPENRNGNGLRYKKLHDPKGWITIDEISGSIITSKILDREVETPKNELYNITVLAIDKDDRSCTGTLAVNIEDVNDNPPEILQEYVVICKPKMGYTDILAVDPDEPVHGAPFYFSLPNTSPEISRLWSLTKVNDTAARLSYQKNAGFQEYTIPITVKDRAGQAATKLLRVNLCECTHPTQCRATSRSTGVILGKWAILAILLGIALLFSVLLTLVCGVFGATKGKRFPEDLAQQNLIISNTEAPGDDRVCSANGFMTQTTNNSSQGFCGTMGSGMKNGGQETIEMMKGGNQTLESCRGAGHHHTLDSCRGGHTEVDNCRYTYSEWHSFTQPRLGEESIRGHTG

SEQ ID NO: 37784 - protein, 66 aa, Homo sapiens
LNFSDYQRLFLRMWHLPWVQAVVLLLPMNELLHLNIREQAQSQLHYEEHLHNHNRSSKMGPLVVEG

SEQ ID NO: 37785 - protein, 18 aa, Homo sapiens
LLQTETARRPGNKICSCA

SEQ ID NO: 37786 - protein, 1176 aa, Homo sapiens
LGWAGLGRATATGRQPSGRGGRGWPGRGEAGAREEPSARSGQAAARSGAAAGGGGEGAMARSPGRAYALLLLLICFNVGSGLHLQVLSTRNENKLLPKHPHLVRQKRAWITAPVALREGEDLSKKNPIAKIHSDLAEERGLKITYKYTGKGITEPPFGIFVFNKDTGELNVTSILDREETPFFLLTGYALDARGNNVEKPLELRIKVLDINDNEPVFTQDVFVGSVEELSAAHTLVMKINATDADEPNTLNSKISYRIVSLEPAYPPVFYLNKDTGEIYTTSVTLDREEHSSYTLTVEARDGNGEVTDKPVKQAQVQIRILDVNDNIPVVENKVLEGMVEENQVNVEVTRIKVFDADEIGSDNWLANFTFASGNEGGYFHIETDAQTNEGIVTLIKEVDYEEMKNLDFSVIVANKAAFHKSIRSKYKPTPIPIKVKVKNVKEGIHFKSSVISIYVSESMDRSSKGQIIGNFQAFDEDTGLPAHARYVKLEDRDNWISVDSVTSEIKLAKLPDFESRYVQNGTYTVKIVAISEDYPRKTITGTVLINVEDINDNCPTLIEPVQTICHDAEYVNVTAEDLDGHPNSGPFSFSVIDKPPGMAEKWKIARQESTSVLLQQSEKKLGRSEIQFLISDNQGFSCPEKQVLTLTVCECLHGSGCREAQHDSYVGLGPAAIALMILAFLLLLLVPLLLLMCHCGKGAKGFTPIPGTIEMLHPWNNEGAPPEDKVVPSFLPVDQGGSLVGRNGVGGMAKEATMKGSSSASIVKGQHEMSEMDGRWEEHRSLLSGRATQFTGATGAIMTTETTKTARATGASRDMAGAQAAAVALNEEFLRNYFTDKAASYTEEDENHTAKDCLLVYSQEETESLNASIGCCSFIEGELDDRFLDDLGLKFKTLAEVCLGQKIDINKEIEQRQKPATETSMNTASHSLCEQTMVNSENTYSSGSSFPVPKSLQEANAEKVTQEIVTERSVSSRQAQKVATPLPDPMASRNVIATETSYVTGSTMPPTTVILGPSQPQSLIVTERVYAPASTLVDQPYANEGTVVVTERVIQPHGGGSNPLEGTQHLQDVPYVMVRERESFLAPSSGVQPTLAMPNIAVGQNVTVTERVLAPASTLQSSYQIPTENSMTARNTTVSGAGVPGPLPDFGLEESGHSNSTITTSSTRVTKHSTVQHSYS

SEQ ID NO: 37787 - protein, 403 aa, Homo sapiens
LDSGPESGLRAQPGLLAGKRKMSVLRRMMRVSNRSLLAFIFFFSLSSSCLYFIYVAPGIANTYLFMVQARGIMLRENVKTIGHMIRLYTNKNSTLNGTDYPEGNNSSDYLVQTTTYLPENFTYSPYLPCPEKLPYMRGFLNVNVSEVSFDEIHQLFSKDLDIEPGGHWRPKDCKPRWKVAVLIPFRNRHEHLPIFFLHLIPMLQKQRLEFAFYVIEQTGTQPFNRAMLFNVGFKEAMKDSVWDCVIFHDVDHLPENDRNYYGCGEMPRHFAAKLDKYMYILPYKEFFGGVSGLTVEQFRKINGFPNAFWGWGGEDDDLWNRVHYAGYNVTRPEGDLGKYKSIPHHHRGEVQFLGRYKLLRYSKERQYIDGLNNLIYRPKILVDRLYTNISVNLMPELAPIEDY

SEQ ID NO: 37788 - protein, 364 aa, Homo sapiens
LDSGPESGLRAQPGLLAGKRKMSVLRRMMRVSNRSLLAFIFFFSLSSSCLYFIYVAPGIDYPEGNNSSDYLVQTTTYLPENFTYSPYLPCPEKLPYMRGFLNVNVSEVSFDEIHQLFSKDLDIEPGGHWRPKDCKPRWKVAVLIPFRNRHEHLPIFFLHLIPMLQKQRLEFAFYVIEQTGTQPFNRAMLFNVGFKEAMKDSVWDCVIFHDVDHLPENDRNYYGCGEMPRHFAAKLDKYMYILPYKEFFGGVSGLTVEQFRKINGFPNAFWGWGGEDDDLWNRVHYAGYNVTRPEGDLGKYKSIPHHHRGEVQFLGRYKLLRYSKERQYIDGLNNLIYRPKILVDRLYTNISVNLMPELAPIEDY

SEQ ID NO: 37789 - protein, 364 aa, Homo sapiens
LDSGPESGLRAQPGLLAGKRKMSVLRRMMRVSNRSLLAFIFFFSLSSSCLYFIYVAPGIANTYLFMVQARGIMLRENVKTIGHMIRLYTNKNSTLNGTDYPEGNNSSDYLVQTTTYLPENFTYSPYLPCPEKLPYMRGFLNVNVSEVSFDEIHQLFSKDLDIEPGGHWRPKDCKPRWKTGTQPFNRAMLFNVGFKEAMKDSVWDCVIFHDVDHLPENDRNYYGCGEMPRHFAAKLDKYMYILPYKEFFGGVSGLTVEQFRKINGFPNAFWGWGGEDDDLWNRVHYAGYNVTRPEGDLGKYKSIPHHHRGEVQFLGRYKLLRYSKERQYIDGLNNLIYRPKILVDRLYTNISVNLMPELAPIEDY

SEQ ID NO: 37790 - protein, 84 aa, Homo sapiens
LIFGIKQQEALEIHGSFTWLGQTQYKLQLKSQEIHSLQLKACFVHTGVYNLGTPRVFAKLSDQVTVFETSQQNSMPALIIISNV

SEQ ID NO: 37791 - protein, 188 aa, Homo sapiens
MRSGAYCMRVSRSCSSHSTDIWKSASSDSTGGGSESSRARISSKLSSSTSSTSNSSGSSDGKVAAEAEAPRGLVSMPGQMKGKAGKWGAGGALKAQRRPTAKVPGLSRKGPSACIPPARRPAGPPARPPGGEPPPPPGSEGSRRTCPFHCGSLCPAWRRSWIAGFLFIPDWAPFDSLYHPVPGWRLRC

SEQ ID NO: 37792 - protein, 11 aa, Homo sapiens
VAGAAFFMSLG

SEQ ID NO: 37793 - protein, 289 aa, Homo sapiens
VRSRRASGKTQPPSSPASPQRFVPLLGSAPMPGPTQTLSPNGENNNDIIQDNNGTIIPFRKHTVRGERSYSWGMAVNVYSTSITQETMSRHDIIAWVNDIVSLNYTKVEQLCSGAAYCQFMDMLFPGCISLKKVKFQAKLEHEYIHNFKLLQASFKRMNVDKVIPVEKLVKGRFQDNLDFIQWFKKFYDANYDGKEYDPVEARQGQDAIPPPDPGEQIFNLPKKSHHANSPTAGAAKSSPAAKPGSTPSRPSSAKRASSSGSASKSDKDLETQVIQLNEQVMHQLWPRL

SEQ ID NO: 37794 - protein, 357 aa, Homo sapiens
VRSRRASGKTQPPSSPASPQRFVPLLGSAPMPGPTQTLSPNGENNNDIIQDNNGTIIPFRKHTVRGERSYSWGMAVNVYSTSITQETMSRHDIIAWVNDIVSLNYTKVEQLCSGAAYCQFMDMLFPGCISLKKVKFQAKLEHEYIHNFKLLQASFKRMNVDKVIPVEKLVKGRFQDNLDFIQWFKKFYDANYDGKEYDPVEARQGQDAIPPPDPGEQIFNLPKKSHHANSPTAGAAKSSPAAKPGSTPSRPSSAKRASSSGSASKSDKDLETQVIQLNEQVHSLKLALEGVEKERDFYFGKLREIELLCQEHGQENDDLVQRLMDILYASEEHEGHTEEPEAEEQAHEQQPPQQEEY

SEQ ID NO: 37795 - protein, 156 aa, Homo sapiens
LWLAARGGWLISWPLLGFAVPASPQGPAVPWKDLTCLRASQESTDIHLQPLKTQLKSWKPCLSPKSDCENSETATKEGISEEKSQGLPQEPSFRGIKLSRPPKASSAIRWECVSPGSFPGDIIAAEATHSTISCFAINTLPATILPSKNVNRKYFS

SEQ ID NO: 37796 - protein, 205 aa, Homo sapiens
LLLTSLFLFYSWAYTSSHDDKSTFEETCPYCFQLLVLDNSRVRLKPKARLTPKIQKLLNREARNYTLSFKEAKMVKKFKDSKSVLLITCKTCNRTVKHHGKSRSFVSTLKSNPATPTSKLSLKTPERRTANPNHDMSGSKGKSPASVFRTPTSGQSVSTCSSKNTSKTKKHFSQLKMLLSQNESQKIPKVDFRNFLSSLKGGLLK

SEQ ID NO: 37797 - protein, 31 aa, Homo sapiens
MGPTKMFPDPWNAKFKFSYVSRRGRWKKQRE

SEQ ID NO: 37798 - protein, 1197 aa, Homo sapiens
LVVKTALKLLLVFVEYSESNAPLLIQAVTAVDTKRGVKPWSNIMEILEEKDGVDTELLVYAMTLVNKTLSGLPDQDTFYDVVDCLEELGIAAVSQRHLNKKGTDLDLVEQLNIYEVALRHEDGDETTEPPPSGCRDRRRASVCSSGGGEHRGLDRRRSRRHSVQSIKSTLSAPTSPCSQSAPSFKPNQVRDLREKSSPSGLLTSSFRQHQESLAAERERRRQEREERLQRIEREERNKFSRDYLDKREEQRQAREERYKYLEQLAAEEHEKELRSRSVSRGRADLSLDLTSPAAPACLAPLSHSPSSSDSQEALTVSASSPGTPHHPQASAGDPEPESEAEPEAEAGAGQVADEAGQDIASAHEGAETEVEQALEQEPEERASLSEKERQNEGVNERDNCSASSVSSSSSTLEREEKEDKLSRDRTTGLWPAGVQDAGVNGQCGDILTNKRFMLDMLYAHNRKSPDDEEKGDGEAGRTQQEAEAVASLATRISTLQANSQTQDESVRRVDVGCLDNRGSVKAFAEKFNSGDLGRGSISPDAEPNDKVPETAPVQPKTESDYIWDQLMANPRELRIQDMDFTDLGEEDDIDVLDVDLGHREAPGPPPPPPPTFLGLPPPPPPPLLDSIPPPPVPGNLLVPPPPVFNAPQGLGWSQVPRGQPTFTKKKKTIRLFWNEVRPFDWPCKNNRRCREFLWSKLEPIKVDTSRLEHLFESKSKELSVSKKTAADGKRQEIIVLDSKRSNAINIGLTVLPPPRTIKIAILNFDEYALNKEGIEKILTMIPTDEEKQKIQEAQLANPEIPLGSAEQFLLTLSSISELSARLHLWAFKMDYETTEKEVAEPLLDLKEGIDQLENNKTLGFILSTLLAIGNFLNGTNAKAFELSYLEKVPEVKDTVHKQSLLHHVCTMVVENFPDSSDLYSEIGAITRSAKVDFDQLQDNLCQMERRCKASWDHLKAIAKHEMKPVLKQRMSEFLKDCAERIIILKIVHRRIINRFHSFLLFMGHPPYAIREVNINKFCRIISEFALEYRTTRERVLQQKQKRANHRERNKTRGKMITDSGKFSGSSPAPPSQPQGLSYAEDAAEHENMKAVLKTSSPSVEDATPALGVRTRSRASRGSTSSWTMGTDDSPNVTDDAADEIMDRIVKSATQVPSQRVVPRERKRSRANRKSLRRTLKSGLTPEEARALGLVGTSELQL

SEQ ID NO: 37799 - protein, 302 aa, Homo sapiens
VRCGAPGGAAGTGAPRSCCCQTNPGPPSSLRRAFRRRELPFPACHEIGLGAEAGSGPPPAPAARESRSRAMEEEASSPGLGCSKPHLEKLTLGITRILESSPGVTEVTIIEKPPAERHMISSWEQKNNCVMPEDVKNFYLMTNGFHMTWSVKLDEHIIPLGSMAINSISKLTQLTQSSMYSLPNAPTLADLEDDTHEASDDQPEKPHFDSRSVIFELDSCNGSGKVCLVYKSGKPALAEDTEIWFLDRALYWHFLTDTFTAYYRLLITHLGLPQWQYAFTSYGISPQAKPKGSEGRSKRGCF

SEQ ID NO: 37800 - protein, 200 aa, Homo sapiens
VRCGAPGGAAGTGAPRSCCCQTNPGPPSSLRRAFRRRELPFPACHEIGLGAEAGSGPPPAPAARESRSRAMEEEASSPGLGCSKPHLEKLTLGITRILESSPGVTEVTIIEKPPAERHMISSWEQKNNCVMPEDVKNFYLMTNGFHMTWSVKLDEHIIPLGSMAINSISKLTQLTQSSMYSLPNAPTLADLEDDTHEDNL

SEQ ID NO: 37801 - protein, 306 aa, Homo sapiens
LRRAFRRRELPFPACHEIGLGAEAGSGPPPAPAARESRSRAMEEEASSPGLGCSKPHLEKLTLGITRILESSPGVTEVTIIEKPPAERHMISSWEQKNNCVMPEDVKNFYLMTNGFHMTWSVKLDDLEDDTHEASDDQPEKPHFDSRSVIFELDSCNGSGKVCLVYKSGKPALAEDTEIWFLDRALYWHFLTDTFTAYYRLLITHLGLPQWQYAFTSYGISPQAKQWFSMYKPITYNTNLLTEETDSFVNKLDPSKVFKSKNKIVIPKKKGPVQPAGGQKGPSGPSGPSTSSTSKSSSGSGNPTRK

SEQ ID NO: 37802 - protein, 370 aa, Homo sapiens
VRCGAPGGAAGTGAPRSCCCQTNPGPPSSLRRAFRRRELPFPACHEIGLGAEAGSGPPPAPAARESRSRAMEEEASSPGLGCSKPHLEKLTLGITRILESSPGVTEVTIIEKPPAERHMISSWEQKNNCVMPEDVKNFYLMTNGFHMTWSVKLDEHIIPLGSMAINSISKLTQLTQSSMYSLPNAPTLADLEDDTHEASDDQPEKPHFDSRSVIFELDSCNGSGKVCLVYKSGKPALAEDTEIWFLDRALYWHFLTDTFTAYYRLLITHLGLPQWQYAFTSYGISPQAKQWFSMYKPITYNTNLLTEETDSFVNKLDPSKVFKSKNKIVIPKKKGPVQPAGGQKGPSGPSGPSTSSTSKSSSGSGNPTRK

SEQ ID NO: 37803 - protein, 327 aa, Homo sapiens
VRCGAPGGAAGTGAPRSCCCQTNPGPPSSLRRAFRRRELPFPACHEIGLGAEAGSGPPPAPAARESRSRAMEEEASSPGLGCSKPHLEKLTLGITRILESSPGVTEVTIIEKPPAERHMISSWEQKNNCVMPEDVKNFYLMTNGFHMTWSVKLDASDDQPEKPHFDSRSVIFELDSCNGSGKVCLVYKSGKPALAEDTEIWFLDRALYWHFLTDTFTAYYRLLITHLGLPQWQYAFTSYGISPQAKQWFSMYKPITYNTNLLTEETDSFVNKLDPSKVFKSKNKIVIPKKKGPVQPAGGQKGPSGPSGPSTSSTSKSSSGSGNPTRK

SEQ ID NO: 37804 - protein, 145 aa, Homo sapiens
VRCGAPGGAAGTGAPRSCCCQTNPGPPSSLRRAFRRRELPFPACHEIGLGAEAGSGPPPAPAARESRSRAMEEEASSPGLGCSKPHLEKLTLGITRILESSPGVTEVTIIEKPPAERHMISSWEQMKKQRLKEFKEFGRHSGSCL

SEQ ID NO: 37805 - protein, 130 aa, Homo sapiens
VRCGAPGGAAGTGAPRSCCCQTNPGPPSSLRRAFRRRELPFPACHEIGLGAEAGSGPPPAPAARESRSRAMEEEASSPGLGCSKPHLEKLTLGITRILESSPGVTEVTIIEKPPAERHMISSWEQVSVAT

SEQ ID NO: 37806 - protein, 515 aa, Homo sapiens
VYACACVSASERERGARECERERIKGKKIFSMYIKMATLANGQADNASLSTNGLGSSPGSAGHMNGLSHSPGNPSTIPMKDHDAIKLFIGQIPRNLDEKDLKPLFEEFGKIYELTVLKDRFTGMHKGCAFLTYCERESALKAQSALHEQKTLPGMNRPIQVKPADSESRGGSSCLRQPPSHRKLFVGMLNKQQSEDDVRRLFEAFGNIEECTILRGPDGNSKGCAFVKYSSHAEAQAAINALHGSQTMPGASSSLVVKFADTDKERTMRRMQQMAGQMGMFNPMAIPFGAYGAYAQALMQQQAALMASVAQGGYLNPMAAFAAAQMQQMAALNMNGLAAAPMTPTSGGSTPPGITAPAVPSIPSPIGVNGFTGLPPQANGQPAAEAVFANGIHPYPAQSPTAADPLQQAYAGVQQYAAAAYPAAYGQISQAFPQPPPMIPQQQREGPEGCNLFIYHLPQEFGDAELMQMFLPFGFVSFDNPASAQTAIQAMNGFQIGMKRLKVQLKRPKDANRPY

SEQ ID NO: 37807 - protein, 517 aa, Homo sapiens
VYACACVSASERERGARECERERIKGKKIFSMYIKMATLANGQADNASLSTNGLGSSPGSAGHMNGLSHSPGNPSTIPMKDHDAIKLFIGQIPRNLDEKDLKPLFEEFGKIYELTVLKDRFTGMHKGCAFLTYCERESALKAQSALHEQKTLPGMNRPIQVKPADSESRGGSSCLRQPPSQDRKLFVGMLNKQQSEDDVRRLFEAFGNIEECTILRGPDGNSKGCAFVKYSSHAEAQAAINALHGSQTMPGASSSLVVKFADTDKERTMRRMQQMAGQMGMFNPMAIPFGAYGAYAQALMQQQAALMASVAQGGYLNPMAAFAAAQMQQMAALNMNGLAAAPMTPTSGGSTPPGITAPAVPSIPSPIGVNGFTGLPPQANGQPAAEAVFANGIHPYPAQSPTAADPLQQAYAGVQQYAGPAAYPAAYGQISQAFPQPPPMIPQQQREGPEGCNLFIYHLPQEFGDAELMQMFLPFGFVSFDNPASAQTAIQAMNGFQIGMKRLKVQLKRPKDANRPY

SEQ ID NO: 37808 - protein, 515 aa, Homo sapiens
VYACACVSASERERGARECERERIKGKKIFSMYIKMATLANGQADNASLSTNGLGSSPGSAGHMNGLSHSPGNPSTIPMKDHDAIKLFIGQIPRNLDEKDLKPLFEEFGKIYELTVLKDRFTGMHKGCAFLTYCERESALKAQSALHEQKTLPGMNRPIQVKPADSESRGGSSCLRQPPSHRKLFVGMLNKQQSEDDVRRLFEAFGNIEECTILRGPDGNSKGCAFVKYSSHAEAQAAINALHGSQTMPGASSSLVVKFADTDKERTMRRMQQMAGQMGMFNPMAIPFGAYGAYAQLMQQQAALMASVAQGGYLNPMAAFAAAQMQQMAALNMNGLAAAPMTPTSGGSTPPGITAPAVPSIPSPIGVNGFTGLPPQANGQPAAEAVFANGIHPYPAQSPTAADPLQQAYAGVQQYAGPAAYPAAYGQISQAFPQPPPMIPQQQREGPEGCNLFIYHLPQEFGDAELMQMFLPFGFVSFDNPASAQTAIQAMNGFQIGMKRLKVQLKRPKDANRPY

SEQ ID NO: 37809 - protein, 515 aa, Homo sapiens
VYACACVSASERERGARECERERIKGKKIFSMYIKMATLANGQADNASLSTNGLGSSPGSAGHMNGLSHSPGNPSTIPMKDHDAIKLFIGQIPRNLDEKDLKPLFEEFGKIYELTVLKDRFTGMHKGCAFLTYCERESALKAQSALHEQKTLPGMNRPIQVKPADSESRGGSSCLRQPPSHRKLFVGMLNKQQSEDDVRRLFEAFGNIEECTILRGPDGNSKGCAFVKYSSHAEAQAAINALHGSQTMPGASSSLVVKFADTDKERTMRRMQQMAGQMGMFNPMAIPFGAYGAYAQAMQQQAALMASVAQGGYLNPMAAFAAAQMQQMAALNMNGLAAAPMTPTSGGSTPPGITAPAVPSIPSPIGVNGFTGLPPQANGQPAAEAVFANGIHPYPAQSPTAADPLQQAYAGVQQYAGPAAYPAAYGQISQAFPQPPPMIPQQQREGPEGCNLFIYHLPQEFGDAELMQMFLPFGFVSFDNPASAQTAIQAMNGFQIGMKRLKVQLKRPKDANRPY

SEQ ID NO: 37810 - protein, 516 aa, Homo sapiens
VYACACVSASERERGARECERERIKGKKIFSMYIKMATLANGQADNASLSTNGLGSSPGSAGHMNGLSHSPGNPSTIPMKDHDAIKLFIGQIPRNLDEKDLKPLFEEFGKIYELTVLKDRFTGMHKGCAFLTYCERESALKAQSALHEQKTLPGMNRPIQVKPADSESRGGSSCLRQPPSQDRKLFVGMLNKQQSEDDVRRLFEAFGNIEECTILRGPDGNSKGCAFVKYSSHAEAQAAINALHGSQTMPGASSSLVVKFADTDKERTMRRMQQMAGQMGMFNPMAIPFGAYGAYAQAMQQQAALMASVAQGGYLNPMAAFAAAQMQQMAALNMNGLAAAPMTPTSGGSTPPGITAPAVPSIPSPIGVNGFTGLPPQANGQPAAEAVFANGIHPYPAQSPTAADPLQQAYAGVQQYAGPAAYPAAYGQISQAFPQPPPMIPQQQREGPEGCNLFIYHLPQEFGDAELMQMFLPFGFVSFDNPASAQTAIQAMNGFQIGMKRLKVQLKRPKDANRPY

SEQ ID NO: 37811 - protein, 87 aa, Homo sapiens
LLFFSFLLFFRYSNLILNLFSLMVDANIPDIALEPDKTVKKVQDKFRLDLSDEEAVHYMQSLIDESVHALFAAVVEQIHKFAQYWRK

SEQ ID NO: 37812 - protein, 85 aa, Homo sapiens
LEGAKQFRKQLKIKGFTMEEKIQVPSWKCLWLKRDEDEGPWKEEEPARKIIPLARLASASSSQCWLFLVSQDFIGDGPSPKSLIF

SEQ ID NO: 37813 - protein, 32 aa, Homo sapiens
LDHFVLGILGVLFSHLSLFPFPLPPPENSGRL

SEQ ID NO: 37814 - protein, 416 aa, Homo sapiens
MDPGFRGQRKVERGSPKSCFLFLGSVLCEVNWVSVLSDAWNSSPHPETRSMIVCLLFMMILLAKEVQLVDQTDSPLLSLLGQTSSLSWHLVDIVSYQSVLSYFSSHYPPSIILAKESYAELIMKLLKVSAGLSIPTDSQKHLDAVPKCQAFTHQMVQFLSTLEQNGKITLAVLEQEMSKLLDDIIVFNPPDMDSQTRHMALSSLFMEVLMMMNNATIPTAEFLRGSIRTWIGQKMHGLVVLPLLTAACQSLASVRHMAETTEACITAYFKESPLNQNSGWGPILVSLQVPELTMEEFLQECLTLGSYLTLYVYLLQCLNSEQTLRNEMKVLLILSKWLEQVYPSSVEEEAKLFLWWHQVLQLSLIQTEQNDSVLTESVIRILLLVQSRQNLVAEERLSSGILGAIGFGRKSPLSNR

SEQ ID NO: 37815 - protein, 1406 aa, Homo sapiens
LKNEQFLSHLLLFLHLDSGVPQGVTQQVTHKVAQHLTGASHGDNVKLLNSMIQAHISVSTQPNEVGPVAVLEFWVQALISQHLWYREQPILFLMDHLCKAAFQLMQEDCIQKLLYQQHKNALGYHCDRSLLSSLVSWIVAGNITPSFVEGLATPTQVWFAWTVLNMESIFEEDSQLRRVIEGELVINSAFTPDQALKKAQTQLKLPIVPSLQRLLIYRWAHQALVTPSDHPLLPLIWQKFFLLYLHRPGPQYGLPIDGCIGRRFFQSPAHINLLKEMKRRLTEVADFHHAASKALRVPAEGSEGLPESHSGTPGYLTSPELHKELVRLFNVYILWLEDENFQKGDTYIPSLPKHYDIHRLAKVMQNQQDLWMEYLNMERIYHEFQETVGLWTQAKLESHSTPCSLSVQLDFTDPLLAKERVLSNLRKHEAPQPPLALHPTKPPVPVISSAVLLSQKDATQLVCTDLNLLQQQARTAALRESQQVALDGELLDTMPKQYVNREEQTTLHLECRGSSGKKCQGAAVVTVQFEGMHKNEAISQQLHVLRKEVKQLQAEAAKPPSLNIVEAAVHAENLITALVNAYKLQPTPGIQKVGISLFFTIVDYVSDETQRHPPTRQFFTSCIEILGQVFISGIKSECRKVLETILKNSRLCSLLSPFFTPNAAPAEFIQLYEQVVKFLSEDNSDMIFMLLTKFDLKQWLSATKPPLSDRTRLLESIHLALTAWGLEPDEDILMPFNLFCKHWTYLLLYQFPDQYSDILRLLMQSSAEQLLSPECWKATLRALGCCAPSCQQGAASTEGAVLPSSSDALLSDKQVMETIQWLSDFFYKLRLSKMDFKSFGLFSKWSPYMADVKTFLGYLVKRLIDLEMTCLAQDPTASRKTVLKSLHSVIIQLFKPWILVLEDNESSQQRHYPWLESDTVVASSIVQLFTDCIDSLHESFKDKLLPGDAGALWLHLMHYCEACTAPKMPEFILYAFHSTYRKLPWKDLHPDQMLMEAFFKVERGSPKSCFLFLGSVLCEVNWVSVLSDAWNSSPHPETRSMIVCLLFMMILLAKEVQLVDQTDSPLLSLLGQTSSLSWHLVDIVSYQSVLSYFSSHYPPSIILAKESYAELIMKLLKVSAGLSIPTDSQKHLDAVPKCQAFTHQMVQFLSTLEQNGKITLAVLEQEMSKLLDDIIVFNPPDMDSQTRHMALSSLFMEVLMMMNNATIPTAEFLRGSIRTWIGQKMHGLVVLPLLTAACQSLASVRHMAETTEACITAYFKESPLNQNSGWGPILVSLQVPELTMEEFLQECLTLGSYLTLYVYLLQCLNSEQTLRNEMKVLLILSKWLEQVYPSSVEEEAKLFLWWHQVLQLSLIQTEQNDSVLTESVIRILLLVQSRQNLVAEERLSSGILGAIGFGRKSPLSNR

SEQ ID NO: 37816 - protein, 10 aa, Homo sapiens
LFLIFGVCTL

SEQ ID NO: 37817 - protein, 33 aa, Homo sapiens
LLLFPNRADGKISEQSDAKLKEIVTNFLAGFEA

SEQ ID NO: 37818 - protein, 175 aa, Homo sapiens
LSSIGTAEMSSILEERILGADTSVDLEETGRVLSIGDGIARVHGLRNVQAEEMVEFSSGLKGMSLNLEPDNVGVVVFGNDKLIKEGDIVKRTGAIVDVPVGEELLGRVVDALGNAIDGKGPIGSKTRRRVGLKAPGIIPRISVREPMQTGIKAVDSLVPIGRGQRELIIGDRQTG

SEQ ID NO: 37819 - protein, 44 aa, Homo sapiens
VDLMLYLGIFLLYLLKKNTIRRIRMYHKKSDAKHVNVIGKFYRV

SEQ ID NO: 37820 - protein, 49 aa, Homo sapiens [sequence omitted]

SEQ ID NO: 37821 - protein, 61 aa, Homo sapiens
LKKIEELGKKGDGENSEEENEKEEGSKEESKEGDDDDDDDAAEQEGYNEEEQEEENDYINS

SEQ ID NO: 37822 - protein, 27 aa, Homo sapiens
LEDKRESKPLVGESMAAMMAFLRTPLD

SEQ ID NO: 37823 - protein, 70 aa, Homo sapiens
VAEDTGLVPNWLLLLPVASMAEDWLDCPALGPGWKRREVFRKSGATCGRSDTYYQRYWVGSGQSQEWGRA

SEQ ID NO: 37824 - protein, 673 aa, Homo sapiens
LAGVVRECAGSGDMEGDGSDPEPPDAGEDSKSENGENAPIYCICRKPDINCFMIGCDNCNEWFHGDCIRITEKMAKAIREWYCRECREKDPKLEIRYRHKKSRERDGNERDSSEPRDEGGGRKRPVPDPDLQRRAGSGTGVGAMLARGSASPHKSSPQPLVATPSQHHQQQQQQIKRSARMCGECEACRRTEDCGHCDFCRDMKKFGGPNKIRQKCRLRQCQLRARESYKYFPSSLSPVTPSESLPRPRRPLPTQQQPQPSQKLGRIREDEGAVASSTVKEPPEATATPEPLSDEDLPLDPDLYQDFCAGAFDDHGLPWMSDTEESPFLDPALRKRAVKVKHVKRREKKSEKKVMERKEERYKRHRQKQKHKDKWKHPERADAKDPASLPQCLGPGCVRPAQPSSKYCSDDCGMKLAANRIYEILPQRIQQWQQSPCIAEEHGKKLLERIRREQQSARTRLQEMERRFHELEAIILRAKQQAVREDEESNEGDSDDTDLQIFCVSCGHPINPRVALRHMERCYAKYESQTSFGSMYPTRIEGATRLFCDVYNPQSKTYCKRLQVLCPEHSRDPKVPADEVCGCPLVRDVFELTGDFCRLPKRQCNRHYCWEKLRRAEVDLERVRVWYKLDELFEQERNVRTAMTNRAGLLALMLHQTIQHDPLTTDLRSSADR

SEQ ID NO: 37825 - protein, 626 aa, Homo sapiens
LAGVVRECAGSGDMEGDGSDPEPPDAGEDSKSENGENAPIYCICRKPDINCFMIGCDNCNEWFHGDCIRITEKMAKAIREWYCRECREKDPKLEIRYRHKKSRERDGNERDSSEPRDEGGGRKRPVPDPDLQRRAGSGTGVGAMLARGSASPHKSSPQPLVATPSQHHQQQQQQIKRSARMCGECEACRRTEDCGHCDFCRDMKKFGGPNKIRQKCRLRQCQLRARESYKYFPSSLSPVTPSESLPRPRRPLPTQQQPQPSQKLGRIREDEGAVASSTVKEPPEATATPEPLSDEDLPLDPDLYQDFCAGAFDDHGLPWMSDTEESPFLDPALRKRAVKVKHVKRREKKSEKKKEERYKRHRQKQKHKDKWKHPERADAKDPASLPQCLGPGCVRPAQPSSKYCSDDCGMKLAANRIYEILPQRIQQWQQSPCIAEEHGKKLLERIRREQQSARTRLQEMERRFHELEAIILRAKQQAVREDEESNEGDSDDTDLQIFCVSCGHPINPRVALRHMERCYAKYESQTSFGSMYPTRIEGAKHTVSGSRCCAPSTHGTPKCQLTRYAGAPLYVMSLSSRVTSAACPSASAIAITAGRSCGVRKWTWSACVCGTSWTSCLSRSAMCAQP

SEQ ID NO: 37826 - protein, 172 aa, Homo sapiens
LAGVVRECAGSGDMEGDGSDPEPPDAGEDSKSENGENAPIYCICRKPDINCFMIGCDNCNEWFHGDCIRITEKMAKAIREWYCRECREKDPKLEIRYRHKKSRERDGNERDSSEPRDEGGGRKRPVPDPDLQRRAGSGTGVGAMLARGSASPHKSSPQPLVATPSQVSGCIK

SEQ ID NO: 37827 - protein, 365 aa, Homo sapiens
MLFFSAPFLTTFNLHFFVIKAVVVTDGERILGLGDLGVYGMGIPVGKLCLYTACAGIRPDRCLPVCIDVGTDNIALLKDPFYMGLYQKRDRTQQYDDLIDEFMKAITDRYGRNTLIQFEDFGNHNAFRFLRKYREKYCTFNDDIQGTAAVALAGLLAAQKVISKPISEHKILFLGAGEAALGIANLIVMSMVENGLSEQEAQKKIWMFDKYGLLVKGRKAKIDSYQEPFTHSAPESIPDTFEDAVNILKPSTIIGVAGAGRLFTPDVIRAMASINERPVIFALSNPTAQAECTAEEAYTLTEGRCLFASGSPFGPVKLTDGRVFTPGQGNNVYIFPGKCHHYLCYRAIVNYVKILNGILWNGRLN

SEQ ID NO: 37828 - protein, 18 aa, Homo sapiens
MSSVLWCFLCFVLPDHFG

SEQ ID NO: 37829 - protein, 145 aa, Homo sapiens
LGGGACVRAFPLSSGGPSCSPLGSAAAQGVGAGEGSQAPSERGPPPQGGPGARGGPARAGSGAALRRGGLAGTPRGGGRGALRAAGESYGPGASADQQRGRADSPRHRPSPGYPEYMSNNFPCNVSCCFSLFPKDQNCFRNWRHI

SEQ ID NO: 37830 - protein, 25 aa, Homo sapiens
MFTKHVFCILLHCTLQLISQGIDIY

SEQ ID NO: 37831 - protein, 34 aa, Homo sapiens
VVSCLLVWFELLVLSCRPRDIVYIRIAKAEVQLG

SEQ ID NO: 37832 - protein, 15 aa, Homo sapiens
MVTLNLSGLLSISLV

SEQ ID NO: 37833 - protein, 105 aa, Homo sapiens
VAGGGGSRRAGAAASVAVAGAGAVAGDGDGAGAGAAAVPRVAAAALAATAAAAAAAAAVAAAPPGGSRSLSRRGARGRGPGDPGPRRAGRGWIARPSPPDGRRRK

SEQ ID NO: 37834 - protein, 35 aa, Homo sapiens
LSPCSSPCGADPVSLLTVEPGSSRAWEGEGNLSEI

SEQ ID NO: 37835 - protein, 88 aa, Homo sapiens
MTDGDYDYLIKLLALGDSGVGKTTFLYRYTDNKFNPKFITTVGIDFREKRVVYNAQGPNGSSGKAFKVHLQLWDTAGQERPTASKCLL

SEQ ID NO: 37836 - protein, 47 aa, Homo sapiens
VPRFFHVFGVFLICRSVQTGCVLEFLQDKNKPSLVKAITCFPSVVIR

SEQ ID NO: 37837 - protein, 299 aa, Homo sapiens
MCEDWCFRDHFFDRGYYEVTPPTLVQTQVEGGATLFKLDYFGEEAFLTQSSQLYLETCLPALGDVFCIAQSYRAEQSRTRRHLAEYTHVEAECPFLTFDDLLNRLEDLVCDVVDRILKSPAGSIVHELNPNFQPPKRPFKRMNYSDAIVWLKEHDVKKEDGTFYEFGEDIPEAPERLMTDTINEPILLCRFPVEIKSFYMQRCPEDSRLTESVDVLMPNVGEIVGGSMRIFDSEEILAGYKREGIDPTPYYWYTDQRKYGTCPHGGYGLGLERFLTWILNRYHIRDVCLYPRFVQRCTP

SEQ ID NO: 37838 - protein, 158 aa, Homo sapiens
VLQSVSLEVTRATAGMVLAELYVSDREGSDATGDGTKEKPFKTGLKALMTVGKEPFPTIYVDSQKENERWNVISKSQLKNIKKMWHREQMKSESREKKEVSPDLAIVNVVKVRTLATMLTNCFIIKIRQKIVYEEKRTWKKQRRLPLKMIQVSQSQNV

SEQ ID NO: 37839 - protein, 1003 aa, Homo sapiens
VRGAGAAARCSARSREPPARWSRSLPGGSGAGSVQGALSGTLTCRRPAAYPAGRAQGRVRDRGDLEAEGRTGRPRRSTAAGSASDPARGAGSMATGLGEPVYGLSEDEGESRILRVKVVSGIDLAKKDIFGASDPYVKLSLYVADENRELALVQTKTIKKTLNPKWNEEFYFRVNPSNHRLLFEVFDENRLTRDDFLGQVDVPLSHLPTEDPTMERPYTFKDFLLRPRSHKSRVKGFLRLKMAYMPKNGGQDEENSDQRDDMEHGWEVVDSNDSASQHQEELPPPPLPPGWEEKVDNLGRTYYVNHNNRTTQWHRPSLMDVSSESDNNIRQINQEAAHRRFRSRRHISEDLEPEPSEGGDVPEPWETISEEVNIAGDSLGLALPPPPASPGSRTSPQELSEELSRRLQITPDSNGEQFSSLIQREPSSRLRSCSVTDAVAEQGHLPPLAEDGASGSATNSNNHLIEPQIRRPRSLSSPTVTLSAPLEGAKDSPVRRAVKDTLSNPQSPQPSPYNSPKPQHKVTQSFLPPGWEMRIAPNGRPFFIDHNTKTTTWEDPRLKFPVHMRSKTSLNPNDLGPLPPGWEERIHLDGRTFYIDHNSKITQWEDPRLQNPAITGPAVPYSREFKQKYDYFRKKLKKPADIPNRFEMKLHRNNIFEESYRRIMSVKRPDVLKARLWIEFESEKGLDYGGVAREWFFLLSKEMFNPYYGLFEYSATDNYTLQINPNSGLCNEDHLSYFTFIGRVAGLAVFHGKLLDGFFIRPFYKMMLGKQITLNDMESVDSEYYNSLKWILENDPTELDLMFCIDEENFGQTYQVDLKPNGSEIMVTNENKREYIDLVIQWRFVNRVQKQMNAFLEGFTELLPIDLIKIFDENELELLMCGLGDVDVNDWRQHSIYKNGYCPNHPVIQWFWKAVLLMDAEKRIRLLQFVTGTSRVPMNGFAELYGSNGPQLFTIEQWGSPEKLPRAHTCFNRLDLPPYETFEDLREKLLMAVENAQGFEGVD

SEQ ID NO: 37840 - protein, 1067 aa, Homo sapiens
VRGAGAAARCSARSREPPARWSRSLPGGSGAGSVQGALSGTLTCRRPAAYPAGRAQGRVRDRGDLEAEGRTGRPRRSTAAGSASDPARGAGSMATGLGEPVYGLSEDEGESRILRVKVVSGIDLAKKDIFGASDPYVKLSLYVADENRELALVQTKTIKKTLNPKWNEEFYFRVNPSNHRLLFEVFDENRLTRDDFLGQVDVPLSHLPTEDPTMERPYTFKDFLLRPRSHKSRVKGFLRLKMAYMPKNGGQDEENSDQRDDMEHGWEVVDSNDSASQHQEELPPPPLPPGWEEKVDNLGRTYYVNHNNRTTQWHRPSLMDVSSESDNNIRQINQEAAHRRFRSRRHISEDLEPEPSEGGDVPEPWETISEEVNIAGDSLGLALPPPPASPGSRTSPQELSEELSRRLQITPDSNGEQFSSLIQREPSSRLRSCSVTDAVAEQGHLPPPSAPAGRARSSTVTGGEEPTPSVAYVHTTPGLPSGWEERKDAKGRTYYVNHNNRTTTWTRPIMQLAEDGASGSATNSNNHLIEPQIRRPRSLSSPTVTLSAPLEGAKDSPVRRAVKDTLSNPQSPQPSPYNSPKPQHKVTQSFLPPGWEMRIAPNGRPFFIDHNTKTTTWEDPRLKFPVHMRSKTSLNPNDLGPLPPGWEERIHLDGRTFYIDHNSKITQWEDPRLQNPAITGPAVPYSREFKQKYDYFRKKLKKPADIPNRFEMKLHRNNIFEESYRRIMSVKRPDVLKARLWIEFESEKGLDYGGVAREWFFLLSKEMFNPYYGLFEYSATDNYTLQINPNSGLCNEDHLSYFTFIGRVAGLAVFHGKLLDGFFIRPFYKMMLGKQITLNDMESVDSEYYNSLKWILENDPTELDLMFCIDEENFGQTYQVDLKPNGSEIMVTNENKREYIDLVIQWRFVNRVQKQMNAFLEGFTELLPIDLIKIFDENELELLMCGLGDVDVNDWRQHSIYKNGYCPNHPVIQWFWKAVLLMDAEKRIRLLQFVTGTSRVPMNGFAELYGSNGPQLFTIEQWGSPEKLPRAHTCFNRLDLPPYETFEDLREKLLMAVENAQGFEGVD

SEQ ID NO: 37841 - protein, 198 aa, Homo sapiens
VRGAGAAARCSARSREPPARWSRSLPGGSGAGSVQGALSGTLTCRRPAAYPAGRAQGRVRDRGDLEAEGRTGRPRRSTAAGSASDPARGAGSMATGLGEPVYGLSEDEAVLLMDAEKRIRLLQFVTGTSRVPMNGFAELYGSNGPQLFTIEQWGSPEKLPRAHTCFNRLDLPPYETFEDLREKLLMAVENAQGFEGVD

SEQ ID NO: 37842 - protein, 54 aa, Homo sapiens
VRDRGDLEAEGRTGRPRRSTAAGSASDPARGAGSMATGLGEPVYGLSEDEPGSP

SEQ ID NO: 37843 - protein, 989 aa, Homo sapiens
VRDRGDLEAEGRTGRPRRSTAAGSASDPARGAGSMATGLGEPVYGLSEDEGESRILRVKVVSGIDLAKKDIFGASDPYVKLSLYVADENRELALVQTKTIKKTLNPKWNEEFYFRVNPSNHRLLFEVFDENRLTRDDFLGQVDVPLSHLPTEDPTMERPYTFKDFLLRPRSHKSRVKGFLRLKMAYMPKNGGQDEENSDQRDDMEHGWEVVDSNDSASQHQEELPPPPLPPGWEEKVDNLGRTYYVNHNNRTTQWHRPSLMDVSSESDNNIRQINQEAAHRRFRSRRHISEDLEPEPSEGGDVPEPWETISEEVNIAGDSLGLALPPPPASPGSRTSPQELSEELSRRLQITPDSNGEQFSSLIQREPSSRLRSCSVTDAVAEQGHLPPPSVAYVHTTPGLPSGWEERKDAKGRTYYVNHNNRTTTWTRPIMQLAEDGASGSATNSNNHLIEPQIRRPRSLSSPTVTLSAPLEGAKDSPVRRAVKDTLSNPQSPQPSPYNSPKPQHKVTQSFLPPGWEMRIAPNGRPFFIDHNTKTTTWEDPRLKFPVHMRSKTSLNPNDLGPLPPGWEERIHLDGRTFYIDHNSKITQWEDPRLQNPAITGPAVPYSREFKQKYDYFRKKLKKPADIPNRFEMKLHRNNIFEESYRRIMSVKRPDVLKARLWIEFESEKGLDYGGVAREWFFLLSKEMFNPYYGLFEYSATDNYTLQINPNSGLCNEDHLSYFTFIGRVAGLAVFHGKLLDGFFIRPFYKMMLGKQITLNDMESVDSEYYNSLKWILENDPTELDLMFCIDEENFGQTYQVDLKPNGSEIMVTNENKREYIDLVIQWRFVNRVQKQMNAFLEGFTELLPIDLIKIFDENELELLMCGLGDVDVNDWRQHSIYKNGYCPNHPVIQWFWKAVLLMDAEKRIRLLQFVTGTSRVPMNGFAELYGSNGPQLFTIEQWGSPEKLPRAHTCFNRLDLPPYETFEDLREKLLMAVENAQGFEGVD

SEQ ID NO: 37844 - protein, 1274 aa, Homo sapiens
LAVSGLLLPLALALLAPLVTMAHRLRFHFGSGRSNTAPESDILDQEREDDFFMAFHTLPRRSSPHPFAQNGGEDGGGGLQGGVGALKRSSSMFIPQLLTSIDARPTCSSSVQISLQRKATDGATDGCGPPEGADDGPPCATPDPRDQASATATTRASPQSGSREPSPRDTPGSSPPRAARDPGLQVNGTCGRRVRCSGPVDCAEEAAPGLRIQHRASSADVRQVRLLPLGPDGQGGPAAAEPRRWSLQHVPDASGSSGKRCFVFQLQQPQQGASGPGSDLNFGFTGTKGDRLVRYPRIRLERSTSYPTQPRSERGSPTEDRGALEASPRAGRMAPEIRRTNSAERTPQGQGCTFKIRQDQNAGQQHFRILVTRGPEEAPQNPEEKSAKSPVSTGADTTTRDDFLGQVDVPLSHLPTEDPTMERPYTFKDFLLRPRSHKSRVKGFLRLKMAYMPKNGGQDEENSDQRDDMEHGWEVVDSNDSASQHQEELPPPPLPPGWEEKVDNLGRTYYVNHNNRTTQWHRPSLMDVSSESDNNIRQINQEAAHRRFRSRRHISEDLEPEPSEGGDVPEPWETISEEVNIAGDSLGLALPPPPASPGSRTSPQELSEELSRRLQITPDSNGEQFSSLIQREPSSRLRSCSVTDAVAEQGHLPPPSAPAGRARSSTVTGGEEPTPSVAYVHTTPGLPSGWEERKDAKGRTYYVNHNNRTTTWTRPIMQLAEDGASGSATNSNNHLIEPQIRRPRSLSSPTVTLSAPLEGAKDSPVRRAVKDTLSNPQSPQPSPYNSPKPQHKVTQSFLPPGWEMRIAPNGRPFFIDHNTKTTTWEDPRLKFPVHMRSKTSLNPNDLGPLPPGWEERIHLDGRTFYIDHNSKITQWEDPRLQNPAITGPAVPYSREFKQKYDYFRKKLKKPADIPNRFEMKLHRNNIFEESYRRIMSVKRPDVLKARLWIEFESEKGLDYGGVAREWFFLLSKEMFNPYYGLFEYSATDNYTLQINPNSGLCNEDHLSYFTFIGRVAGLAVFHGKLLDGFFIRPFYKMMLGKQITLNDMESVDSEYYNSLKWILENDPTELDLMFCIDEENFGQTYQVDLKPNGSEIMVTNENKREYIDLVIQWRFVNRVQKQMNAFLEGFTELLPIDLIKIFDENELELLMCGLGDVDVNDWRQHSIYKNGYCPNHPVIQWFWKAVLLMDAEKRIRLLQFVTGTSRVPMNGFAELYGSNGPQLFTIEQWGSPEKLPRAHTCFNRLDLPPYETFEDLREKLLMAVENAQGFEGVD

SEQ ID NO: 37845 - protein, 907 aa, Homo sapiens
VPRPPGAPPLCAAGAASRPGSPRQTCLIGAGSGASSSEGRAALPDLFFRPCLRGSEASGRCPGAEARDGAGGSPGSPGSPARAMSLLGDPLQALPPSAAPTGPLLAPPAGATLNRLREPLLRRLSELLDQAPEGRGWRRLAELAGSRGRLRLSCLDLEQCSLKVLEPEGSPSLCLLKLMGEKGCTVTELSDFLQAMEHTEVLQLLSPPGIKITVNPESKAVLAGQFVKLCCRATGHPFVQYQWFKMNKEIPNGNTSELIFNAVHVKDAGFYVCRVNNNFTFEFSQWSQLDVCDIPESFQRSVDGVSESKLQICVEPTSQKLMPGSTLVLQCVAVGSPIPHYQWFKNELPLTHETKKLYMVPYVDLEHQGTYWCHVYNDRDSQDSKKVEIIIGRTDEAVECTEDELNNLGHPDNKEQTTDQPLAKDKVALLIGNMNYREHPKLKAPLVDVYELTNLLRQLDFKVVSLLDLTEYEMRNAVDEFLLLLDKGVYGLLYYAGHGYENFGNSFMVPVDAPNPYRSENCLCVQNILKLMQEKETGLNVFLLDMCRKRNDYDDTIPILDALKVTANIVFGYATCQGAEAFEIQHSGLANGIFMKFLKDRLLEDKKITVLLDEVAEDMGKCHLTKGKQALEIRSSLSEKRALTDPIQGTEYSAESLVRNLQWAKAHELPESMCLKFDCGVQIQLGFAAEFSNVMIIYTSIVYKPPEIIMCDAYVTDFPLDLDIDPKDANKGTPEETGSYLVSKDLPKHCLYTRLSSLQKLKEHLVFTVCLSYQYSGLEDTVEDKQEVNVGKPLIAKLDMHRGLGRKTCFQTCLMSNGPYQSSAATSGGAGHYHSLQDPFHGVYHSHPGNPSNVTPADSCHCSRTPDAFISSFAHHASCHFSRSNVPVETTDEIPFSFSDRLRISEK

SEQ ID NO: 37846 - protein, 38 aa, Homo sapiens
MEAAAAAAPTTAAAATAAAAGGAALNKGHPSCGPDARA

SEQ ID NO: 37847 - protein, 49 aa, Homo sapiens
MSGLGRWGKRLLHMLGMSSAICICPSVHPPIRLSIRPLSYLFIKNICSN

SEQ ID NO: 37848 - protein, 234 aa, Homo sapiens
MMSLTLLFCLLSFQFPFVFPARNISLKCVQDTDEFLSDLNSVKPKEYALRPFYMGLDVWILLQKSNSANLSCLAIQCMTLWGSLGATLSMETMDRLGSYMECLSTPAPKGNFRGWYCKLHILQVSVGDLHACSCRTSECHDIEQNTTVSQDGADYSVGVCVPDSCAEEDVTLMSRLGRYKTLRFRNTSFLAPSLFLFTINSSSLSGGSVTRCAAGKIPLDTFAAVCLWRLDLRS

SEQ ID NO: 37849 - protein, 626 aa, Homo sapiens
LLPGILRSRRKLPAGKDPSALPALCRAGSEGWSPFPTPGGWAGPKDRTAPDPPPARGPAHSCSWPCGRAESGGRGRGSPLALGGPPGSANQRAPCWPSAAIRAPPSPALLRVPESKMAGSRQRGLRARVRPLFCALLLSLGRFVRGDGVGGDPAVALPHRRFEYKYSFKGPHLVQSDGTVPFWAHAGNAIPSSDQIRVAPSLKSQRGSVWTKTKAAFENWEVEVTFRVTGRGRIGADGLAIWYAENQGLEGPVFGSADLWNGVGIFFDSFDNDGKKNNPAIVIIGNNGQIHYDHQNDGASQALASCQRDFRNKPYPVRAKITYYQNTLTVMINNGFTPDKNDYEFCAKVENMIIPAQGHFGISAATGGLADDHDVLSFLTFQLTEPGKEPPTPDKEISEKEKEKYQEEFEHFQQELDKKKEEFQKGHPDLQGQPAEEIFESVGDRELRQVFEGQNRIHLEIKQLNRQLDMILDEQRRYVSSLTEEISKRGAGMPGQHGQITQQELDTVVKTQHEILRQVNEMKNSMSETVRLVSGMQHPGSAGGVYETTQHFIDIKEHLHIVKRDIDNLVQRNMPSNEKPKCPELPPFPSCLSTVHFIIFVVVQTVLFIGYIMYRSQQEAAAKKFF

SEQ ID NO: 37850 - protein, 223 aa, Homo sapiens
MAGSRQRGLRARVRPLFCALLLSLGRFVRGDGVGGDPAVALPHRRFEYKYSFKGPHLVQSDGTVPFWAHAGNAIPSSDQIRVAPSLKSQRGSVWTKTKAAFENWEVEVTFRVTGRGRIGADGLAIWYAENQGLEGPVFGSADLWNGVGIFFDSFDNDGKKNNPAIVIIGNNGQIHYDHQNDGASQALASCQRDFRNKPYPVRAKITYYQNTLTVSNIYLERIK

SEQ ID NO: 37851 - protein, 263 aa, Homo sapiens
LSPRMSRCQLLCPWDRPSRCCLSGSGLHPASQTGLSLSPFSGHEKSENMVKAGTCCATCKEFYQMKQTVLQLKQKIALLPNNAADLGKYITGDKVLASNTYLPGPPGLPGGQGPPGSPGPKGSPGFPGMPGPPGQPGPRGSMGPMGPSPDLSHIKQGRRGPVGPPGAPGRDGSKGERGAPGPRGSPGPPGSFDFLLLMLADIRNDITELQEKVFGHRTHSSAEEFPLPQEFPSYPEAMDLGSGDDHPRRTETRDLRAPRDFYP

SEQ ID NO: 37852 - protein, 13 aa, Homo sapiens
MYTHTYILIWVSV

SEQ ID NO: 37853 - protein, 267 aa, Homo sapiens
LSRAMAPRARRRRPLFALLLLCALLARLQVALQIAPPCTSEKHYEHLGRCCNKCEPGKYMSSKCTTTSDSVCLPCGPDEYLDSWNEEDKCLLHKVCDTGKALVAVVAGNSTTPRRCACTAGYHWSQDCECCRRNTECAPGLGAQHPLQLNKDTVCKPCLAGYFSDAFSSTDKCRPWTNCTFLGKRVEHHGTEKSDAVCSSSLPARKPPNEPHVYLPGLIILLLFASVALVAAIIFGVCYRKKGKALTANLWHWINEACGRLSGDKEM

SEQ ID NO: 37854 - protein, 303 aa, Homo sapiens
LSRAMAPRARRRRPLFALLLLCALLARLQVALQIAPPCTSEKHYEHLGRCCNKCEPGKYMSSKCTTTSDSVCLPCGPDEYLDSWNEEDKCLLHKVCDTGKALVAVVAGNSTTPRRCACTAGYHWSQDCECCRRNTECAPGLGAQHPLQLNKDTVCKPCLAGYFSDAFSSTDKCRPWTNCTFLGKRVEHHGTEKSDAVCSSSLPARKPPNGNVTGNSNSTFISSGQVMNFKGDIIVVYVSQTSQEGAAAAAEPMGRPVQEETLARRDSFAGNGPRFPDPCGGPEGLREPEKASRPVQEQGGAKA

SEQ ID NO: 37855 - protein, 341 aa, Homo sapiens
LSRAMAPRARRRRPLFALLLLCALLARLQVALQIAPPCTSEKHYEHLGRCCNKCEPGKYMSSKCTTTSDSVCLPCGPDEYLDSWNEEDKCLLHKVCDTGKALVAVVAGNSTTPRRCACTAGYHWSQDCECCRRNTECAPGLGAQHPLQLNKDTVCKPCLAGYFSDAFSSTDKCRPWTNCTFLGKRVEHHGTEKSDAVCSSSLPARKPPNEPHVYLPGLIILLLFASVALVAAIIFGVCYRKKGKALTGNVTGNSNSTFISSGQVMNFKGDIIVVYVSQTSQEGAAAAAEPMGRPVQEETLARRDSFAGNGPRFPDPCGGPEGLREPEKASRPVQEQGGAKA

SEQ ID NO: 37856 - protein, 620 aa, Homo sapiens
LSRAMAPRARRRRPLFALLLLCALLARLQVALQIAPPCTSEKHYEHLGRCCNKCEPGKYMSSKCTTTSDSVCLPCGPDEYLDSWNEEDKCLLHKVCDTGKALVAVVAGNSTTPRRCACTAGYHWSQDCECCRRNTECAPGLGAQHPLQLNKDTVCKPCLAGYFSDAFSSTDKCRPWTNCTFLGKRVEHHGTEKSDAVCSSSLPARKPPNEPHVYLPGLIILLLFASVALVAAIIFGVCYRKKGKALTANLWHWINEACGRLSGDKESSGDSCVSTHTANFGQQGACEGVLLLTLEEKTFPEDMCYPDQGGVCQGTCVGGGPYAQGEDARMLSLVSKTEIEEDSFRQMPTEDEYMDRPSQPTDQLLFLTEPGSKSTPPFSEPLEVGENDSLSQCFTGTQSTVGSESCNCTEPLCRTDWTPMSSENYLQKEVDSGHCPHWAASPSPNWADVCTGCRNPPGEDCEPLVGSPKRGPLPQCAYGMGLPPEEEASRTEARDQPEDGADGRLPSSARAGAGSGSSPGGQSPASGNVTGNSNSTFISSGQVMNFKGDIIVVYVSQTSQEGAAAAAEPMGRPVQEETLARRDSFAGNGPRFPDPCGGPEGLREPEKASRPVQEQGGAKA

SEQ ID NO: 37857 - protein, 128 aa, Homo sapiens
MEGEITFFRVEEVKKHQHCLAFSSSGPQSQTYYICFDTFTEYLRWLRQVSKVASQRISSVDLSCCSLEHLPANLFYSQDLTHLNLKQNFLRQNPSLPAARGLNELQSSIPHRTRGVDTAAHMSKLCPC

SEQ ID NO: 37858 - protein, 24 aa, Homo sapiens
LAQWEKLGSDYKSRGVIIIKIKCK

SEQ ID NO: 37859 - protein, 22 aa, Homo sapiens
LIVYIHIFWIRTPQLPILALSE

SEQ ID NO: 37860 - protein, 352 aa, Homo sapiens
LRALPGGPRPAAPGPWPRGAMLLLAAAFLVAFVLLLYMVSPLISPKPLALPGAHVVVTGGSSGIGKCIAIECYKQGAFITLVARNEDKLLQAKKEIEMHSINDKQVVLCISVDVSQDYNQVENVIKQAQEKLGPVDMLVNCAGMAVSGKFEDLEVSTFERLMSINYLGSVYPSRAVITTMKERRVGRIVFVSSQAGQLGLFGFTAYSASKFAIRGLAEALQMEVKPYNVYITVAYPPDTDTPGFAEENRTKPLETRLISETTSVCKPEQVAKQIVKDAIQGNFNSSLGSDGYMLSALTCGMAPVTSITEGLQQVVTMGLFRTIALFYLGSFDSIVRRCMMQREKSENADKTA

SEQ ID NO: 37861 - protein, 96 aa, Homo sapiens
MLLLAAAFLVAFVLLLYMVSPLISPKPLALPGAHVVVTGGSSGIGKCIAIECYKQGAFITLVARNEDKLLQAKKEIEMHSINDKQVNLCLQNAFSV

SEQ ID NO: 37862 - protein, 28 aa, Homo sapiens
LAKQGCTGQGPGNTIQRQRSKHDCAAAK

SEQ ID NO: 37863 - protein, 417 aa, Homo sapiens
LSHLPEALPSIKADVKHLQRRNSQSSSGGGGGGSSSSSRRPSLMDDLCEANGTFAISLFKILGEEDNSRNVFFSPMSISSALAMVFMGAKGSTAAQMSQALCLYKDGDIHRGFQSLLSEVNRTGTQYLLRTANRLFGEKTCDFLPDFKEYCQKFYQAELEELSFAEDTEECRKHINDWVAEKTEGKISEVLDAGTVDPLTKLVLVNAIYFKGKWNEQFDRKYTRGMLFKTNEEKKTVQMMFKEAKFKMGYADEVHTQVLELPYVEEELSMVILLPDDNTDLAVVEKALTYEKFKAWTNSEKLTKSKVQVFLPRLKLEESYDLEPFLRRLGMIDAFDEAKADFSGMSTEKNVPLSKVAHKCFVEVNEEGTEAAAATAVVRNSRCSRMEPRFCADHPFLFFIRHHKTNCILFCGRFSSP

SEQ ID NO: 37864 - protein, 47 aa, Homo sapiens
LRGMTTESTHSKNVSTSSSSLGKHTQMHHTCVVSLSPVMVFCARNDS

SEQ ID NO: 37865 - protein, 24 aa, Homo sapiens
MCRFVTWVYWMMLRFGVQMIPSPR

SEQ ID NO: 37866 - protein, 209 aa, Homo sapiens
LHSQLLQLSRASMAAWKSWTALRLCATVVVLDMVVCKGFVEDLDESFKENRNDDIWLVDFYAPWCGHCKKLEPIWNEVGLEMKSIGSPVKVGKMDATSYSSIASEFGVRGYPTIKLALIRPLPSQQMFEHMQKRHRVFFVYVGGESPLKEKYIDAASELIVYTYFFSASEEVVPEYVTLKEMPAVLVFKDETYFVYDGKFQIFNSCKTF

SEQ ID NO: 37867 - protein, 140 aa, Homo sapiens
LHSQLLQLSRASMAAWKSWTALRLCATVVVLDMVVCKGFVEDLDESFKENRNDDIWLVDFYAPWCGHCKKLEPIWNEVGLEMKSIGSPVKVGKMDATSYSSIASEFGVRGYPTIKLRFPGGLKIGVWPFFIGEIKRGLGI

SEQ ID NO: 37868 - protein, 101 aa, Homo sapiens
LHSQLLQLSRASMAAWKSWTALRLCATVVVLDMVVCKGFVEDLDESFKENRNDDIWLVDFYAPWCGHCKKLEPIWNEVGLEMKSIGSPVKVGKMDATSYSN

SEQ ID NO: 37869 - protein, 75 aa, Homo sapiens
LHSQLLQLSRASMAAWKSWTALRLCATVVVLDMVVCKGFVEDLDESFKENRNDDIWLVDALLQSLEFEVIQQLSY

SEQ ID NO: 37870 - protein, 424 aa, Homo sapiens
MNLDSIHRLIEETQIFQMQQSSIKSRGDMVAPASPPRDTCNTCFPLHGLQSHAAHNFCAHSYNTNKWDICEELRLRELEEVKARAAQMEKTMRWWSDCTANWREKWSKVRAERNSAREEGRQLRIKLEMAMKELSTLKKKQSLPPQKEALEAKVTQDLKLPGFVEESCEHTDQFQLSSQMHESIREYLVKRQFSTKEDTNNKEQGVVIDSLKLSEEMKPNLDGVDLFNNGGSGNGETKTGLRLKAINLPLENEVTEISALQVHLDEFQKILWKEREMRTALEKEIERLESALSLWKWKYEELKESKPKNVKEFDILLGQHNDEMQELSGNIKEESKSQNSKDRVICELRAELERLQAENTSEWDKREILEREKQGLERENRRLKIQVKEMEELLDKKNRLSANSQSPDFKMSQIDLQEKNQDVK

SEQ ID NO: 37871 - protein, 32 aa, Homo sapiens
MAIFFFFCIIVSSLPTAELGTENACSTCLLNE

SEQ ID NO: 37872 - protein, 653 aa, Homo sapiens
VTEVGALFCLLLFDEVSRMDMWSVNPSNKPSLPSVFSLPVSVFRRYHLPVHVIGHHAVSPYSIVLPLSADCLALKPVSDMLRIAWNLSWYHGSDNLLKQMNSETKTQEILDALKLSTEDILTLKITHMASGLQDCLHSIVQAATHREVRAAVTRMSFYLLNDRLSLKGCPGPCGVTLKSLAWHTALNRFLQVLPACTEDEKLLIDIIHFLNKLIKEQRKNSSLELLNWILELLLRHSANPLLDLLVLTESQAREETDDIRTAVRQQLQKELIALFDTLLLNFMEVTDRKCSELLYVFQTQLALKLLQCLKVTDAPHFYGLPSLERTLRGMANLTAFPGWSSHSPLTKPLDICVKYLSGLLEVITSFYVERGGNAMSFMGKGVTKSTILCLLHLSHEMMAQAGSLEWMSLWFLPLGSHSEEHIPTQQGLAWLIPLWVDRDPEVRFTSLGLGSALTTLETGCVALANSCQNISGGLWGTVVNILLDQSECSMVRREAAFILQNLLVIPMPTEIIKDYTWQGPCVHDEDSGLSLIGKPALQALLYHCHFYEHLNQMVKHCYLGRCMFDLNFSAFDRNSESNDLNGLDDSFKFWRAPSRTSQDRDPSSLSTSETTVAPSLGSTEFQPLVQSTTLLPEASHDQFVAQGNRHFGTNIQF

SEQ ID NO: 37873 - protein, 68 aa, Homo sapiens
LGILFIAMFNNLASRGHCILTVSPHQSLKSSRVPEVLGLTQGCLQVLCSSVSDINICQKLKEGCEAGN

SEQ ID NO: 37874 - protein, 117 aa, Homo sapiens
LPLCAVFPLLFQVLVNIGNHFDLASSIFVAPRKGIYSFSFHVVKVYNRQTIQVSLMQNGYPVISAFAGDQDVTREAASNGVLLLMEREDKVHLKLERGNLMGGWKYSTFSGFLVFPL

SEQ ID NO: 37875 - protein, 125 aa, Homo sapiens
VVLFGISITGGLFYTIFKELFSSSSPSKIYGRALEKCRSHPEVIGVFGESVKGYGEVTRRGRRQHVRFTEYVKDGLKHTCVKFYIEGSEPGKQGTVYAQVKEVWESWDVGSEVLSAVLFKFWKGK

SEQ ID NO: 37876 - protein, 111 aa, Homo sapiens
MAEQSDEAVKYYTLEEIQKHNHSKSTWLILHHKVYDLTKFLEEHPGGEEVLREQAGGDATENFEDVGHSTDAREMSKTFIIGELHPDDRPKLNKPPVSVTISSISGCSRCI

SEQ ID NO: 37877 - protein, 65 aa, Homo sapiens
LMPFGCFWTKIINFLKLNLVFLGLCRLCCGFVVVDTGCDILAGIPEVTISSAITESETYLCALRV

SEQ ID NO: 37878 - protein, 20 aa, Homo sapiens
LNLVFLGLCRLCCGSPLSLH

SEQ ID NO: 37879 - protein, 10 aa, Homo sapiens
LYLLAVCFLF

SEQ ID NO: 37880 - protein, 16 aa, Homo sapiens
MGLLLMMHHMVSLGKA

SEQ ID NO: 37881 - protein, 340 aa, Homo sapiens
LCSTVWDPRSVDLWRHCIWRTPATKLNTTSGSLPSTTPMSPSAISTQNLVMSSSGVGGDASVTLTLADTQGMLSGGLDTVTLNITSQGQQFPALLTDPSLSGQGGAGSPQVILVSHTPQSASAACEEIAYQVAGVSGNLAPGNQPEKEGRAHQCLECDRAFSSAAVLMHHSKEVHGRERIHGCPVCRKAFKRATHLKEHMQTHQAGPSLSSQKPRVFKCDTCEKAFAKPSQLERHSRIHTGERPFHCTLCEKAFNQKSALQVHMKKHTGERPYKCAYCVMGFTQKSNMKLHMKRAHSYAGALQESAGHPEQDGEELSRTLHLEEVVQEAAGEWQALTHVF

SEQ ID NO: 37882 - protein, 97 aa, Homo sapiens
MPGMASSQDENPVVHFFKNIVTPRTPPPSQGKGRGLSLSRFSWGAEGQRPGFGYGGRASDYKSAHKGFKGVDAQGTLSKIFKLGGRDSRSGSPMARR

SEQ ID NO: 37883 - protein, 150 aa, Homo sapiens
MDATVTLLSITCLATWSHMISASDPPWAQNLPEPPRIEAHGRGSALTKDAGGPCLCSCGSPLLGRAHHTSRLNKIHGVKGQVTESMSMLHTKKDPSSLHPGEQPQKPGLLQDENANAGAWGLPEPLASRFPPGPAWSFMCLPFCLMRAAV

SEQ ID NO: 37884 - protein, 106 aa, Homo sapiens
LKIGYLYTYWAPLGFVLAVTMTREAIDEFRRFQRDKEVNSQLYSKLTVRGKVQVKSSDIQVGDLIIVEKNQRIPSDMVFLRTSEKAVSNNLDYCSHLVRVLFELIN

SEQ ID NO: 37885 - protein, 58 aa, Homo sapiens
LLHQVGLLDLELNRLTKALFLALVALSIVMVTLQGFVGPWYRNLFRFLLLFSYIIPIR

SEQ ID NO: 37886 - protein, 19 aa, Homo sapiens
LLPYTVHFRIFQSVISALL

SEQ ID NO: 37887 - protein, 98 aa, Homo sapiens
LEPLERGVKNFAVIYLVDITEVPDFNKMYELYDPCTVMFFFRNKHIMIDLGTGNNNKINWAMEDKQEMVDIIETVYRGARKGRGLVVSPKDYSTKYRY

SEQ ID NO: 37888 - protein, 14 aa, Homo sapiens
LCLGLFILCFSSGY

SEQ ID NO: 37889 - protein, 33 aa, Homo sapiens
LGPASGVAGTMQRRWVFVLLDVLCLLPPCPSLS

SEQ ID NO: 37890 - protein, 138 aa, Homo sapiens
VVARPRAAPTPGPSAAAMARPLVPSSQKALLLELKGLQEEPVEGFRVTLVDEGDLYNWEVAIFGPPNTYYEGGYFKARLKFPIDYPYSPPAFRFLTKMWHPNIYETGDVCISILHPPVDDPQSGELPSERWNPTQNVR

SEQ ID NO: 37891 - protein, 53 aa, Homo sapiens
LFRFGFFSLPMSVLGFHVLQRRGAAPPPLTSLGARWTGPGWERPAHLSPREGS

SEQ ID NO: 37892 - protein, 263 aa, Homo sapiens
LGLHSGMEACVSSLLVLALGALSVGSSFGTQIIGGREVIPHSRPYMASLQRNGSHLCGGVLVHPKWVLTAAHCLAQRMAQLRLVLGLHTLDSPGLTFHIKAAIQHPRYKPVPALENDLALLQLDGKVKPSRTIRPLALPSKRQVVAAGTRCSMAGWGLTHQGGRLSRVLRELDLQVLDTRMCNNSRFWNGSLSPSMVCLAADSKDQAPCKGDSGGPLVCGKGRVLARVLSFSSRVCTDIFKPPVATAVAPYVSWIRKVTGRSA

SEQ ID NO: 37893 - protein, 37 aa, Homo sapiens
LGKHLLSILGTNMLLFPLFLLLSLDLCQKEGYAESLI

SEQ ID NO: 37894 - protein, 75 aa, Homo sapiens
MAAALFVLLGFALLGTHGASGAAGTVFTTVEDLGSKILLTCSLNDSATEVTGHRWLKGGVVLKEDALPGQKTEFK

SEQ ID NO: 37895 - protein, 436 aa, Homo sapiens
VLARMVSISRPRDPPALASQSAGITGVSLRARPPPRPAGYVFRKEFPVCAGAATRARCPGPCSGTWVGALSVPTPWSQPRVSLGRNIARRGLWVPSALAQGPPAASEGCLPEGGAFPKGPPQQALGSSLPGGVARSSPWASGPRGVRATVYFWDENQSFPGRSRRFLGVRQAARAVLLHSADRVSPGLAAGTVFTTVEDLGSKILLTCSLNDSATEVTGHRWLKGGVVLKEDALPGQKTEFKVDSDDQWGEYSCVFLPEPMGTANIQLHGPPRVKAVKSSEHINEGETAMLVCKSESVPPVTDWAWYKITDSEDKALMNGSESRFFVSSSQGRSELHIENLNMEADPGQYRCNGTSSKGSDQAIITLRVRSHLAALWPFLGIVAEVLVLVTIIFIYEKRRKPEDVLDDDDAGSAPLKSSGQHQNDKGKNVRQRNSS

SEQ ID NO: 37896 - protein, 149 aa, Homo sapiens
LGRFLLFRRLHSVPRGSALCAMDGIVPDIAVGTKRGSDELFSTCVTNGPFIMSSNSASAANGNDSKKFKGDSRSAGVPSRVIHIRKLPIDVTEGEVISLGLPFGKVTNLLMLKGKNQVPEPRFSGVLTPCRRGRGGPSAHCLPNRPSSR

SEQ ID NO: 37897 - protein, 333 aa, Homo sapiens
LGRFLLFRRLHSVPRGSALCAMDGIVPDIAVGTKRGSDELFSTCVTNGPFIMSSNSASAANGNDSKKFKGDSRSAGVPSRVIHIRKLPIDVTEGEVISLGLPFGKVTNLLMLKGKNQAFIEMNTEEAANTMVNYYTSVTPVLRGQPIYIQFSNHKELKTDSSPNQARAQAALQAVNSVQSGNLALAASAAAVDAGMAMAGQSPVLRIIVENLFYPVTLDVLHQIFSKFGTVLKIITFTKNNQFQALLQYADPVSAQHAKLSLDGQNIYNACCTLRIDFSKLTSLNVKYNNDKSRDYTRPDLPSGDSQPSLDQTMAAAFGKRLPDAAPVCRVVY

SEQ ID NO: 37898 - protein, 578 aa, Homo sapiens
LGRFLLFRRLHSVPRGSALCAMDGIVPDIAVGTKRGSDELFSTCVTNGPFIMSSNSASAANGNDSKKFKGDSRSAGVPSRVIHIRKLPIDVTEGEVISLGLPFGKVTNLLMLKGKNQAFIEMNTEEAANTMVNYYTSVTPVLRGQPIYIQFSNHKELKTDSSPNQARAQAALQAVNSVQSGNLALAASAAAVDAGMAMAGQSPVLRIIVENLFYPVTLDVLHQIFSKFGTVLKIITFTKNNQFQALLQYADPVSAQHAKLSLDGQNIYNACCTLRIDFSKLTSLNVKYNNDKSRDYTRPDLPSGDSQPSLDQTMAAAFGAPGIISASPYAGAGFPPTFAIPQAAGLSVPNVHGALAPLAIPSAAAAAAAAGRIAIPGLAGAGNSVLLVSNLNPERVTPQSLFILFGVYGDVQRVKILFNKKENALVQMADGNQAQLAMSHLNGHKLHGKPIRITLSKHQNVQLPREGQEDQGLTKDYGNSPLHRFKKPGSKNFQNIFPPSATLHLSNIPPSVSEEDLKVLFSSNGGVVKGFKFFQKDRKMALIQMGSVEEAVQALIDLHNHDLGENHHLRVSFSKSTI

SEQ ID NO: 37899 - protein, 609 aa, Homo sapiens
LGRFLLFRRLHSVPRGSALCAMDGIVPDIAVGTKRGSDELFSTCVTNGPFIMSSNSASAANGNDSKKFKGDSRSAGVPSRVIHIRKLPIDVTEGEVISLGLPFGKVTNLLMLKGKNQAFIEMNTEEAANTMVNYYTSVTPVLRGQPIYIQFSNHKELKTDSSPNQAVRGPAADPSSPGTSGVGPAAGAGDSRLCLPQRAQAALQAVNSVQSGNLALAASAAAVDAGMAMAGQSPVLRIIVENLFYPVTLDVLHQIFSKFGTVLKIITFTKNNQFQALLQYADPVSAQHAKLSLDGQNIYNACCTLRIDFSKLTSLNVKYNNDKSRDYTRPDLPSGDSQPSLDQTMAAAFGAPGIISASPYAGAGFPPTFAIPQAAGLSVPNVHGALAPLAIPSAAAAAAAAGRIAIPGLAGAGNSVLLVSNLNPERVTPQSLFILFGVYGDVQRVKILFNKKENALVQMADGNQAQLAMSHLNGHKLHGKPIRITLSKHQNVQLPREGQEDQGLTKDYGNSPLHRFKKPGSKNFQNIFPPSATLHLSNIPPSVSEEDLKVLFSSNGGVVKGFKFFQKDRKMALIQMGSVEEAVQALIDLHNHDLGENHHLRVSFSKSTI

SEQ ID NO: 37900 - protein, 218 aa, Homo sapiens
LGRFLLFRRLHSVPRGSALCAMDGIVPDIAVGTKRVTPQSLFILFGVYGDVQRVKILFNKKENALVQMADGNQAQLAMSHLNGHKLHGKPIRITLSKHQNVQLPREGQEDQGLTKDYGNSPLHRFKKPGSKNFQNIFPPSATLHLSNIPPSVSEEDLKVLFSSNGGVVKGFKFFQKDRKMALIQMGSVEEAVQALIDLHNHDLGENHHLRVSFSKSTI

SEQ ID NO: 37901 - protein, 552 aa, Homo sapiens
LGRFLLFRRLHSVPRGSALCAMDGIVPDIAVGTKRGSDELFSTCVTNGPFIMSSNSASAANGNDSKKFKGDSRSAGVPSRVIHIRKLPIDVTEGEVISLGLPFGKVTNLLMLKGKNQAFIEMNTEEAANTMVNYYTSVTPVLRGQPIYIQFSNHKELKTDSSPNQARAQAALQAVNSVQSGNLALAASAAAVDAGMAMAGQSPVLRIIVENLFYPVTLDVLHQIFSKFGTVLKIITFTKNNQFQALLQYADPVSAQHAKLSLDGQNIYNACCTLRIDFSKLTSLNVKYNNDKSRDYTRPDLPSGDSQPSLDQTMAAAFGLSVPNVHGALAPLAIPSAAAAAAAAGRIAIPGLAGAGNSVLLVSNLNPERVTPQSLFILFGVYGDVQRVKILFNKKENALVQMADGNQAQLAMSHLNGHKLHGKPIRITLSKHQNVQLPREGQEDQGLTKDYGNSPLHRFKKPGSKNFQNIFPPSATLHLSNIPPSVSEEDLKVLFSSNGGVVKGFKFFQKDRKMALIQMGSVEEAVQALIDLHNHDLGENHHLRVSFSKSTI

SEQ ID NO: 37902 - protein, 199 aa, Homo sapiens
VRGAGADGEMGGAGSRRLRPHPWAFEGVYGDVQRVKILFNKKENALVQMADGNQAQLAMSHLNGHKLHGKPIRITLSKHQNVQLPREGQEDQGLTKDYGNSPLHRFKKPGSKNFQNIFPPSATLHLSNIPPSVSEEDLKVLFSSNGGVVKGFKFFQKDRKMALIQMGSVEEAVQALIDLHNHDLGENHHLRVSFSKSTI

SEQ ID NO: 37903 - protein, 260 aa, Homo sapiens
LDPTMAHRPPSPALASVLLALLLSGAARAAEIVGGHEAQPHSRPYMASLQMRGNPGSHFCGGTLIHPSFVLTAAHCLRDIPQRLVNVVLGAHNVRTQEPTQQHFSVAQVFLNNYDAENKLNDVLLIQLSSPANLSASVATVQLPQQDQPVPHGTQCLAMGWGRVGAHDPPAQVLQELNVTVVTFFCRPHNICTFVPRRKAGICFGDSGGPLICDGIIQGIDSFVIWGCATRLFPDFFTRVALYVDWIRSTLRRVEAKGRP

SEQ ID NO: 37904 - protein, 8 aa, Homo sapiens
MAAPDPRR

SEQ ID NO: 37905 - protein, 640 aa, Homo sapiens
LHCPGSPAAPTLQCGRAPSPQGPPPPPTPSARGGGGGGGGGGPGRRAMKLQAVMETLLQRQQRARQELEARQQLPPDPPAAPPGRARAAPDEDREPESARMQRAQMAALAAMRAAAAGLGHPASPGGSEDGPPGSEEEDAAREGTPGSPGRGREGPGEEHFEDMASDEDMKPKWEEEEMEEDLGEDEEEEEEDYEDEEEEEDEEGLGPPGPASLGTTALFPRKAQPPQAFRGDGVPRVLGGQERPGPGPAHPGGAAHVAPQLQPPDHGDWTYEEQFKQLYELDGDPKRKEFLDDLFSFMQKRGTPVNRIPIMAKQVLDLFMLYVLVTEKGGLVEVINKKLWREITKGLNLPTSITSAAFTLRTQYMKYLYPYECEKRGLSNPNELQAAIDSNRREGRRQSFGGSLFAYSPGGAHGMLSSPKLPVSSLGLAASTNGSSITPAPKIKKEEDSAIPITVPGRLPVSLAGHPVVAAQAAAVQAAAAQAAVAAQAAALEQLREKLESAEPPEKKMALVADEQQRLMQRALQQNFLAMAAQLPMSIRINSQASESRQDSAVNLTGTNGSNSISMSVEINGIMYTGVLFAQPPAPTPTSAPNKGGGGGGGSSSNAGGRGGNTGTSGGQAGPAGLSTPSTSTSNNSLP

SEQ ID NO: 37906 - protein, 623 aa, Homo sapiens
LGGMSEHVEPAAPGPGPNGGGGGPAPARGPRTPNLNPNPLINVRDRLFHALFFKMAVTYSRLFPPAFRRLFEFFVLLKALFVLFVLAYIHIVFSRSPINCLEHVRDKWPREGILRVEVRHNSSRAPVFLQFCDSGGRGSFPGLAVEPGSNLDMEDEEEEELTMEMFGNSSIKFELDIEPKVFKPPSSTEALNDSQEFPFPETPTKVWPQDEYIVEYSLEYGFLRLSQATRQRLSIPVMVVTLDPTRDQCFGDRFSRLLLDEFLGYDDILMSSVKGLAENEENKGFLRNVVSGEHYRFVSMWMARTSYLAAFAIMVIFTLSVSMLLRYSHHQIFVFIVDLLQMLEMNMAIAFPAAPLLTVILALVGMEAIMSEFFNDTTTAFYIILIVWLADQYDAICCHTSTSKRHWLRFFYLYHFAFYAYHYRFNGQYSSLALVTSWLFIQHSMIYFFHHYELPAILQQVRIQEMLLQAPPLGPGTPTALPDDMNNNSGAPATAPDSAGQPPALGPVSPGASGSPGPVAAAPSSLVAAAASVAAAAGGDLGWMAETAAIITDASFLSGLSASLLERRPASPLGPAGGLPHAPQDSVPPSDSAASDTTPLGAAVGGPSPASMAPTEAPSEVGS

SEQ ID NO: 37907 - protein, 258 aa, Homo sapiens
VSLSCWAWGAPWRGLPSSLGSPPAGAGRGAVQEALGSAPPQARFPGLGSWMGFLRMGRARKQARPQQWSQLGQGPGGGLGGAPGSLIHPPADPTRDQCFGDRFSRLLLDEFLGYDDILMSSVKGLAENEENKGFLRNVVSGEHYRFVSMWMARTSYLAAFAIMVIFTLSVSMLLRYSHHQIFVFIVDLLQMLEMNMAIAFPAAPLLTVILALVGMEAIMSEFFNDTTTAFYIILIVWLADQYDAICCHTSTSKRHWLR

SEQ ID NO: 37908 - protein, 159 aa, Homo sapiens
VRPRPAARPPAMSSTQFNKGPSYGLSAEVKNRLLSKYDPQKEAELRTWIEGLTGLSIGPDFQKGLKDGTILCTLMNKLQPGSVPKINRSMQNWHQLENLSNFIKAMVSYGMNPVDLFEANDLFESGNMTQVQVSLLALAGKVRPREGQPPAQSHTARWM

SEQ ID NO: 37909 - protein, 341 aa, Homo sapiens
VRPRPAARPPAMSSTQFNKGPSYGLSAEVKNRLLSKYDPQKEAELRTWIEGLTGLSIGPDFQKGLKDGTILCTLMNKLQPGSVPKINRSMQNWHQLENLSNFIKAMVSYGMNPVDLFEANDLFESGNMTQVQVSLLALAGKGLDLGSLAALCWYSRPLSLTQAKTKGLQSGVDIGVKYSEKQERNFDDATMKAGQCVIGLQMGTNKCASQSGMTAYGTRRHLYDPKNHILPPMDHSTISLQMGTNKCASQVGMTAPGTRRHIYDTKLGTDKCDNSSMSLQMGYTQGANQSGQVFGLGRQIYDPKYCPQGTVADGAPSGTGDCPDPGEVPEYPPYYQEEAGY

SEQ ID NO: 37910 - protein, 212 aa, Homo sapiens
VPGPGSGVQACRGRGPGRLGRSWTVEGHGGASPGRAGLLRPSGWGRGGLEIPDHAPPGAAPPPHLGLARWRHSRAVLTTASGPFVPASGARGGGARRGGRRAGMGRAGAGSPGRRRQRCQSRGRRRPRAPRRRKAPACRRRRARRRRKKPCPRSLRPEIHECPKSQDPCASRDDWRCARSMHEFSAKDIDGHMVNLDKYRGFVCIVTNVASQ

SEQ ID NO: 37911 - protein, 260 aa, Homo sapiens
LTTASGPFVPASGARGGGARRGGRRAGMGRAGAGSPGRRRQRCQSRGRRRPRAPRRRKAPACRRRRARRRRKKPCPRSLRPEIHECPKSQDPCASRDDWRCARSMHEFSAKDIDGHMVNLDKYRGFVCIVTNVASQGKTEVNYTQLVDLHARYAECGLRILAFPCNQFGKQEPGSNEEIKEFAAGYNVKFDMFSKICVNGDDAHPLWKWMKIQPKGKGILGNAIKWNFTKFLIDKNGCVVKRYGPMEEPLVIEKDLPHYF

SEQ ID NO: 37912 - protein, 56 aa, Homo sapiens
LRERGRRPPAVEVDEDPTQGQGHPGKFLIDKNGCVVKRYGPMEEPLVIEKDLPHYF

SEQ ID NO: 37913 - protein, 111 aa, Homo sapiens
VEPPPPRRPADRTLSGAVGRGGRPPGRPQPPERSPGPAGVGAPREVRSVVRGGAFAPGTGGGTGASPETPPAKLGSPGVGVPGGSDVADPACGMGGPEKTALGRVHTCPWA

SEQ ID NO: 37914 - protein, 147 aa, Homo sapiens
LPPAAAMLPAALLRRPGLGRLVRHARAYAEAAAAPAAASGPNQMSFTFASPTQVRALRVGTLRGRRPRSPGSPPPGRDPRFRAPGPARPGSRGYSALDPRPCLCCPSPALPSSRAPPRDKRLLGALPDLPGQSLGVAGSLHSHFADQ

SEQ ID NO: 37915 - protein, 164 aa, Homo sapiens
LRWVVSVPHISARSCPDPLLSRTGRVPGGRGAGLPRHHSPRCCLQVFFNGANVRQVDVPTLTGAFGILAAHVPTLQVLRPGLVVVHAEDGTTSKYFGESGGGLQGQARLGLHIPGQSPSQLRLREKIVLGRARWLKPVIPALWEAEAGGSPEVRSSETSLANMM

SEQ ID NO: 37916 - protein, 166 aa, Homo sapiens
LRWVVSVPHISARSCPDPLLSRTGRVPGGRGAGLPRHHSPRCCLQVFFNGANVRQVDVPTLTGAFGILAAHVPTLQVLRPGLVVVHAEDGTTSKYFVSSGSIAVNADSSVQLLAEEAVTLDMLDLGAAKANLEKAQAELVGTADEATRAEIQIRIEANEALVKALE

SEQ ID NO: 37917 - protein, 38 aa, Homo sapiens
LDPSSPHLSVLSWLCLSPTVVLVGEPQVLNSPPLCVES

SEQ ID NO: 37918 - protein, 203 aa, Homo sapiens
LRPPVGTQDRGEIPGSHGCSQTQLTPEAQAAMASDEGKLFVGGLSFDTNEQSLEQVFSKYGQISEVVVVKDRETQRSRGFGFVTFENIDDAKDAMMAMNGKSVDGRQIRVDQAGKSSDNRSRGYRGGSAGGRGFFRGGRGRGRGFSRGGGDRGYGGNRFESRSGGYGGSRDYYSSRSQSGGYSDRSSGGSYRDSYDSYATHNE

SEQ ID NO: 37919 - protein, 176 aa, Homo sapiens
LTPEAQAAMASDEGKLFVGGLSFDTNEQSLEQVFSKYGQISEVVVVKDRETQRSRGFGFVTFENIDDAKDAMMAMNGKSVDGRQIRVDQAGKSSDNRSRGYRGGSAGGRGFFRGGRGRGRGFSRGGGDRGYGGNRFESRSGGYGGSRDYYSSRSQSGGYSDRSSGGSYRDSYDSYG

SEQ ID NO: 37920 - protein, 328 aa, Homo sapiens
VCAGACQRHPGNPGWLRTLTEPAPRNPLVAAMASDEGKLFVGGLSFDTNEQSLEQVFSKYGQISEVVVVKDRETQRSRGFGFVTFENIDDAKDAMMAMNGKSVDGRQIRVDQAGKSSDNRSRGYRGGSAGGRGFFRGGRGRGRGFSRGGGDRGYGGNRFESRSGGYGGSRDYYSSRSQSGGYSDRSSGGSYRDSYDSYGKSHSEGATLLWPAVGARFTLVPSPSTLGWTLRPCHCACPEEAHLSSQSHFYRRTQKPNETDQKGKGERGPAGQSARCMCGRRPASLGCGGWLLPGRRPRPGLASGVKLPLVASVPLHCACFLSSATHNE

SEQ ID NO: 37921 - protein, 256 aa, Homo sapiens [sequence omitted]

SEQ ID NO: 37922 - protein, 104 aa, Homo sapiens
VWQQLPWSPSPCVHLCCAPHSRRADVPESSDDLWGHCPRRDFTWNKSWRQPLAQEACPLRRFASEVRAQGLESLLEHGLRCAGSLRGGQSLPTTMWSPVKVGFE

SEQ ID NO: 37923 - protein, 296 aa, Homo sapiens
VSSLWRNRLARSAVNRKTRGPHVRTPMTFPPRVIWGCTAQHDHGGRKRSGTSRLQVPVSACAPSRFGRRPREPGALRRTDLRGCLKAEAKMAVLSAPGLRGFRILGLRSSVGPAVQARGVHQSVATDGPSSTQPALPKARAVAPKPSSRGEYVVAKLDDLVNWARRSSLWPMTFGLACCAVEMMHMAAPRYDMDRFGVVFRASPRQSDVMIVAGTLTNKMAPALRKVYDQMPEPRYVVSMGSCANGGGYYHYSYSVVRGCDRIVPVDIYIPGRAGTAPPTRELETGPAPHGARRPL

SEQ ID NO: 37924 - protein, 306 aa, Homo sapiens
LPSWNNKKMSVASVFVGPPQTRGPHVRTPMTFPPRVIWGCTAQHDHGGRKRSGTSRLQVPVSACAPSRFGRRPREPGALRRTDLRGCLKAEAKMAVLSAPGLRGFRILGLRSSVGPAVQARGVHQSVATDGPSSTQPALPKARAVAPKPSSRGEYVVAKLDDLVNWARRSSLWPMTFGLACCAVEMMHMAAPRYDMDRFGVVFRASPRQSDVMIVAGTLTNKMAPALRKVYDQMPEPRYVVSMGSCANGGGYYHYSYSVVRGCDRIVPVDIYIPGCPPTAEALLYGILQLQRKIKRERRLQIWYRR

SEQ ID NO: 37925 - protein, 216 aa, Homo sapiens
VLPAAHCSHPVVLSAAPGLRGFRILGLRSSVGPAVQARGVHQSVATDGPSSTQPALPKARAVAPKPSSRGEYVVAKLDDLVNWARRSSLWPMTFGLACCAVEMMHMAAPRYDMDRFGVVFRASPRQSDVMIVAGTLTNKMAPALRKVYDQMPEPRYVVSMGSCANGGGYYHYSYSVVRGCDRIVPVDIYIPGRAGTAPPTRELETGPAPHGARRPL

SEQ ID NO: 37926 - protein, 231 aa, Homo sapiens
MRSACGSVARSSPHGKDWDHLSCLQTAWARLTRHCCELCMPSRAQGRLRQLLLWFELRPQLGLDGGISKASAVLILNVFSLNRRKLFVGGLDWSTTQETLRSYFSQYGEVVDCVIMKDKTTNQSRGFGFVKFKDPNCVGTVLASRPHTLDGRNIDPKPCTPRGMQPERTRPKEGWQKGPRSDNSKSNKIFVGGIPHNCGETELREYFKKFGVVTEVVMIYDAEKQRPRGGS

SEQ ID NO: 37927 - protein, 221 aa, Homo sapiens
MGEKSRRKGPAPRHADGKLGRTCDHPYAPWSFTPSSRAPTAWVRPPCPVWASRLQEHSPEPRRARAPPTRRAQAALYAPALRLRDHLDRFSILMTSCTSWLQAPQAPGLCRDEQSSRISVPQLSGAPILLPDLEGTKLSNFQESSPLPHKHERKDKRSTPEEEGRSAPEKIIQSLKLCPGGHRPASLSSGCPAGCRLSFNLPPSMLLSVQKCCMPSSLKTC

SEQ ID NO: 37928 - protein, 173 aa, Homo sapiens
VAASSTLGFRVPRPEMGSKAKKRVLLPTRPAPPTVEQILEDVRGAPAEDPVFTILAPEGRGSPVPGKSGPETPAARGRERSTPLTPDPTPWEPPQHGHDPPVPFRMMEDAEAPGEQLYQQSRAYVAANQRLQQAGNVLRQRCELLQRAGEDLEREVAQMKQAALPAAEAASSG

SEQ ID NO: 37929 - protein, 93 aa, Homo sapiens
VAASSTLGFRVPRPEMGSKAKKRVLLPTRPAPPTVEQILEDVRGAPAEDPVFTILAPEGDDRGDLISPDPCGTWSLRPWETTLPRGRPEPRGP

SEQ ID NO: 37930 - protein, 69 aa, Homo sapiens
VAASSTLGFRVPRPEMGSKAKKRVLLPTRPAPPTVEQILEDVRGAPAEDPVFTILAPEGVEAGRCGSGL

SEQ ID NO: 37931 - protein, 170 aa, Homo sapiens
VGALVRGRARAANPGRVGAMDGLRQRVEHFLEQRNLVTEVLGALEAKTGVEKRYLAAGAVTLLSLYLLFGYGASLLCNLIGFVYPAYASIKAIESPSKDDDTVWLTYWVVYALFGLAEFFSDLLLSWFPFYYVGKVGPARAGTAVERMGLGDSWEALGPESPEDTRRWGM

SEQ ID NO: 37932 - protein, 362 aa, Homo sapiens
MDSAPLFPRPHLFQNLLLFLWALLNCGLGVSAQGPGEWTPWVSWTRCSSSCGRGVSVRSRRCLRLPGEEPCWGDSHEYRLCQLPDCPPGAVPFRDLQCALYNGRPVLGTQKTYQWVPFHGAPNQCDLNCLAEGHAFYHSFGRVLDGTACSPGAQGVCVAGRCLSAGCDGLLGSGALEDRCGRCGGANDSCLFVQRVFRDAGAFAGYWNVTLIPEGARHIRVEHRSRNHLALMGGDGRYVLNGHWVVSPPGTYEAAGTHVVYTRDTGPQETLQAAGPTSHDLLLQVLLQEPNPGIEFEFWLPRERYSPFQARVQALGWPLRQPQPRGVEPQPPAAPAVTPAQTPTLAPGPSAGPPPPGPGDPL

SEQ ID NO: 37933 - protein, 16 aa, Homo sapiens
MVTRFLGPRYRELVKN

SEQ ID NO: 37934 - protein, 37 aa, Homo sapiens
MGPTWHGASGSGSTWRCLRASCSRLPLHLRFCALLNA

SEQ ID NO: 37935 - protein, 431 aa, Homo sapiens
LHGSRVTVERPGYHKLMDFDKKGGKGETEEGRRMSKAGGGRSSHGIRSSGTSSGVLMVGPNFRVGKKIGCGNFGELRLGKNLYTNEYVAIKLEPIKSRAPQLHLEYRFYKQLSATEGVPQVYYFGPCGKYNAMVLELLGPSLEDLFDLCDRTFTLKTVLMIAIQLITRMEYVHTKSLIYRDVKPENFLVGRPGTKRQHAIHIIDFGLAKEYIDPETKKHIPYREHKSLTGTARYMSINTHLGKEQSRRDDLEALGHMFMYFLRGSLPWQGLKADTLKERYQKIGDTKRATPIEVLCENFPEEMATYLRYVRRLDFFEKPDYDYLRKLFTDLFDRSGFVFDYEYDWAGKPLPTPIGTVHTDLPSQPQLRDKTQPHSKNQALNSTNGELNADDPTAGHSNAPITAPAEVEVADETKCCCFFKRRKRKSLQRHK

SEQ ID NO: 37936 - protein, 167 aa, Homo sapiens
LEALGHMFMYFLRGSLPWQGLKADTLKERYQKIGDTKRATPIEVLCENFPEEMATYLRYVRRLDFFEKPDYDYLRKLFTDLFDRSGFVFDYEYDWAGKPLPTPIGTVHTDLPSQPQLRDKTQPHSKNQALNSTNGELNADDPTAGHSNAPITAPAEVEVADETNRPR

SEQ ID NO: 37937 - protein, 319 aa, Homo sapiens
LGICRGLGADVPTAPPVDVSCQARLFDEPQLASLCLENIDKNTADAITAEGFTDIDLDTLVAVLERDTLGIREVRLFNAVVRWSEAECQRQQLQVTPENRRKVLGKALGLIRFPLMTIEEFAAGPAQSGILVDREVVSLFLHFTVNPKPRVEFIDRPRCCLRGKECSINRFQQVESRWGYSGTSDRIRFSVNKRIFVVGFGLYGSIHGPTDYQVNIQIIHTDSNTVLGQNDTGFSCDGSASTFRVMFKEPVEVLPNVNYTACATLKGPDSHYGTKGLRKVTHESPTTGAKTCFTFCYAAGNNNGTSVEDGQIPEVIFYT

SEQ ID NO: 37938 - protein, 165 aa, Homo sapiens
LGICRGLGADVPTAPPVDVSCQARLFDEPQLASLCLENIDKNTADAITAEGFTDIDLDTLVAVLERDTLGIREVRLFNAVVRWSEAECQRQQLQVTPENRRKVLGKALGLIRFPLMTIEEFAAGNRARAQGLVWEGSGTQVGIWVPRIVPPSSLRKAWQMPGIYR

SEQ ID NO: 37939 - protein, 96 aa, Homo sapiens
LLLPFFRNIQLTVSRASWTPGTPRPAPRLLTHFLRAPLCIIKGLIFIVTFTTILRFLFFLNGVSHCRPDWSPVAQSRLTASSTSWVQVILLLQPPK

SEQ ID NO: 37940 - protein, 247 aa, Homo sapiens
VFRGLSGWSAPPASWPRTPLQKSRRAGVTKMSNPFLKQVFNKDKTFRPKRKFEPGTQRFELHKKAQASLNAGLDLRLAVQLPPGEDLNDWVAVHVVDFFNRVNLIYGTISDGCTEQSCPVMSGGPKYEYRWQDEHKFRKPTALSAPRYMDLLMDWIEAQINNEDLFPTNVGTPFPKNFLQTVRKILSRLFRVFVHVYIHHFDRIAQMGSEAHVNTCYKHFYYFVKEFGLIDTKELEPLKEMTARMCH

SEQ ID NO: 37941 - protein, 68 aa, Homo sapiens
VCPVPLGRTCESHLTGRAPTRQGKETPLTPHGQRGHRTDPSSEIMTFYLLLLMKTVTLACNPLQNPMQ

SEQ ID NO: 37942 - protein, 1192 aa, Homo sapiens
LPRRSGRQRGAPRAAGTGPGPPHGAQPRASRGKSPWAAAMALKMVKGSIDRMFDKNLQDLVRGIRNHKEDEAKYISQCIDEIKQELKQDNIAVKANAVCKLTYLQMLGYDISWAAFNIIEVMSASKFTFKRIGYLAASQSFHEGTDVIMLTTNQIRKDLSSPSQYDTGVALTGLSCFVTPDLARDLANDIMTLMSHTKPYIRKKAVLIMYKVFLKYPESLRPAFPRLKEKLEDPDPGVQSAAVNVICELARRNPKNYLSLAPLFFKLMTSSTNNWVLIKIIKLFGALTPLEPRLGKKLIEPLTNLIHSTSAMSLLYECVNTVIAVLISLSSGMPNHSASIQLCVQKLRILIEDSDQNLKYLGLLAMSKILKTHPKSVQSHKDLILQCLDDKDESIRLRALDLLYGMVSKKNLMEIVKKLMTHVDKAEGTTYRDELLTKIIDICSQSNYQYITNFEWYISILVELTRLEGTRHGHLIAAQMLDVAIRVKAIRKFAVSQMSALLDSAHLLASSTQRNGICEVLYAAAWICGEFSEHLQEPHHTLEAMLRPRVTTLPGHIQAVYVQNVVKLYASILQQKEQAGEAEGAQAVTQLMVDRLPQFVQSADLEVQERASCILQLVKHIQKLQAKDVPVAEEVSALFAGELNPVAPKAQKKVPVPEGLDLDAWINEPLSDSESEDERPRAVFHEEEQRRPKHRPSEADEEELARRREARKQEQANNPFYIKSSPSPQKRYQDTPGVEHIPVVQIDLSVPLKVPGLPMSDQYVKLEEERRHRQKLEKDKRRKKRKEKEKKGKRRHSSLPTESDEDIAPAQQVDIVTEEMPENALPSDEDDKDPNDPYRALDIDLDKPLADSEKLPIQKHRNTETSKSPEKDVPMVEKKSKKPKKKEKKHKEKERDKEKKKEKEKKKSPKPKKKKHRKEKEERTKGKKKSKKQPPGSEEAAGEPVQNGAPEEEQLPPESSYSLLAENSYVKMTCDIRGSLQEDSQVTVAIVLENRSSSILKGMELSVLDSLNARMARPQGSSVHDGVPVPFQLPPGVSNEAQYVFTIQSIVMAQKLKGTLSFIAKNDEGATHEKLDFRLHFSCSSYLITTPCYSDAFAKLLESGDLSMSSIKVDGIRMSFQNLLAKICFHHHFSVVERVDSCASMYSRSIQGHHVCLLVKKGENSVSVDGKCSDSTLLSNLLEEMKATLAKC

SEQ ID NO: 37943 - protein, 1254 aa, Homo sapiens
LPRRSGRQRGAPRAAGTGPGPPHGAQPRASRGKSPWAAAMALKMVKGSIDRMFDKNLQDLVRGIRNHKEDEAKYISQCIDEIKQELKQDNIAVKANAVCKLTYLQMLGYDISWAAFNIIEVMSASKFTFKRIGYLAASQSFHEGTDVIMLTTNQIRKDLSSPSQYDTGVALTGLSCFVTPDLARDLANDIMTLMSHTKPYIRKKAVLIMYKVFLKYPESLRPAFPRLKEKLEDPDPGVQSAAVNVICELARRNPKNYLSLAPLFFKLMTSSTNNWVLIKIIKLFGALTPLEPRLGKKLIEPLTNLIHSTSAMSLLYECVNTVIAVLISLSSGMPNHSASIQLCVQKLRILIEDSDQNLKYLGLLAMSKILKTHPKSVQSHKDLILQCLDDKDESIRLRALDLLYGMVSKKNLMEIVKKLMTHVDKAEGTTYRDELLTKIIDICSQSNYQYITNFEWYISILVELTRLEGTRHGHLIAAQMLDVAIRVKAIRKFAVSQMSALLDSAHLLASSTQRNGICEVLYAAAWICGEFSEHLQEPHHTLEAMLRPRVTTLPGHIQAVYVQNVVKLYASILQQKEQAGEAEGAQAVTQLMVDRLPQFVQSADLEVQERASCILQLVKHIQKLQAKDVPVAEEVSALFAGELNPVAPKAQKKVPVPEGLDLDAWINEPLSDSESEDERPRAVFHEEEQRRPKHRPSEADEEELARRREARKQEQANNPFYIKSSPSPQKRYQDTPGVEHIPVVQIDLSVPLKVPGLPMSDQYVKLEEERRHRQKLEKDKRRKKRKEKEKKGKRRHSSLPTESDEDIAPAQQVDIVTEEMPENALPSDEDDKDPNDPYRALDIDLDKPLADSEKLPIQKHRNTETSKSPEKDVPMVEKKSKKPKKKEKKHKEKERDKEKKKEKEKKAEDLDFWLSTTPPPAPAPAPAPVPSTGELSVNTVTTPKDECEDAKTEAQGEEDDAEGQDQDKKSPKPKKKKHRKEKEERTKGKKKSKKQPPGSEEAAGEPVQNGAPEEEQLPPESSYSLLAENSYVKMTCDIRGSLQEDSQVTVAIVLENRSSSILKGMELSVLDSLNARMARPQGSSVHDGVPVPFQLPPGVSNEAQYVFTIQSIVMAQKLKGTLSFIAKNDEGATHEKLDFRLHFSCSSYLITTPCYSDAFAKLLESGDLSMSSIKVDGIRMSFQNLLAKICFHHHFSVVERVDSCASMYSRSIQGHHVCLLVKKGENSVSVDGKCSDSTLLSNLLEEMKATLAKC

SEQ ID NO: 37944 - protein, 90 aa, Homo sapiens
LNPTLLLLQKSPKPKKKKHRKEKEERTKGKKKSKKQPPGSEEAAGEPVQNGAPEEEQLPVRGTSAPPPHAGVPGGLCAAPHSCSLHAGEN

SEQ ID NO: 37945 - protein, 565 aa, Homo sapiens
LAAPTMRDLPLTSLALVLSALGALLGTEALRAEEPAVGTSGLIFREDLDWPPGSPQEPLCLVALGGDSNGSSSPLRVVGALSAYEQAFLGAVQRARWGPRDLATFGVCNTGDRQAALPSLRRLGAWLRDPGGQRLVVLHLEEVTWEPTPSLRFQEPPPGGAGPPELALLVLYPGPGPEVTVTRAGLPGAQSLCPSRDTRYLVLAVDRPAGAWRGSGLALTLQPRGEDSRLSTARLQALLFGDDHRCFTRMTPALLLLPRSEPAPLPAHGQLDTVPFPPPRPSAELEESPPSADPFLETLTRLVRALRVPPARASAPRLALDPDALAGFPQGLVNLSDPAALERLLDGEEPLLLLLRPTAATTGDPAPLHDPTSAPWATALARRVAAELQAAAAELRSLPGLPPATAPLLARLLALCPGGPGGLGDPLRALLLLKALQGLRVEWRGRDPRGPGRAQRSAGATAADGPCALRELSVDLRAERSVLIPETYQANNCQGVCGWPQSDRNPRYGNHVVLLLKMQVRGAALARPPCCVPTAYAGKLLISLSEERISAHHVPNMVATECGCR

SEQ ID NO: 37946 - protein, 19 aa, Homo sapiens
LYFEEKFLIWSLLETVLVF

SEQ ID NO: 37947 - protein, 146 aa, Homo sapiens
LRRAPADMAAAVAAALARLLAAFLLLAAQVACEYGMVHVVSQAGGPEGKDYCILYNPQWAHLPHDLSKASFLQLRNWTASLLCSAADLPARGFSNQIPLVARGNCTFYEKVRLAQGSGARGLLIVSRERLLQRHAGHLHGSVSAAR

SEQ ID NO: 37948 - protein, 22 aa, Homo sapiens
MAAAVAAALARLLAAFLLLAAQ

SEQ ID NO: 37949 - protein, 36 aa, Homo sapiens
LVSATSWIILAKDFAIYFSAFSGRISLLPEGLGRAL

SEQ ID NO: 37950 - protein, 112 aa, Homo sapiens [sequence omitted]

SEQ ID NO: 37951 - protein, 44 aa, Homo sapiens
VIVNWLLSVSVLYRPNKGFGPDLGFPTGGLVGCHLIIRPDYPPR

SEQ ID NO: 37952 - protein, 54 aa, Homo sapiens
VAAVAAVGPRQAASVAEVAGRVAGGRREGAAGADPPAMKPPAVETVLARMISIS

SEQ ID NO: 37953 - protein, 247 aa, Homo sapiens
VAAVAAVGPRQAASVAEVAGRVAGGRREGAAGADPPAMKPPAACAGDMADAASPCSVVNDLRWDLSAQQIEERTRELIEQTKRVYDQVGTQEFEDVSYESTLKALADVEVTYTVQRNILDFPQHVSPSKDIRTASTEADKKLSEFDVEMSMREDVYQRIVWLQEKVQKDSLRPEAARYLERLIKLGRRNGLHLPRETQENIKRIKKKLSLLCIDFNKNLNEDTTFLPFTLQELVAGPPFPPPSSLHT

SEQ ID NO: 37954 - protein, 726 aa, Homo sapiens
VAAVAAVGPRQAASVAEVAGRVAGGRREGAAGADPPAMKPPAACAGDMADAASPCSVVNDLRWDLSAQQIEERTRELIEQTKRVYDQVGTQEFEDVSYESTLKALADVEVTYTVQRNILDFPQHVSPSKDIRTASTEADKKLSEFDVEMSMREDVYQRIVWLQEKVQKDSLRPEAARYLERLIKLGRRNGLHLPRETQENIKRIKKKLSLLCIDFNKNLNEDTTFLPFTLQELGGLPEDFLNSLEKMEDGKLKVTLKYPHYFPLLKKCHVPETRRKVEEAFNCRCKEENCAILKELVTLRAQKSRLLGFHTHADYVLEMNMAKTSQTVATFLDELAQKLKPLGEQERAVILELKRAECERRGLPFDGRIRAWDMRYYMNQVEETRYCVDQNLLKEYFPVQVVTHGLLGIYQELLGLAFHHEEGASAWHEDVRLYTARDAASGEVVGKFYLDLYPREGKYGHAACFGLQPGCLRQDGSRQIAIAAMVANFTKPTADAPSLLQHDEVETYFHEFGHVMHQLCSQAEFAMFSGTHVERDFVEAPSQMLENWVWEQEPLLRMSRHYRTGSAVPRELLEKLIESRQANTGLFNLRQIVLAKVDQALHTQTDADPAEEYARLCQEILGVPATPGTNMPATFGHLAGGYDAQYYGYLWSEVYSMDMFHTRFKQEGVLNSKVGMDYRSCILRPGGSEDASAMLRRFLGRDPKQDAFLLSKGLQVGGCEPEPQVC

SEQ ID NO: 37955 - protein, 119 aa, Homo sapiens
VAEVAGRVAGGRREGAAGADPPAMKPPAACAGDMADAASPCSVVNDLRWDLSAQQIEERTRELIEQTKRVYDQVGTQEFEDVSYESTLKALADVEVTYTACFPLQGHPDSQHRGRQEAL

SEQ ID NO: 37956 - protein, 583 aa, Homo sapiens
LLFGAAALAHVLHALMFLFQEKVQKDSLRPEAARYLERLIKLGRRNGLHLPRETQENIKRIKKKLSLLCIDFNKNLNEDTTFLPFTLQELGGLPEDFLNSLEKMEDGKLKVTLKYPHYFPLLKKCHVPETRRKVEEAFNCRCKEENCAILKELVTLRAQKSRLLGFHTHADYVLEMNMAKTSQTVATFLDELAQKLKPLGEQERAVILELKRAECERRGLPFDGRIRAWDMRYYMNQVEETRYCVDQNLLKEYFPVQVVTHGLLGIYQELLGLAFHHEEGASAWHEDVRLYTARDAASGEVVGKFYLDLYPREGKYGHAACFGLQPGCLRQDGSRQIAIAAMVANFTKPTADAPSLLQHDEVETYFHEFGHVMHQLCSQAEFAMFSGTHVERDFVEAPSQMLENWVWEQEPLLRMSRHYRTGSAVPRELLEKLIESRQANTGLFNLRQIVLAKVDQALHTQTDADPAEEYARLCQEILGVPATPGTNMPATFGHLAGGYDAQYYGYLWSEVYSMDMFHTRFKQEGVLNSKVGMDYRSCILRPGGSEDASAMLRRFLGRDPKQDAFLLSKGLQVGGCEPEPQVC

SEQ ID NO: 37957 - protein, 223 aa, Homo sapiens
LDMSLWPWDRACWPWRWREWRPWVTVWWCRLQENCAILKELVTLRAQKSRLLGFHTHADYVLEMNMAKTSQTVATFLDELAQKLKPLGEQERAVILELKRAECERRGLPFDGRIRAWDMRYYMNQVEETRYCVDQNLLKEYFPVQVVTHGLLGIYQELLGLAFHHEEGASAWHEDVRLYTARDAASGEVVGKFYLDLYPRWVRAAGAGGAPRPWVSSEPGVPV

SEQ ID NO: 37958 - protein, 637 aa, Homo sapiens
LLRGPGGGWVGPGRDGAGTRRDEAGPDGSNGPRWGKEEFPLGLNLADLRSFRPTLAKVLEATALKMTSRDQPRPKGPPKSTSPCPGISNSESSPTLNYQGILNRLKQFPRFSPHFAAELESIYYSLHKIQQDVAEHHKQIGNVLQIVESCSQLQGFQSEEVSPAEPASPGTPQQVKDKTLQESSFEDIMATRSSDWLRRPLGEDNQPETQLFWDKEPWFWHDTLTEQLWRIFAGVHDEKAKPRDRQQAPGLGQESKAPGSCDPGTDPCPEDASTPRPPEASSSPPEGSQDRNTSWGVVQEPPGRASRFLQSISWDPEDFEDAWKRPDALPGQSKRLAVPCKLEKMRILAHGELVLATAISSFTRHVFTCGRRGIKVWSLTGQVAEDRFPESHLPIQTPGAFLRTCLLSSNSRSLLTGGYNLASVSVWDLAAPSLHVKEQLPCAGLNCQALDANLDANLAFASFTSGVVRIWDLRDQSVVRDLKGYPDGVKSIVVKGYNIWTGGPDACLRCWDQRTIMKPLEYQFKSQIMSLSHSPQEDWVLLGMANGQQWLQSTSGSQRHMVGQKDSVILSVKFSPFGQWWASVGMDDFLGVYSMPAGTKVFEVPEMSPVTCCDVSSNNRLVVTGSGEHASVYQITY

SEQ ID NO: 37959 - protein, 68 aa, Homo sapiens
LNLADLRSFRPTLAKVLEATALKMTSRDQPRPKGPPKSTSPCPGISNSESSPTLNYQGILNRLKQFPR

SEQ ID NO: 37960 - protein, 653 aa, Homo sapiens
LPHLPGVPEWAYNSHRAPRAPDGRTTIPDRQRGWRGGSPRCPQDLRASAGCPARRPQDPGGYPCRGESAGAAAAAVPSQLPPRAAPPPARMLEEAGEVLENMLKASCLPLGFIVFLPAVLLLVAPPLPAADAAHEFTVYRMQQYDLQGQPYGTRNAVLNTEARTMAAEVLSRRCVLMRLLDFSYEQYQKALRQSAGAVVIILPRAMAAVPQDVVRQFMEIEPEMLAMETAVPVYFAVEDEALLSIYKQTQAASASQGSASAAEVLLRTATANGFQMVTSGVQSKAVSDWLIASVEGRLTGLGGEDLPTIVIVAHYDAFGVAPWLSLGADSNGSGVSVLLELARLFSRLYTYKRTHAAYNLLFFASGGGKFNYQGTKRWLEDNLDHTDSSLLQDNVAFVLCLDTVGRGSSLHLHVSKPPREGTLQHAFLRELETVAAHQFPEVRFSMVHKRINLAEDVLAWEHERFAIRRLPAFTLSHLESHRDGQRSSIMDVRSRVDSKTLTRNTRIIAEALTRVIYNLTEKGTPPDMPVFTEQMQIQQEQLDSVMDWLTNQPRAAQLVDKDSTFLSTLEHHLSRYLKDVKQHHVKADKRDPEFVFYDQLKQVMNAYRVKPAVFDLLLAVGIAAYLGMAYVAVQHFSLLYKTVQRLLVKAKTQ

SEQ ID NO: 37961 - protein, 122 aa, Homo sapiens
LGGVFVAVLAALKDRGWMEDFCCSRPTQPLCLPAAQSPTVAETLHPAFSGVQQYTAMYPTAAITPIAHSVPQPPPLLQQQQREGVWRHGADADVPTLRQYHFLQGVYGSSYQPEQVFRLREL

SEQ ID NO: 37962 - protein, 21 aa, Homo sapiens
LLSLLCVCWFVPKVSLQVETS

SEQ ID NO: 37963 - protein, 44 aa, Homo sapiens
LPPGLPSPWLSLVLSPLLLYSGVPPGAQPLPPPTLLLGTQRGHF

SEQ ID NO: 37964 - protein, 505 aa, Homo sapiens
VVGVPGACPHGTQEGLARVPSAEPGGGGRGPGAAMGPGPPAAGAAPSPRPLSLVARLSYAVGHFLNDLCASMWFTYLLLYLHSVRAYSSRGAGLLLLLGQVADGLCTPLVGYEADRAASCCARYGTVCVLLSFPFIFSPCLGCGAATPEWAALLYYGPFIVIFQFGWASTQISHLSLIPELVTNDHEKVELTALRYAFTVVANITVYGAAWLLLHLQGSSRVEPTQDISISDQLGGQDVPVFRNLSLLVVGVGAVFSLLFHLGTRERRRPHAEEPGEHTPLLAPATAQPLLLWKHWLREPAFYQVGILYMTTRLIVNLSQTYMAMYLTYSLHLPKKFIATIPLVMYLSGFLSSFLMKPINKCIGRNMTYFSGLLVILAFAAWVALAEGLGVAVYAAAVLLGAGCATILVTSLAMTADLIGPHTNSGAFVYGSMSFLDKVANGLAVMAIQSLHPCPSELCCRACVSFYHWAMVAVTGGVGVAAALCLCSLLLWPTRLRRWDRDARP

SEQ ID NO: 37965 - protein, 58 aa, Homo sapiens
VGPLLARAWTLAALLLDSHHEAPMLARSLAARRPGAKDTAVSPVPRISPPPKAHPRAF

SEQ ID NO: 37966 - protein, 1011 aa, Homo sapiens
VRAPCDRATHPVLLLARPSPWSVSLCLWSSVPLAGDLPPCCHHKRGKVGQTGGEARATSLGFPPHHPCQAGTRALAPAACPEATQPPRQVADMEELTIWEQHTATLSKDPRRGFGIAISGGRDRPGGSMVVSDVVPGGPAEGRLQTGDHIVMVNGVSMENATSAFAIQILKTCTKMANITVKRPRRIHLPATKASPSSPGRQDSDEDDGPQRVEEVDQGRGYDGDSSSGSGRSWDERSRRPRPGRRGRAGSHGRRSPGGGSEANGLALVSGFKRLPRQDVQMKPVKSVLVKRRDSEEFGVKLGSQIFIKHITDSGLAARHRGLQEGDLILQINGVSSQNLSLNDTRRLIEKSEGKLSLLVLRDRGQFLVNIPPAVSDSDSSPLEDISDLASELSQAPPSHIPPPPRHAQRSPEASQTDSPVESPRLRRESSVDSRTISEPDEQRSELPRESSYDIYRVPSSQSMEDRGYSPDTRVVRFLKGKSIGLRLAGGNDVGIFVSGVQAGSPADGQGIQEGDQILQVNDVPFQNLTREEAVQFLLGLPPGEEMELVTQRKQDIFWKMVQSRVGDSFYIRTHFELEPSPPSGLGFTRGDVFHVLDTLHPGPGQSHARGGHWLAVRMGRDLREQERGIIPNQSRAEQLASLEAAQRAVGVGPGSSAGSNARAEFWRLRGLRRGAKKTTQRSREDLSALTRQGRYPPYERVVLREASFKRPVVILGPVADIAMQKLTAEMPDQFEIAETVSRTDSPSKIIKLDTVRVIAEKDKHALLDVTPSAIERLNYVQYYPIVVFFIPESRPALKALRQWLAPASRRSTRRLYAQAQKLRKHSSHLFTATIPLNGTSDTWYQELKAIIREQQTRPIWTAEDQLDGSLEDNLDLPHHGLADSSADLSCDSRVNSDYETDGEGGAYTDGEGYTDGEGGPYTDVDDEPPAPALARSSEPVQADESQSPRDRGRISAHQGAQVDSRHPQGQWRQDSMRTYEREALKKKFMRVHDAESSDEDGYDWGPATDL

SEQ ID NO: 37967 - protein, 190 aa, Homo sapiens
MELDESSLQELVQQFEALPGDLVGPSPGGAPCPLHIATGHGLASQEIADAHGLLSAEAGRDDLLGLLHCEECPPSQTGPEEPLEPAPRLLQPPEDPDEDSDSPEWVEGASAEQEGSRSSSSSPEPWLETVPLVTPEEPPAGAQVVPAPPSRHPGLPGTKQGDSVLPLLYLLPEPRDPGFLPCPPGGAWSL

SEQ ID NO: 37968 - protein, 57 aa, Homo sapiens
LLLYTASTLAFTFTPASSVTLGPSRQRGLWHREGWDPPRRRGGPNAALVQARRRVCG

SEQ ID NO: 37969 - protein, 269 aa, Homo sapiens
VGSRRGGAAVVGAQDPTEPPRLSRSLSGASPFLGETKQETLTNISAVNYDFDEEYFSNTSELAKDFIRRLLVKDPKRRMTIAQSLEHSWIKAIRRRNVRGEDSGRKPERRRLKTTRLKEYTIKSHSSLPPNNSYADFERFSKVLEEAAAAEEGLRELQRSRRLCHEDVEALAAIYEEKEAWYREESDSLGQDLRRLRQELLKTEALKRQAQEEAKGALLGTSGLKRRFSRLENRYEALAKQVASEMRFVQDLVRALEQEKLQGVECGLR

SEQ ID NO: 37970 - protein, 169 aa, Homo sapiens
LGPAERAKKVEDMMKKLWGDRYFDPANGKFSKSATSPEGKKLPRTFCQLILDPIFKVFDAIMNFKKEETAKLIEKLDIKLDSEDKDKEGKPLLKAVMRRWLPAGDALLQMITIHLPSPVTAQKYRCELLYEGPPDDEAAMGTWSRWPGPEMQPDDFLLPKVVGCRVPEG

SEQ ID NO: 37971 - protein, 164 aa, Homo sapiens
MAAELVEAKNMVMSFRVSDLQMLLGFVGRSKSGLKHELVTRALQLVQFDCSPELFKKIKELYETRYAKKNSEPAPQPHRPLDPLTMHSTYDRAGAVPRTPLAGPNIDYPVLYGKYLNGLGRLPAKTLKPEVRLVKLPFFNMLDELLKPTELGNCSPELKPCRSS

SEQ ID NO: 37972 - protein, 137 aa, Homo sapiens
MAALSRALGPLRTPAPPLWIGLFLVATGSQQSLAQPLPGNTTEATPRSLRASGSLCGPHAKAPYLCEATHEPAAARIRAQVPDTRWSRVGGQRFYSRVLSPLHRGPSGHTEASAQRSHMGKLKEPQPQDHKPGLGAS

SEQ ID NO: 37973 - protein, 510 aa, Homo sapiens
VTASASFGSGDRATEGCELARPQVTLAVGGPPAWSRDPPRHLQTELDGPMNTDLAAGKMASAACSMDPIDSFELLDLLFDRQDGILRHVELGEGWGHVKDQQVLPNPDSDDFLSSILGSGDSLPSSPLWSPEGSDSGISEDLPSDPQDTPPRSGPATSPAGCHPAQPGKGPCLSYHPGNSCSTTTPGPVIQVPEASVTIDLEMWSPGGRICAEKPADPVDLSPRCNLTVKDLLLSGSSGDLQQHHLGASYLLRPGAGHCQELVLTEDEKKLLAKEGITLPTQLPLTKYEERVLKKIRRKIRNKQSAQESRKKKKEYIDGLETRMSACTAQNQELQRKVLHLEKQNLSLLEQLKKLQAIVVQSTSKSAQTGTCVAVLLLSFALIILPSISPFGPNKTESPGDFAPVRVFSRTLHNDAASRVAADAVPGSEAPGPRPEADTTREESPGSPGADWGFQDTANLTNSTEELDNATLVLRNATEGLGQVALLDWVAPGPSTGSGRAGLEAAGDEL

SEQ ID NO: 37974 - protein, 361 aa, Homo sapiens
LAVGGPPAWSRDPPRHLQTELDGPMNTDLAAGKMASAACSMDPIDSFELLDLLFDRQDGILRHVELGEGWGHVKDQQVLPNPDSDDFLSSILGSGDSLPSSPLWSPEGSDSGISEDLPSDPQDTPPRSGPATSPAGCHPAQPGKGPCLSYHPGNSCSTTTPGPVIQVPEASVTIDLEMWSPGGRICAEKPADPVDLSPRCNLTVKDLLLSGSSGDLQQHHLGASYLLRPGAGHCQELVLTEDEKKLLAKEGITLPTQLPLTKDVSLHCSESGVTEESLASREAKPVPLGATEETPGHCGAVHQQVSPDRHLCRSPVAVLCPHHPPLHQPFWPQQNREPWGLCACTSVLQNFAQRCCLPRGC

SEQ ID NO: 37975 - protein, 484 aa, Homo sapiens
LAVGGPPAWSRDPPRHLQTELDGPMNTDLAAGKMASAACSMDPIDSFELLDLLFDRQDGILRHVELGEGWGHVKDQVLPNPDSDDFLSSILGSGDSLPSSPLWSPEGSDSGISEDLPSDPQDTPPRSGPATSPAGCHPAQPGKGPCLSYHPGNSCSTTTPGPVIQVPEASVTIDLEMWSPGGRICAEKPADPVDLSPRCNLTVKDLLLSGSSGDLQQHHLGASYLLRPGAGHCQELVLTEDEKKLLAKEGITLPTQLPLTKYEERVLKKIRRKIRNKQSAQESRKKKKEYIDGLETRMSACTAQNQELQRKVLHLEKQNLSLLEQLKKLQAIVVQSTSKSAQTGTCVAVLLLSFALIILPSISPFGPNKTESPGDFAPVRVFSRTLHNDAASRVAADAVPGSEAPGPRPEADTTREESPGSPGADWGFQDTANLTNSTEELDNATLVLRNATEGLGQVALLDWVAPGPSTGSGRAGLEAAGDEL

SEQ ID NO: 37976 - protein, 483 aa, Homo sapiens
LAVGGPPAWSRDPPRHLQTELDGPMNTDLAAGKMASAACSMDPIDSFELLDLLFDRQDGILRHVELGEGWGHVKDQQVLPNPDSDDFLSSILGSGDSLPSSPLWSPEGSDSGISEDLPSDPQDTPPRSGPATSPAGCHPAQPGKGPCLSYHPGNSCSTTTPGPVIQVPEASVTIDLEMWSPGGRICAEKPADPVDLSPRCNLTVKDLLLSGSSGDLHHLGASYLLRPGAGHCQELVLTEDEKKLLAKEGITLPTQLPLTKYEERVLKKIRRKIRNKQSAQESRKKKKEYIDGLETRMSACTAQNQELQRKVLHLEKQNLSLLEQLKKLQAIVVQSTSKSAQTGTCVAVLLLSFALIILPSISPFGPNKTESPGDFAPVRVFSRTLHNDAASRVAADAVPGSEAPGPRPEADTTREESPGSPGADWGFQDTANLTNSTEELDNATLVLRNATEGLGQVALLDWVAPGPSTGSGRAGLEAAGDEL

SEQ ID NO: 37977 - protein, 237 aa, Homo sapiens
LRAELAAAMTPQLLLALVLWASCPPCSGRKGPPAALTLPRVQCRASRYPIAVDCSWTLPPAPNSTSPVSFIATYRLGMAARGHSWPCLQQTPTSTSCTITDVQLFSMAPYVLNVTAVHPWGSSSSFVPFITEHIIKPDPPEGVRLSPLAERQLQVQWEPPGSWPFPEIFSLKYWIRYKRQGAARFHRVGPIEATSFILRAVRPRARYYVQVAAQDLTDYGELSDWSLPATATMSLGK

SEQ ID NO: 37978 - protein, 23 aa, Homo sapiens
MEMYYSLLYLYLYHSAGLTELSL

SEQ ID NO: 37979 - protein, 109 aa, Homo sapiens
LGGALRAGQQGVRRGRGLPQPGPLRATGQDGRLLVPARQQLAAGLLSFYNARTKQVLHTFKTRFTQPLLPAFTVWCGSFQVTTGLQVPSAVRCLQKRGSATSSSNTSLT

SEQ ID NO: 37980 - protein, 458 aa, Homo sapiens
LQTLTLELRVGGSEDATRETLGCPPKIRKQGKKNLCSRSRVKKGLNRKQFPGSNFVILTPPLPLPGLGSAPIRNWTGVGTSPGLVPLPPVQAGIRPPPQARTTQKQKSRATMSSWSRQRPKSPGGIQPHVSRTLFLLLLLAASAWGVTLSPKDCQVFRSDHGSSISCQPPAEIPGYLPADTVHLAVEFFNLTHLPANLLQGASKLQELHLSSNGLESLSPEFLRPVPQLRVLDLTRNALTGLPPGLFQASATLDTLVLKENQLEVLEVSWLHGLKALGHLDLSGNRLRKLPPGLLANFTLLRTLDLGENQLETLPPDLLRGPLQLERLHLEGNKLQVLGKDLLLPQPDLRYLFLNGNKLARVAAGAFQGLRQLDMLDLSNNSLASVPEGLWASLGQPNWDMRDGFDISGNPWICDQNLSDLYRWLQAQKDKMFSQNDTRCAGPEAVKGQTLLAVAKSQ

SEQ ID NO: 37981 - protein, 990 aa, Homo sapiens
LEAQGREEEVQPRYARSSCFWRGQAPQGRLSRITFTSGGSESLSQKARAGLGDTPAAQTGKWARSLPNTSQKDEAAELLIRGSGTWTVPLSGVTSSCRLALAMQTPRASPPRPALLLLLLLLGGAHGLFPEEPPPLSVAPRDYLNHYPVFVGSGPGRLTPAEGADDLNIQRVLRVNRTLFIGDRDNLYRVELEPPTSTELRYQRKLTWRSNPSDINVCRMKGKQEGECRNFVKVLLLRDESTLFVCGSNAFNPVCANYSIDTLQPVGDNISGMARCPYDPKHANVALFSDGMLFTATVTDFLAIDAVIYRSLGDRPTLRTVKHDSKWFKEPYFVHAVEWGSHVYFFFREIAMEFNYLEKVVVSRVARVCKNDVGGSPRVLEKQWTSFLKARLNCSVPGDSHFYFNVLQAVTGVVSLGGRPVVLAVFSTPSNSIPGSAVCAFDLTQVAAVFEGRFREQKSPESIWTPVPEDQVPRPRPGCCAAPGMQYNASSALPDDILNFVKTHPLMDEAVPSLGHAPWILRTLMRHQLTRVAVDVGAGPWGNQTVVFLGSEAGTVLKFLVRPNASTSGTSGLSVFLEEFETYRPDRCGRPGGGETGQRLLSLELDAASGGLLAAFPRCVVRVPVARCQQYSGCMKNCIGSQDPYCGWAPDGSCIFLSPGTRAAFEQDVSGASTSGLGDCTGLLRASLSEDRAGLVSVNLLVTSSVAAFVVGAVVSGFSVGWFVGLRERRELARRKDKEAILAHGAGEAVLSVSRLGERRAQGPGGRGGGGGGGAGVPPEALLAPLMQNGWAKATLLQGGPHDLDSGLLPTPEQTPLPQKRLPTPHPHPHALGPRAWDHGHPLLPASASSSLLLLAPARAPEQPPAPGEPTPDGRLYAARPGRASHGDFPLTPHASPDRRRVVSAPTGPLDPASAADGLPRPWSPPPTGSLRRPLGPHAPPAATLRRTHTFNSGEARPGDRHRGCHARPGTDLAHLLPYGGADRTAPPVP

SEQ ID NO: 37982 - protein, 741 aa, Homo sapiens
LGVQKAGGSVEHAFTTSSFCCRRLHPPVPMACTGPSLPSAFDILGAAGQDKLLYLKHKLKTPRPGCQGQDLLHAMVLLKLGQETEARISLEALKADAVARLVARQWAGVDSTEDPEEPPDVSWAVARLYHLLAEEKLCPASLRDVAYQEAVRTLSSRDDHRLGELQDEARNRCGWDIAGDPGSIRTLQSNLGCLPPSSALPSGTRSLPRPIDGVSDWSQGCSLRSTGSPASLASNLEISQSPTMPFLSLHRSPHGPSKLCDDPQASLVPEPVPGGCQEPEEMSWPPSGEIASPPELPSSPPPGLPEVAPDATSTGLPDTPAAPETSTNYPVECTEGSAGPQSLPLPILEPVKNPCSVKDQTPLQLSVEDTTSPNTKPCPPTPTTPETSPPPPPPPPSSTPCSAHLTPSSLFPSSLESSSEQKFYNFVILHARADEHIALRVREKLEALGVPDGATFCEDFQVPGRGELSCLQDAIDHSAFIILLLTSNFDCRLSLHQVNQAMMSNLTRQGSPDCVIPFLPLESSPAQLSSDTASLLSGLVRLDEHSQIFARKVANTFKPHRLQARKAMWRKEQDTRALREQSQHLDGERMQAAALNAAYSAYLQSYLSYQAQMEQLQVAFGSHMSFGTGAPYGARMPFGGQVPLGAPPPFPTWPGCPQPPPLHAWQAGTPPPPSPQPAAFPQSLPFPQSPAFPTASPAPPQSPGLQPLIIHHAQMVQLGLNNHMWNQRGSQAPEDKTQEAE

SEQ ID NO: 37983 - protein, 48 aa, Homo sapiens
MGRGHWACRRRGAVWNMPSPPPASAAGGCTHLCPWPAQAHHFLAPSTF

SEQ ID NO: 37984 - protein, 1505 aa, Homo sapiens
MAPTWGPGMVSVVGPMGLLVVLLVGGCAAEEPPRFIKEPKDQIGVSGGVASFVCQATGDPKPRVTWNKKGKKVNSQRFETIEFDESAGAVLRIQPLRTPRDENVYECVAQNSVGEITVHAKLTVLREDQLPSGFPNIDMGPQLKVVERTRTATMLCAASGNPDPEITWFKDFLPVDPSASNGRIKQLRSGALQIESSEETDQGKYECVATNSAGVRYSSPANLYVRELREVRRVAPRFSILPMSHEIMPGGNVNITCVAVGSPMPYVKWMQGAEDLTPEDDMPVGRNVLELTDVKDSANYTCVAMSSLGVIEAVAQITVKSLPKAPGTPMVTENTATSITITWDSGNPDPVSYYVIEYKSKSQDGPYQIKEDITTTRYSIGGLSPNSEYEIWVSAVNSIGQGPPSESVVTRTGEQAPASAPRNVQARMLSATTMIVQWEEPVEPNGLIRGYRVYYTMEPEHPVGNWQKHNVDDSLLTTVGSLLEDETYTVRVLAFTSVGDGPLSDPIQVKTQQGVPGQPMNLRAEARSETSITLSWSPPRQESIIKYELLFREGDHGREVGRTFDPTTSYVVEDLKPNTEYAFRLAARSPQGLGAFTPVVRQRTLQSISPKNFKVKMIMKTSVLLSWEFPDNYNSPTPYKIQYNGLTLDVDGRTTKKLITHLKPHTFYNFVLTNRGSSLGGLQQTVTAWTAFNLLNGKPSVAPKPDADGFIMVYLPDGQSPVPVQSYFIVMVPLRKSRGGQFLTPLGSPEDMDLEELIQDISRLQRRSLRHSRQLEVPRPYIAARFSVLPPTFHPGDQKQYGGFDNRGLEPGHRYVLFVLAVLQKSEPTFAASPFSDPFQLDNPDPQPIVDGEEGLIWVIGPVLAVVFIICIVIAILLYKNKPDSKRKDSEPRTKCLLNNADLAPHHPKDPVEMRRINFQTPGMLSHPPIPIADMAEHTERLKANDSLKLSQEYESIDPGQQFTWEHSNLEVNKPKNRYANVIAYDHSRVILQPIEGIMGSDYINANYVDGYRCQNAYIATQGPLPETFGDFWRMVWEQRSATIVMMTRLEEKSRIKCDQYWPNRGTETYGFIQVTLLDTIELATFCVRTFSLHKNGSSEKREVRQFQFTAWPDHGVPEYPTPFLAFLRRVKTCNPPDAGPIVVHCSAGVGRTGCFIVIDAMLERIKPEKTVDVYGHVTLMRSQRNYMVQTEDQYSFIHEALLEAVGCGNTEVPARSLYAYIQKLAQVEPGEHVTGMELEFKRLANSKAHTSRFISANLPCNKFKNRLVNIMPYESTRVCLQPIRGVEGSDYINASFIDGYRQQKAYIATQGPLAETTEDFWRMLWENNSTIVVMLTKLREMGREKCHQYWPAERSARYQYFVVDPMAEYNMPQYILREFKVTDARDGQSRTVRQFQFTDWPEQGVPKSGEGFIDFIGQVHKTKEQFGQDGPISVHCSAGVGRTGVFITLSIVLERMRYEGVVDIFQTVKMLRTQRPAMVQTEDEYQFCYQAALEYLGSFDHYAT

SEQ ID NO: 37985 - protein, 118 aa, Homo sapiens
LWKVGGGARVPGMAETLSGLGDSGAAGAAALSSASSETGTRRLSDLRVIDLRAELRKRNVDSSGNKSVLMERLKKAIEDEGGNPDEIEITSEGNKKTSKRSSKDRGQRNYKQFRYFII

SEQ ID NO: 37986 - protein, 263 aa, Homo sapiens
LWKVGGGARVPGMAETLSGLGDSGAAGAAALSSASSETGTRRLSDLRVIDLRAELRKRNVDSSGNKSVLMERLKKAIEDEGGNPDEIEITSEGNKKTSKRSSKGRKPEEEGVEDNGLEENSGDGQEDVETSLENLQDIDIMDISVLDEAEIDNGSVADCVEDDDADNLQESLSDSRELVEGEMKELPEQLQEHAIEDKETINNLDTSSSDFTILQEIEEPSLEPVLPKMTRIQKGFPKRKRVAAVVVEISGLVDSLLQPELQI

SEQ ID NO: 37987 - protein, 927 aa, Homo sapiens
LWKVGGGARVPGMAETLSGLGDSGAAGAAALSSASSETGTRRLSDLRVIDLRAELRKRNVDSSGNKSVLMERLKKAIEDEGGNPDEIEITSEGNKKTSKRSSKGRKPEEEGVEDNGLEENSGDGQEDVETSLENLQDIDIMDISVLDEAEIDNGSVADCVEDDDADNLQESLSDSRELVEGEMKELPEQLQEHAIEDKETINNLDTSSSDFTILQEIEEPSLEPENEKILDILGETCKSEPVKEESSELEQPFAQDTSSVGPDRKLAEEEDLFDSAHPEEGDLDLASESTAHAQSSKADSLLAVVKREPAEQPGDGERTDCEPVGLEPAVEQSSAASELAEASSEELAEAPTEAPSPEARDSKEDGRKFDFDACNEVPPAPKESSTSEGADQKMSSPEDDSDTKRLSKEEKGRSSCGRNFWVSGLSSTTRATDLKNLFSKYGKVVGAKVVTNARSPGARCYGFVTMSTAEEATKCINHLHKTELHGKMISVEKAKNEPVGKKTSDKRDSDGKKEKSSNSDRSTNLKRDDKCDRKDDAKKGDDGSGEKSKDQDDQKPGPSERSRATKSGSRGTERTVVMDKSKGVPVISVKTSGSKERASKSQDRKSASREKRSVVSFDKVKEPRKSRDSESHSRVRERSEREQRMQAQWEREERERLEIARERLAFQRQRLERERMERERLERERMHVEHERRREQERIHREREELRRQQELRYEQERRPAVRRPYDLDRRDDAYWPEAKRAALDERYHSDFNRQDRFHDFDHRDRGRYPDHSVDRREGSRSMMGEREGQHYPERHGGPERHGRDSRDGWGGYGSDKRMSEGRGLPPPPRRDWGDHGRREDDRSWQGTADGGMMDRDHKRWQGGERSMSGHSGPGHMMNRGGMSGRGSFAPGGASRGHPIPHGGMQGGFGGQSRGSRPSDARFTRRY

SEQ ID NO: 37988 - protein, 928 aa, Homo sapiens
LWKVGGGARVPGMAETLSGLGDSGAAGAAALSSASSETGTRRLSDLRVIDLRAELRKRNVDSSGNKSVLMERLKKAIEDEGGNPDEIEITSEGNKKTSKRSSKGRKPEEEGVEDNGLEENSGDGQEDVETSLENLQDIDIMDISVLDEAEIDNGSVADCVEDDDADNLQESLSDSRELVEGEMKELPEQLQEHAIEDKETINNLDTSSSDFTILQEIEEPSLEPENEKILDILGETCKSEPVKEESSELEQPFAQDTSSVGPDRKLAEEEDLFDSAHPEEGDLDLASESTAHAQSSKADSLLAVVKREPAEQPGDGERTDCEPVGLEPAVEQSSAASELAEASSEELAEAPTEAPSPEARDSKEDGRKFDFDACNEVPPAPKESSTSEGADQKMSSPEDDSDTKRLSKEEKGRSSCGRNFWVSGLSSTTRATDLKNLFSKYGKVVGAKVVTNARSPGARCYGFVTMSTAEEATKCINHLHKTELHGKMISVEKAKNEPVGKKTSDKRDSDGKKEKSSNSDRSTNLKRDDKCDRKDDAKKGDDGSGEKSKDQDDQKPGPSERSRATKSGSRGTERTVVMDKSKGVPVISVKTSGSKERASKSQDRKSASREKRSVVSFDKVKEPRKSRDSESHRVRERSEREQRMQAQWEREERERLEIARERLAFQRQRLERERMERERLERERMHVEHERRREQERIHREREELRRQQELRYEQERRPAVRRPYDLDRRDDAYWPEAKRAALDERYHSDFNRQDRFHDFDHRDRGRYPDHSVDRREGSRSMMGEREGQHYPERHGGPERHGRDSRDGWGGYGSDKRMSEGRGLPPPPRGRRDWGDHGRREDDRSWQGTADGGMMDRDHKRWQGGERSMSGHSGPGHMMNRGGMSGRGSFAPGGASRGHPIPHGGMQGGFGGQSRGSRPSDARFTRRY

SEQ ID NO: 37989 - protein, 860 aa, Homo sapiens
LWKVGGGARVPGMAETLSGLGDSGAAGAAALSSASSETGTRRLSDLRVIDLRAELRKRNVDSSGNKSVLMERLKKAIEDEGGNPDEIEITSEGNKKTSKRSSKGRKPEEEGVEDNGLEENSGDGQIEDKETINNLDTSSSDFTILQEIEEPSLEPENEKILDILGETCKSEPVKEESSELEQPFAQDTSSVGPDRKLAEEEDLFDSAHPEEGDLDLASESTAHAQSSKADSLLAVVKREPAEQPGDGERTDCEPVGLEPAVEQSSAASELAEASSEELAEAPTEAPSPEARDSKEDGRKFDFDACNEVPPAPKESSTSEGADQKMSSPEDDSDTKRLSKEEKGRSSCGRNFWVSGLSSTTRATDLKNLFSKYGKVVGAKVVTNARSPGARCYGFVTMSTAEEATKCINHLHKTELHGKMISVEKAKNEPVGKKTSDKRDSDGKKEKSSNSDRSTNLKRDDKCDRKDDAKKGDDGSGEKSKDQDDQKPGPSERSRATKSGSRGTERTVVMDKSKGVPVISVKTSGSKERASKSQDRKSASREKRSVVSFDKVKEPRKSRDSESHSRVRERSEREQRMQAQWEREERERLEIARERLAFQRQRLERERMERERLERERMHVEHERRREQERIHREREELRRQQELRYEQERRPAVRRPYDLDRRDDAYWPEAKRAALDERYHSDFNRQDRFHDFDHRDRGRYPDHSVDRREGSRSMMGEREGQHYPERHGGPERHGRDSRDGWGGYGSDKRMSEGRGLPPPPRGRRDWGDHGRREDDRSWQGTADGGMMDRDHKRWQGGERSMSGHSGPGHMMNRGGMSGRGSFAPGGASRGHPIPHGGMQGGFGGQSRGSRPSDARFTRRY

SEQ ID NO: 37990 - protein, 929 aa, Homo sapiens
LWKVGGGARVPGMAETLSGLGDSGAAGAAALSSASSETGTRRLSDLRVIDLRAELRKRNVDSSGNKSVLMERLKKAIEDEGGNPDEIEITSEGNKKTSKRSSKGRKPEEEGVEDNGLEENSGDGQEDVETSLENLQDIDIMDISVLDEAEIDNGSVADCVEDDDADNLQESLSDSRELVEGEMKELPEQLQEHAIEDKETINNLDTSSSDFTILQEIEEPSLEPENEKILDILGETCKSEPVKEESSELEQPFAQDTSSVGPDRKLAEEEDLFDSAHPEEGDLDLASESTAHAQSSKADSLLAVVKREPAEQPGDGERTDCEPVGLEPAVEQSSAASELAEASSEELAEAPTEAPSPEARDSKEDGRKFDFDACNEVPPAPKESSTSEGADQKMSSPEDDSDTKRLSKEEKGRSSCGRNFWVSGLSSTTRATDLKNLFSKYGKVVGAKVVTNARSPGARCYGFVTMSTAEEATKCINHLHKTELHGKMISVEKAKNEPVGKKTSDKRDSDGKKEKSSNSDRSTNLKRDDKCDRKDDAKKGDDGSGEKSKDQDDQKPGPSERSRATKSGSRGTERTVVMDKSKGVPVISVKTSGSKERASKSQDRKSASREKRSVVSFDKVKEPRKSRDSESHSRVRERSEREQRMQAQWEREERERLEIARERLAFQRQRLERERMERERLERERMHVEHERRREQERIHREREELRRQQELRYEQERRPAVRRPYDLDRRDDAYWPEAKRAALDERYHSDFNRQDRFHDFDHRDRGRYPDHSVDRREGSRSMMGEREGQHYPERHGGPERHGRDSRDGWGGYGSDKRMSEGRGLPPPPRGRRDWGDHGRREDDRSWQGTADGGMMDRDHKRWQGGERSMSGHSGPGHMMNRGGMSGRGSFAPGGASRGHPIPHGGMQGGFGGQSRGSRPSDARFTRRY

SEQ ID NO: 37991 - protein, 102 aa, Homo sapiens
MVARVWSLMRFLIKGSVAGGAVYLVYDQELLGPSDKSQAALQKAGEVVPPAMYQFSQYVCQQTGLQIPQVLRAGNEARVWRVVSSGRSLQPCTMLSSILMLT

SEQ ID NO: 37992 - protein, 61 aa, Homo sapiens [sequence omitted]

SEQ ID NO: 37993 - protein, 893 aa, Homo sapiens
MAGLWRRALATCDCGERRGAGCCGGRCWPPPGGGAGAGEGPVITALTPMTIPDVFPHLPLIAITRNPVFPRFIKIIEVKNKKLVELLRRKVRLAQPYVGVFLKRDDSNESDVVESLDEIYHTGTFAQIHEMQDLGDKLRMIVMGHRRVHISRQLEVEPEEPEAENKHKPRRKSKRGKKEAEDELSARHPAELAMEPTPELPAEVLMVEVENVVHEDFQVTEEVKALTAEIVKTIRDIIALNPLYRESVLQMMQAGQRVVDNPIYLSDMGAALTGAESHELQDVLEETNIPKRLYKALSLLKKEFELSKLQQRLGREVEEKIKQTHRKYLLQEQLKIIKKELGLEKDDKDAIEEKFRERLKELVVPKHVMDVVDEELSKLGLLDNHSSEFNVTRNYLDWLTSIPWGKYSNENLDLARAQAVLEEDHYGMEDVKKRILEFIAVSQLRGSTQGKILCFYGPPGVGKTSIARSIARALNREYFRFSVGGMTDVAEIKGHRRTYVGAMPGKIIQCLKKTKTENPLILIDEVDKIGRGYQGDPSSALLELLDPEQNANFLDHYLDVPVDLSKVLFICTANVTDTIPEPLRDRMEMINVSGYVAQEKLAIAERYLVPQARALCGLDESKAKLSSDVLTLLIKQYCRESGVRNLQKQVEKVLRKSAYKIVSGEAESVEVTPENLQDFVGKPVFTVERMYDVTPPGVVMGLAWTAMGGSTLFVETSLRRPQDKDAKGDKDGSLEVTGQLGEVMKESARIAYTFARAFLMQHAPANDYLVTSHIHLHVPEGATPKDGPSAGCTIVTALLSLAMGRPVRQNLAMTGEVSLTGKILPVGGIKEKTIAAKRAGVTCIVLPAENKKDFYDLAAFITEGLEVHFVEHYREIFDIAFPDEQAEALAVER

SEQ ID NO: 37994 - protein, 903 aa, Homo sapiens
VSRQYGRAMAASTGYVRLWGAARCWVLRRPMLAAAGGRVPTAAGAWLLRGPVITALTPMTIPDVFPHLPLIAITRNPVFPRFIKIIEVKNKKLVELLRRKVRLAQPYVGVFLKRDDSNESDVVESLDEIYHTGTFAQIHEMQDLGDKLRMIVMGHRRVHISRQLEVEPEEPEAENKHKPRRKSKRGKKEAEDELSARHPAELAMEPTPELPAEVLMVEVENVVHEDFQVTEEVKALTAEIVKTIRDIIALNPLYRESVLQMMQAGQRVVDNPIYLSDMGAALTGAESHELQDVLEETNIPKRLYKALSLLKKEFELSKLQQRLGREVEEKIKQTHRKYLLQEQLKIIKKELGLEKDDKDAIEEKFRERLKELVVPKHVMDVVDEELSKLGLLDNHSSEFNVTRNYLDWLTSIPWGKYSNENLDLARAQAVLEEDHYGMEDVKKRILEFIAVSQLRGSTQGKILCFYGPPGVGKTSIARSIARALNREYFRFSVGGMTDVAEIKGHRRTYVGAMPGKIIQCLKKTKTENPLILIDEVDKIGRGYQGDPSSALLELLDPEQNANFLDHYLDVPVDLSKVLFICTANVTDTIPEPLRDRMEMINVSGYVAQEKLAIAERYLVPQARALCGLDESKAKLSSDVLTLLIKQYCRESGVRNLQKQVEKVLRKSAYKIVSGEAESVEVTPENLQDFVGKPVFTVERMYDVTPPGVVMGLAWTAMGGSTLFVETSLRRPQDKDAKGDKDGSLEVTGQLGEVMKESARIAYTFARAFLMQHAPANDYLVTSHIHLHVPEGATPKDGPSAGCTIVTALLSLAMGRPVRQNLAMTGEVSLTGKILPVGGIKEKTIAAKRAGVTCIVLPAENKKDFYDLAAFITEGLEVHFVEHYREIFDIAFPDEQAEALAVER

SEQ ID NO: 37995 - protein, 437 aa, Homo sapiens
LLLIFCLVLLEERSSGFRLKPPTLIHGQAPSAGLPSQKPKEQQRSVLRPAVLQAPQPKALSQTVPSSGTNGVSLPADCTGAVPAASPDTAAWRSPSEAADEEKEPQKNESSNASEEEACEKKDPATQQAFVFGQNLRDRVKLINESVDEADMENAGHPSADTPTATNYFLQYISSSLENSTNSADASSNKFVFGQNMSERVLSPPKLNEVSSDANRENAAAESGSESSSQEATPEKESLAESAAAYTKATARKCLLEKVEVITGEEAESNVLQMQCKLFVFDKTSQSWVERGRGLLRLNDMASTDDGTLQSRLVMRTQGSLRLILNTKLWAQMQIDKASEKSIRITAMDTEDQGVKVFLISASSKDTGQLYAALHHRILALRSRVEQEQEAKMPAPEPGAAPSNEEDDSDDDDVLAPSGATAAGAGDEGDGQTTGST

SEQ ID NO: 37996 - protein, 244 aa, Homo sapiens
MAIENLQKSEGITSHKSGLLNSHLQWLLDNYETAEGVSLPRSSLYNHYLRHCQEHKLDPVNAASFGKLIRSVFMGLRTRRLGTRGNSKYHYYGIRLKPDSPLNRLQEDTQYMAMRQQPMHQKPRYRPAQKTDSLGDSGSHSGLHSTPEQTMAVQSQHHQQYIDVSHVFPEFPAPDLGSFLLQDGVTLHDVKALQLVYRRHCEVTAPAQAGSSCVSLPGTASAQARRPRVTLRSWSPEPPNKHPL

SEQ ID NO: 37997 - protein, 592 aa, Homo sapiens
LTDNEGGGAALSGGGGGGGGERRGARGRGGAPAMDNQCTVQVRLELGHRAQLRKKPTTEGFTHDWMVFVRGPEQCDIQHFVEKVVFWLHDSFPKPRRVCKEPPYKVEESGYAGFIMPIEVHFKNKEEPRKVCFTYDLFLNLEGNPPVNHLRCEKLTFNNPTTEFRYKLLRAGGVMVMPEGADTVSRPSPDYPMLPTIPLSAFSDPKKTKPSHGSKDANKESSKTSKPHKVTKEHRERPRKDSESKSSSKELEREQAKSSKDTSRKLGEGRLPKEEKAPPPKAAFKEPKMALKETKLESTSPKGGPPPPPPPPPRASSKRPATADSPKPSAKKQKKSSSKGSRSAPGTSPRTSSSSSFSDKKPAKDKSSTRGEKVKAESEPREAKKALEVEESNSEDEASFKSESAQSSPSNSSSSSDSSSDSDFEPSQNHSQGPLRSMVEDLQSEESDEDDSSSGEEAAGKTNPGRDSRLSFSDSESDNSADSSLPSREPPPPQKPPPPNSKVSGRRSPESCSKPEKILKKGTYDKAYTDELVELHRRLMALRERNVLQQIVNLIEETGHFNVTNTTFDFDLFSLDETTVRKLQSCLEAVAT

SEQ ID NO: 37998 - protein, 212 aa, Homo sapiens
LALQRCLHATATRALPLIPIVVEQTGRGERAYDIYSRLLRERIVCVMGPIDDSVASLVIAQLLFLQSESNKKPIHMYINSPGGVVTAGLAIYDTMQYILNPICTWCVGQAASMGSLLLAAGTPGMRHSLPNSRIMIHQPSGGARVSARHASCCWESGQGLDRRTDWAEVKRGRGCFFFFLRWSLTLSPRLECSGAISAHCKLRLLGSRHSSA

SEQ ID NO: 37999 - protein, 519 aa, Homo sapiens
LPMAALGPSSQNVTEYVVRVPKNTTKKYNIMAFNAADKVNFATWNQARLERDLSNKKIYQEEEMPESGAGSEFNRKLREEARRKKYGIVLKEFRPEDQPWLLRVNGKSGRKFKGIKKGGVTENTSYYIFTQCPDGAFEAFPVHNWYNFTPLARHRTLTAEEAEEEWERRNKVLNHFSIMQQRRLKDQDQDEDEEEKEKRGRRKASELRIHDLEDDLEMSSDASDASGEEGGRVPKAKKKAPLAKGGRKKKKKKGSDDEAFEDSDDGDFEGQEVDYMSDGSSSSQEEPESKAKAPQQEEGPKGVDEQSDSSEESEEEKPPEEDKEEEEEKKAPTPQEKKRRKDSSEESDSSEESDIDSEASSALFMAKKKTPPKRERKPSGGSSRGNSRPGTPSAEGGSTSSTLRAAASKLEQGKRVSEMPAAKRLRLDTGPQSLSGKSTPQPPSGKTTPNSGDVQVTEDAVRRYLTRKPMTTKDLLKKFQTKKTGLSSEQTVNVLAQILKRLNPERKMINDKMHFSLKE

SEQ ID NO: 38000 - protein, 34 aa, Homo sapiens
LPMAALGPSSQNVTEYVVRVPKKYSLPVLPPPQG

SEQ ID NO: 38001 - protein, 99 aa, Homo sapiens
LKTKRLRKKFAQKMLRKARRKLIYEKLKHYHKEYRQRYRTEIRMEKMSRKAGNFYEPAESRLAFVIRIRGIDGVSPKVRNVLQLLCLCQIFNGTFVKAN

SEQ ID NO: 38002 - protein, 165 aa, Homo sapiens
VMNCAAVLRVSSLEPGTENCFIQKSDDKVTLEERLDKACEPGVDYVYKTRLVKVQLSNDFDEYIMAIEQTIKSGSDEVQVGQQRTFISPIKCREALKLEEKKHYLMWGLSSDFWGEKPNLSYIIGKDTWVEHWPEEDECQDEENQKQCQDLGAFTESMVVFGCPN

SEQ ID NO: 38003 - protein, 284 aa, Homo sapiens
LGPNALLSALSRYRGDQDATMSILDISMMTGFAPDTDDLKQLANGVDRYISKYELDKAFSDRNTLIIYLDKVSHSEDDCLAFKVHQYFNVELIQPGAVKVYAYYNLEESCTRFYHPEKEDGKLNKLCRDELCRCAEENCFIQKSDDKVTLEERLDKACEPGVDYVYKTRLVKVQLSNDFDEYIMAIEQTIKSGSDEVQVGQQRTFISPIKCREALKLEEKKHYLMWGLSSDFWGEKPNLSYIIGKDTWVEHWPEEDECQDEENQKQCQDLGAFTESMVVFGCPN

SEQ ID NO: 38004 - protein, 1671 aa, Homo sapiens
LTLHCPSTMGPTSGPSLLLLLLTHLPLALGSPMYSIITPNILRLESEETMVLEAHDAQGDVPVTVTVHDFPGKKLVLSSEKTVLTPATNHMGNVTFTIPANREFKSEKGRNKFVTVQATFGTQVVEKVVLVSLQSGYLFIQTDKTIYTPGSTVLYRIFTVNHKLLPVGRTVMVNIENPEGIPVKQDSLSSQNQLGVLPLSWDIPELVNMGQWKIRAYYENSPQQVFSTEFEVKEYVLPSFEVIVEPTEKFYYIYNEKGLEVTITARFLYGKKVEGTAFVIFGIQDGEQRISLPESLKRIPIEDGSGEVVLSRKVLLDGVQNPRAEDLVGKSLYVSATVILHSGSDMVQAERSGIPIVTSPYQIHFTKTPKYFKPGMPFDLMVFVTNPDGSPAYRVPVAVQGEDTVQSLTQGDGVAKLSINTHPSQKPLSITVRTKKQELSEAEQATRTMQALPYSTVGNSNNYLHLSVLRTELRPGETLNVNFLLRMDRAHEAKIRYYTYLIMNKGRLLKAGRQVREPGQDLVVLPLSITTDFIPSFRLVAYYTLIGASGQREVVADSVWVDVKDSCVGSLVVKSGQSEDRQPVPGQQMTLKIEGDHGARVVLVAVDKGVFVLNKKNKLTQSKIWDVVEKADIGCTPGSGKDYAGVFSDAGLTFTSSSGQQTAQRAELQCPQPAARRRRSVQLTEKRMDKVGKYPKELRKCCEDGMRENPMRFSCQRRTRFISLGEACKKVFLDCCNYITELRRQHARASHLGLARSNLDEDIIAEENIVSRSEFPESWLWNVEDLKEPPKNGISTKLMNIFLKDSITTWEILAVSMSDKKGICVADPFEVTVMQDFFIDLRLPYSVVRNEQVEIRAVLYNYRQNQELKVRVELLHNPAFCSLATTKRRHQQTVTIPPKSSLSVPYVIVPLKTGLQEVEVKAAVYHHFISDGVRKSLKVVPEGIRMNKTVAVRTLDPERLGREGVQKEDIPPADLSDQVPDTESETRILLQGTPVAQMTEDAVDAERLKHLIVTPSGCGEQNMIGMTPTVIAVHYLDETEQWEKFGLEKRQGALELIKKGYTQQLAFRQPSSAFAAFVKRAPSTWLTAYVVKVFSLAVNLIAIDSQVLCGAVKWLILEKQKPDGVFQEDAPVIHQEMIGGLRNNNEKDMALTAFVLISLQEAKDICEEQVNSLPGSITKAGDFLEANYMNLQRSYTVAIAGYALAQMGRLKGPLLNKFLTTAKDKNRWEDPGKQLYNVEATSYALLALLQLKDFDFVPPVVRWLNEQRYYGGGYGSTQATFMVFQALAQYQKDAPDHQELNLDVSLQLPSRSSKITHRIHWESASLLRSEETKENEGFTVTAEGKGQGTLSVVTMYHAKAKDQLTCNKFDLKVTIKPAPETEKRPQDAKNTMILEICTRYRGDQDATMSILDISMMTGFAPDTDDLKQLANGVDRYISKYELDKAFSDRNTLIIYLDKVSHSEDDCLAFKVHQYFNVELIQPGAVKVYAYYNLEESCTRFYHPEKEDGKLNKLCRDELCRCAEENCFIQKSDDKVTLEERLDKACEPGVDYVYKTRLVKVQLSNDFDEYIMAIEQTIKSGSDEVQVGQQRTFISPIKCREALKLEEKKHYLMWGLSSDFWGEKPNLSYIIGKDTWVEHWPEEDECQDEENQKQCQDLGAFTESMVVFGCPN

SEQ ID NO: 38005 - protein, 167 aa, Homo sapiens
LTAYVVKVFSLAVNLIAIDSQVLCGAVKWLILEKQKPDGVFQEDAPVIHQEMIGGLRNNNEKDMALTAFVLISLQEAKDICEEQVNSLPGSITKAGDFLEANYMNLQRSYTVAIAGYALAQMGRLKGPLLNKFLTTAKGEGWPGGVKGDAWLKFRAGDTELGCMAFS

SEQ ID NO: 38006 - protein, 50 aa, Homo sapiens
LVLLITKQTRTPQPEAGVRGCCTCSLNPGVLTRRILGWDQLEPEAEVQCG

SEQ ID NO: 38007 - protein, 739 aa, Homo sapiens
LLVAVAALLLGAAGHLYPGEVCPGMDIRNNLTRLHELENCSVIEGHLQILLMFKTRPEDFRDLSFPKLIMITDYLLLFRVYGLESLKDLFPNLTVIRGSRLFFNYALVIFEMVHLKELGLYNLMNITRGSVRIEKNNELCYLATIDWSRILDSVEDNYIVLNKDDNEECGDICPGTAKGKTNCPATVINGQFVERCWTHSHCQKVCPTICKSHGCTAEGLCCHSECLGNCSQPDDPTKCVACRNFYLDGRCVETCPPPYYHFQDWRCVNFSFCQDLHHKCKNSRRQGCHQYVIHNNKCIPECPSGYTMNSSNLLCTPCLGPCPKVCHLLEGEKTIDSVTSAQELRGCTVINGSLIINIRGGNNLAAELEANLGLIEEISGYLKIRRSYALVSLSFFRKLRLIRGETLEIGNYSFYALDNQNLRQLWDWSKHNLTITQGKLFFHYNPKLCLSEIHKMEEVSGTKGRQERNDIALKTNGDQASCENELLKFSYIRTSFDKILLRWEPYWPPDFRDLLGFMLFYKEAPYQNVTEFDGQDACGSNSWTVVDIDPPLRSNDPKSQNHPGWLMRGLKPWTQYAIFVKTLVTFSDERRTYGAKSDIIYVQTDATNPSVPLDPISVSNSSSQIILKWKPPSDPNGNITHYLVFWERQAEDSELFELDYCLKGLKLPSRTWSPPFESEDSQKHNQSEYEDSAGECCSCPKTDSQILKELEESSFRKTFEDYLHNVVFVPRSGLGAGLS

SEQ ID NO: 38008 - protein, 810 aa, Homo sapiens
MKEKYGVFCSGHNEAVSHYKLLLQQNKKFQNLIKKIGNFSIVRRLGVQECILLVTQRITKYPVLVERIIQNTEAGTEDYEDLTQALNLIKDIISQVDAKVSECEKGQRLREIAGKMDLKSSSKLKNGLTFRKEDMLQRQLHLEGMLCWKTTSGRLKDILAILLTDVLLLLQEKDQKYVFASVDSKPPVISLQKLIVREVANEEKAMFLISASLQGPEMYEIYTSSKEDRNAWMAHIQRAVESCPDEEEGPFSLPEEERKVVEARATRLRDFQERLSMKDQLIAQSLLEKQQIYLEMAEMGGLEDLPQPRGLFRGGDPSETLQGELILKSAMSEIEGIQSLICRQLGSANGQAEDGGSSTGPPRRAETFAGYDCTNSPTKNGSFKKKVSSTDPRPRDWRGPPNSPDLKLSDSDIPGSSEESPQVVEAPGTESDPRLPTVLESELVQRIQTLSQLLLNLQDSYVETQRAAIQEREKQFRLQSTRGNLLLEQERQRNFEKQREERAALEKLQSQLRHEQQRWERERQWQHQELERAGARLQEREGEARQLRERLEQERAELERQRQAYQHDLERLREAQRAVERERERLELLRRLKKQNTAPGALPPDTLAEAQPPSHPPSFNGEGLEGPRVSMLPSGVGPEYAERPEVARRDSAPTENRLAKSDVPIQLLSATNQFQRQAAVQQQIPTKLAASTKGGKDKGGKSRGSQRWESSASFDLKQQLLLNKLMGKDESTSRNRRSLSPILPGRHSPAPPPDPGFPAPSPPPADSPSEGFSLKAGGTALLPGPPAPSPLPATPLSAKEDASKEDVIFF

SEQ ID NO: 38009 - protein, 48 aa, Homo sapiens
VASAASVPRIRQNPLPKQSPTQVHHEPQGQGMSQARGHGQRGPRGRAH

SEQ ID NO: 38010 - protein, 100 aa, Homo sapiens
LPGPSPSPEPRVLGTADPGGIQPFSHCAGRGTPVTLNTVNRDIPATRGQMGTREGKLHQEVLPWAEAPTGCCGLRRGRGRSWCQPGTRAPQPYSPLVTRS

SEQ ID NO: 38011 - protein, 15 aa, Homo sapiens
LHTSLSVVVMILVTC

SEQ ID NO: 38012 - protein, 94 aa, Homo sapiens
VQRPGGGKRCRYGWRGGRTSRALEVGSHFQAEPPGFSPQHPGGAGAEESELQAYIAQCQDSPTSGKFRRGSGSACSLLCCCGRDPSEEHSLLVN

SEQ ID NO: 38013 - protein, 1388 aa, Homo sapiens
LRAAGPQGRVAPPGREQHWPILQMGTSSHGLATNSSGAKVAERDGFQDVLAPGEGSAGRICGAQPVPFVPQVLGVMIGAGVAVVVTAVLILLVVRRLRVPKTPAPDGPRYRFRKRDKVLFYGRKIMRKVSQSTSSLVDTSVSATSRPRMRKKLKMLNIAKKILRIQKETPTLQRKEPPPAVLEADLTEGDLANSHLPSEVLYMLKNVRVLGHFEKPLFLELCRHMVFQRLGQGDYVFRPGQPDASIYVVQDGLLELCLPGPDGKECVVKEVVPGDSVNSLLSILDVITGHQHPQRTVSARAARDSTVLRLPVEAFSAVFTKYPESLVRVVQIIMVRLQRVTFLALHNYLGLTNELFSHEIQPLRLFPSPGLPTRTSPVRGSKRMVSTSATDEPRETPGRPPDPTGAPLPGPTGDPVKPTSLETPSAPLLSRCVSMPGDISGLQGGPRSDFDMAYERGRISVSLQEEASGGSLAAPARTPTQEPREQPAGACEYSYCEDESATGGCPFGPYQGRQTSSIFEAAKQELAKLMRIEDPSLLNSRVLLHHAKAGTIIARQGDQDVSLHFVLWGCLHVYQRMIDKAEDVCLFVAQPGELVGQLAVLTGEPLIFTLRAQRDCTFLRISKSDFYEIMRAQPSVVLSAAHTVAARMSPFVRQMDFAIDWTAVEAGRALYRQGDRSDCTYIVLNGRLRSVIQRGSGKKELVGEYGRGDLIGVVEALTRQPRATTVHAVRDTELAKLPEGTLGHIKRRYPQVVTRLIHLLSQKILGNLQQLQGPFPGSGLGVPPHSELTNPASNLATVAILPVCAEVPMVAFTLELQHALQAIGPTLLLNSDIIRARLGASALDSIQEFRLSGWLAQQEDAHRIVLYQTDASLTPWTVRCLRQADCILIVGLGDQEPTLGQLEQMLENTAVRALKQLVLLHREEGAGPTRTVEWLNMRSWCSGHLHLRCPRRLFSRRSPAKLHELYEKVFSRRADRHSDFSRLARVLTGNTIALVLGGGGARGCSHIGVLKALEEAGVPVDLVGGTSIGSFIGALYAEERSASRTKQRAREWAKSMTSVLEPVLDLTYPVTSMFTGSAFNRSIHRVFQDKQIEDLWLPYFNVTTDITASAMRVHKDGSLWRYVRASMTLSGYLPPLCDPKDGHLLMDGGYINNLPADIARSMGAKTVIAIDVGSQDETDLSTYGDSLSGWWLLWKRLNPWADKVKVPDMAEIQSRLAYVSCVRQLEVVKSSSYCEYLRPPIDCFKTMDFGKFDQIYDVGYQYGKAVFGGWSRGNVIEKMLTDRRSTDLNESRRADVLAFPSSGFTDLAEIVSRIEPPTSYVSDGCADGEESDCLTEYEEDAGPDCSRDEGGSPEGASPSTASEMEEEKSILRQRRCLPQEPPGSATDA

SEQ ID NO: 38014 - protein, 68 aa, Homo sapiens
MGVKLEIFRMIIYLTFPVAMFWVSNQAEWFEDDVIQRKVGIRGVFEGSFQGWERVWGSSLLGTNVCLP

SEQ ID NO: 38015 - protein, 46 aa, Homo sapiens
VKLEIFRMIIYLTFPVAMFWVSNQAEWFEDDVIQRKRELWPPEKKF

SEQ ID NO: 38016 - protein, 151 aa, Homo sapiens
LTPCPQDLAMGSDAEGEKIKDSMKLIVPVLLDAAVPAYDKIRVLLLYILLRNGVSEENLAKLIQHANVQAHSSLIRNLEQLGGTVTNPGGSGTSSRLEPRERMEPTYQLSRWTPVIKDVMEVLGGRSGWGPALRIGWRLSLPPAEVLSLRA

SEQ ID NO: 38017 - protein, 117 aa, Homo sapiens
LSPPRGACRMKALCLLLLPVLGLLVSSKTLCSMEEAINERIQEVAGSLIFRAISSIGLECQSVTSRGDLATCPRGFAVTGCTCGSACGSWDVRAETTCHCQCAGMDWTGARCCRVQP

SEQ ID NO: 38018 - protein, 91 aa, Homo sapiens
LSPPRGACRMKALCLLLLPVLGLLVSSKTLCSMEEAINERIQEVAGSLSFAVTGCTCGSACGSWDVRAETTCHCQCAGMDWTGARCCRVQP

SEQ ID NO: 38019 - protein, 197 aa, Homo sapiens
LLRFLGGGGMEARFTRGKSALLERALARPRTEVSLSAFALLFSELVQHCQSRVFSVAELQSRLAALGRQVGARVLDALVAREKGARRETKVLGALLFVKGAVWKALFGKEADKLEQANDDARTFYIIEREPLINTYISVPKENSTLNCASFTAGIVEAVLTHSGFPAKVTAHWHKGTTLMIKFEEAVIARDRALEGR

SEQ ID NO: 38020 - protein, 43 aa, Homo sapiens
VPHVVAVLRGLLLLFLCAKDDVGGGAGSLRRCQRAPGDRWGPG

SEQ ID NO: 38021 - protein, 167 aa, Homo sapiens
LSWSPVLWAVILSILLSKASTERAALLGCQDLLRTNASKQTAALGALEEEVGACHSCCSGTQALLQTTSAELGEAQAKLMEQERALRELRERVTHGLAEAGRDREDVSTELYRALEAVRLQNSEGSCEPCPTSWLPFGGSCYYFSVPKTTWAEAQGHCADASAHLAM

SEQ ID NO: 38022 - protein, 131 aa, Homo sapiens
LPRPQNGVPQPPCSVCVPMSLPLTLTFSLTPLKQRSAQPSLLCVLPPPPPPLLPAPLWTPWRRRWAPPLNGSLWPPGVGGVHACVCVTERTRKLGLVGGWPVPMDLSQQLGEHIAPPGFHTSPGRQGHSSE

SEQ ID NO: 38023 - protein, 205 aa, Homo sapiens
LRRSRCRRRRRRHRRHRYRGRAEPLAPRRRRLPPAPEQPRARPPASRFLKNTMSNGYEDHMAEDCRGDIGRTNLIVNYLPQNMTQDELRSLFSSIGEVESAKLIRDKVAGHSLGYGFVNYVTAKDAERAINTLNGLRLQSKTIKVSYARPSSEVIKDANLYISGLPRTMTQKDVEDMFSRFGRIINSRVLVDQTTVIPQTRTAPK

SEQ ID NO: 38024 - protein, 2829 aa, Homo sapiens
LTGVSPFSGAFGQPASRGHAMTLEGLYLARGPLARLLLAWSALLCMAGGQGRWDGALEAAGPGRVRRRGSPGILQGPNVCGSRFHAYCCPGWRTFPGRSQCVVPICRRACGEGFCSQPNLCTCADGTLAPSCGVSRGSGCSVSCMNGGTCRGASCLCQKGYTGTVCGQPICDRGCHNGGRCIGPNRCACVYGFMGPQCERDYRTGPCFGQVGPEGCQHQLTGLVCTKALCCATVGRAWGLPCELCPAQPHPCRRGFIPNIHTGACQDVDECQAVPGLCQGGSCVNMVGSFHCRCPVGHRLSDSSAACEDYRAGACFSVLFGGRCAGDLAGHYTRRQCCCDRGRCWAAGPVPELCPPRGSNEFQQLCAQRLPLLPGHPGLFPGLLGFGSNGMGPPLGPARLNPHGSDARGIPSLGPGNSNIGTATLNQTIDICRHFTNLCLNGRCLPTPSSYRCECNVGYTQDVRGECIDVDECTSSPCHHGDCVNIPGTYHCRCYPGFQATPTRQACVDVDECIVSGGLCHLGRCVNTEGSFQCVCNAGFELSPDGKNCVDHNECATSTMCVNGVCLNEDGSFSCLCKPGFLLAPGGHYCMDIDECQTPGICVNGHCTNTEGSFRCQCLGGLAVGTDGRVCVDTHVRSTCYGAIEKGSCARPFPGTVTKSECCCANPDHGFGEPCQLCPAKDSAEFQALCSSGLGITTDGRDINECALDPEVCANGVCENLRGSYRCVCNLGYEAGASGKDCTDVDECALNSLLCDNGWCQNSPGSYSCSCPPGFHFWQDTEICKDVDECLSSPCVSGVCRNLAGSYTCKCGPGSRLDPSGTFCLDSTKGTCWLKIQESRCEVNLQGASLRSECCATLGAAWGSPCERCEIDPACARGFARMTGVTCDDVNECESFPGVCPNGRCVNTAGSFRCECPEGLMLDASGRLCVDVRLEPCFLRWDEDECGVTLPGKYRMDVCCCSIGAVWGVECEACPDPESLEFASLCPRGLGFASRDFLSGRPFYKDVNECKVFPGLCTHGTCRNTVGSFHCACAGGFALDAQERNCTDIDECRISPDLCGQGTCVNTPGSFECECFPGYESGFMLMKNCMDVDECARDPLLCRGGTCTNTDGSYKCQCPPGHELTAKGTACEDIDECSLSDGLCPHGQCVNVIGAFQCSCHAGFQSTPDRQGCVDINECRVQNGGCDVHCINTEGSYRCSCGQGYSLMPDGRACADVDECEENPRVCDQGHCTNMPGGHRCLCYDGFMATPDMRTCVDVDECDLNPHICLHGDCENTKGSFVCHCQLGYMVRKGATGCSDVDECEVGGHNCDSHASCLNIPGSFSCRCLPGWVGDGFECHDLDECVSQEHRCSPRGDCLNVPGSYRCTCRQGFAGDGFFCEDRDECAENVDLCDNGQCLNAPGGYRCECEMGFDPTEDHRACQDVDECAQGNLCAFGSCENLPGMFRCICNGGYELDRGGGNCTDINECADPVNCINGVCINTPGSYLCSCPQDFELNPSGVGCVDTRAGNCFLETHDRGDSGISCSAEIGVGVTRASCCCSLGRAWGNPCELCPMANTTEYRTLCPGGEGFQPNRITVILEDIDECQELPGLCQGGDCVNTFGSFQCECPPGYHLSEHTRICEDIDECSTHSGICGPGTCYNTLGNYTCVCPAEYLQVNGGNNCMDMRKSVCFRHYNGTCQNELAFNVTRKMCCCSYNIGQAWNRPCEACPTPISPDYQILCGNQAPGFLTDIHTGKPLDIDECGEIPAICANGICINQIGSFRCECPAGFNYNSILLACEDVDECGSRESPCQQNADCINIPGSYRCKCTRGYKLSPGGACVGRNECREIPNVCSHGDCMDTEGSYMCLCHRGFQASADQTLCMDIDECDRQPCGNGTCKNIIGSYNCLCFPGFVVTHNGDCVDFDECTTLVGQVCRFGHCLNTAGSFHCLCQDGFELTADGKNCVDTNECLSLAGTCLPGTCQNLEGSFRCICPPGFQVQSDHCIDIDECSEEPNLCLFGTCTNSPGSFQCLCPPGFVLSDNGHRCFDTRQSFCFTRFEAGKCSVPKAFNTTKTRCCCSKRPGEGWGDPCELCPQEGSAAFQELCPFGHGAVPGPDDSREDVNECAENPGVCTNGVCVNTDGSFRCECPFGYSLDFTGINCVDTDECSVGHPCGQGTCTNVIGGFECACADGFEPGLMMTCEDIDECSLNPLLCAFRCHNTEGSYLCTCPAGYTLREDGAMCRDVDECADGQQDCHARGMECKNLIGTFACVCPPGMRPLPGSGEGCTDDNECHAQPDLCVNGRCVNTAGSFRCDCDEGFQPSPTLTECHDIRQGPCFAEVLQTMCRSLSSSSEAVTRAECCCGGGRGWGPRCELCPLPGTSAYRKLCPHGSGYTAEGRDVDECRMLAHLCAHGECINSLGSFRCHCQAGYTPDATATTCLDMDECSQVPKPCTFLCKNTKGSFLCSCPRGYLLEEDGRTCKDLDECTSRQHNCQFLCVNTVGAFTCRCPPGFTQHHQACFDNDECSAQPGPCGAHGHCHNTPGSFRCECHQGFTLVSSGHGCEDVNECDGPHRCQHGCQNQLGGYRCSCPQGFTQHSQWAQCVDENECALSPPTCGSASCRNTLGGFRCVCPSGFDFDQALGGCQEVDECAGRRGPCSYSCANTPGGFLCGCPQGYFRAGQGHCVSGLGFSPGPQDTPDKEELLSSEACYECKINGLSPRDRPRRSAHRDHQVNLATLDSEALLTLGLNLSHLGRAERILELRPALEGLEGRIRYVIVRGNEQGFFRMHHLRGVSSLQLGRRRPGPGTYRLEVVSHMAGPWGVQPEGQPGPWGQALRLKVQLQLL

SEQ ID NO: 38025 - protein, 78 aa, Homo sapiens
LGLALLLLLGLGLGLEAAASPLSTPTSAQAAGPSSGSCPPTKFQCRTSGLCVPLTWRCDRDLDCSDGSDEEECTAWPA

SEQ ID NO: 38026 - protein, 21 aa, Homo sapiens
LCFKLTQVLVWVIRLGFLQVS

SEQ ID NO: 38027 - protein, 218 aa, Homo sapiens [sequence omitted]

SEQ ID NO: 38028 - protein, 267 aa, Homo sapiens
LIGFAGCPSLLHSPLIGHSTAALRGAGSAPVGCLWWGCGVADPAGSARTMGTRDDEYDYLFKVVLIGDSGVGKSNLLSRFTRNEFNLESKSTIGVEFATRSIQVDGKTIKAQIWDTAGQERYRAITSAYYRGAVGALLVYDIAKHLTYENVERWLKELRDHADSNIVIMLVGNKSDLRHLRAVPTDEARAFAEKNNLSFIETSALDSTNVEEAFKNILTEIYRIVSQKQIADRAAHDESPGNNVVDISVPPTTDGQKPNKLQCCQNL

SEQ ID NO: 38029 - protein, 172 aa, Homo sapiens
LWWGCGVADPAGSARTMGTRDDEYDYLFKVVLIGDSGVGKSNLLSRFTRNEFNLESKSTIGVEFATRSIQVDGKTIKAQIWDTAGQERYRAITSACVSAAWAGTLRFGGVGLQRVGLEGCVGVGQEKGRVCSQDQGVRLEERFSHAPWDPQADQRPAFATPGYLWVPSAVRT

SEQ ID NO: 38030 - protein, 757 aa, Homo sapiens
VYLEREAINSCRSAPARGGGVARGEWGQGGSRERRAQVLLVASGHVGAQAQRGAARSLTQSPDAEKMAAGVEAAAEVAATEIKMEEESGAPGVPSGNGAPGPKGEGERPAQNEKRKEKNIKRGGNRFEPYANPTKRYRAFITNIPFDVKWQSLKDLVKEKVGEVTYVELLMDAEGKSRGCAVVEFKMEESMKKAAEVLNKHSLSGRPLKVKEDPDGEHARRAMQKAGRLGSTVFVANLDYKVGWKKLKEVFSMAGVVVRADILEDKDGKSRGIGTVTFEQSIEAVQAISMFNGQLLFDRPMHVKMDERALPKGDFFPPERPQQLPHGLGGIGMGLGPGGQPIDANHLNKGIGMGNIGPAGMGMEGIGFGINKMGGMEGPFGGGMENMGRFGSGMNMGRINEILSNALKRGEIIAKQGGGGGGGSVPGIERMGPGIDRLGGAGMERMGAGLGHGMDRVGSEIERMGLVMDRMGSVERMGSGIERMGPLGLDHMASSIERMGQTMERIGSGVERMGAGMGFGLERMAAPIDRVGQTIERMGSGVERMGPAIERMGLSMERMVPAGMGAGLERMGPVMDRMATGLERMGANNLERMGLERMGANSLERMGLERMGANSLERMGPAMGPALGAGIERMGLAMGGGGGASFDRAIEMERGNFGGSFAGSFGGAGGHAPGVARKACQIFVRNLPFDFTWKMLKDKFNECGHVLYADIKMENGKSKGCGVVKFESPEVAERACRMMNGMKLSGREIDVRIDRNA

SEQ ID NO: 38031 - protein, 595 aa, Homo sapiens
MEESMKKAAEVLNKHSLSGRPLKVKEDPDGEHARRAMQKVMATTGGMGMGPGGPGMITIPPSILNNPNIPNEIIHALQAGRLGSTVFVANLDYKVGWKKLKEVFSMAGVVVRADILEDKDGKSRGIGTVTFEQSIEAVQAISMFNGQLLFDRPMHVKMDERALPKGDFFPPERPQQLPHGLGGIGMGLGPGGQPIDANHLNKGIGMGNIGPAGMEGPFGGGMENMGRFGSGMNMGRINEILSNALKRGEIIAKQGGGGGGGSVPGIERMGPGIDRLGGAGMERMGAGLGHGMDRVGSEIERMGLVMDRMGSVERMGSGIERMGPLGLDHMASSIERMGQTMERIGSGVERMGAGMGFGLERMAAPIDRVGQTIERMGSGVERMGPAIERMGLSMERMVPAGMGAGLERMGPVMDRMATGLERMGANNLERMGLERMGANSLERMGLERMGANSLERMGPAMGPALGAGIERMGLAMGGGGGASFDRAIEMERGNFGGSFAGSFGGAGGHAPGVARKACQIFVRNLPFDFTWKMLKDKFNECGHVLYADIKMENGKSKGCGVVKFESPEVAERACRMMNGMKLSGREIDVRIDRNA

SEQ ID NO: 38032 - protein, 72 aa, Homo sapiens
LSGKCCTCPAMLSCEPITGHVLYADIKMENGKSKGCGVVKFESPEVAERACRMMNGMKLSGREIDVRIDRNA

SEQ ID NO: 38033 - protein, 292 aa, Homo sapiens
VASMAPACQILRWALALGLGLMFEVTHAFRSQDEFLSSLESYEIAFPTRVDHNGALLAFSPPPPRRQRRGTGATAESRLFYKVASPSTHFLLNLTRSSRLLAGHVSVEYWTREGLAWQRAARPHCLYAGHLQGQASSSHVAISTCGGLHGLIVADEEEYLIEPLHGGPKGSRSPEESGPHVVYKRSSLRHPHLDTACGVRDEKPWKGRPWWLRTLKPPPARPLGNETERGQPGLKRSVSRERYVETLVVADKMMVAYHGRRDVEQYVLAIMNIVRLPNFSRTRVWEAPLTSS

SEQ ID NO: 38034 - protein, 148 aa, Homo sapiens
MRITAAILTARSRWRLRNSISAFLFTVTFAWCPPGLSNLTILSCPDHLSQDVFCLHESKFEEERMVAGWLTNYSQDSVTFEDVAVDFTQEEWTLLDQTQRNLYRDVMLENYKNLVAVDWESHINTKWSAPQQNFLQGKTSSVVEMNSE

SEQ ID NO: 38035 - protein, 515 aa, Homo sapiens
LRNSISAFLFTVTFAWCPPGLSNLTILSCPDWESHINTKWSAPQQNFLQGKTSSVVEMERNHFGEELFDFNQCEKALSEHSCLKTHRRTYFRKKTCECNQCEKAFRKPSIFTLHKKTDIGEELPNCNQCETAFSQHLHLVCKKTSQNLHLVCKKTHTQEKPYKCSDCEKGLPSSSHLRECVRIYGGERPYTHKEYVETFSHSTALFVHMQTQDGEKFYECKACGKPFTESSYLTQHLRTHSRVLPIEHKKFGKAFAFSPDLAKHIRLRTRGKHYVCNECGKEFTCFSKLNIHIRVHTGEKPYECNKCGKAFTDSSGLIKHRRTHTGEKPYECKECGKAFANSSHLTVHMRTHTGEKPYQCKECGKAFINSSSFKSHMQTHPGVKPYDCQQCGKAFIRSSFLIRHLRSHSAERPFECEECGKAFRYSSHLSQHKRIHTGERPYKCQKCGQAFSISSGLTVHMRTHTGERPFECQECGKAFTRSTYLIRHLRSHSVEKPYKECGQTFSNSSCLTECV

SEQ ID NO: 38036 - protein, 66 aa, Homo sapiens
LRATVRNSISAFLFTVTFAWCPPGLSNLTILSCPDHLSQDVFCLHESKFEEERMVAGWLTNYSQLL

SEQ ID NO: 38037 - protein, 43 aa, Homo sapiens
LCLFSIRNSISAFLFTVTFAWCPPGLSNLTILSCPERWLMNGA

SEQ ID NO: 38038 - protein, 26 aa, Homo sapiens
LNMYSFIVAMYTVIRNVGSLPWCLRS

SEQ ID NO: 38039 - protein, 37 aa, Homo sapiens
MWISFYVFSLGAYDTSSTQRDAVLLCCLGWSQTPALK

SEQ ID NO: 38040 - protein, 856 aa, Homo sapiens
LFPQSHFFLCVVWSFTTLREKNFAVRVRLTPSPRSCSPTDLATPPCSGLSRNPICLHEEKTEAERKMAYCLTNCYQYSVTFEDTAVDFTQEEWILLDPVQRNLYRDVMLENYENVAKVGFQLFKPSVISWLEEEELRTLQQGVLQDWAIKHQTSVSALQQEFWKIQTSNGIQMDLVTFDSVAVEFTQEEWTLLDPAQRNLYSDVMLENYKNLSSVGYQLFKPSLISWLEEEEELSTLPRVLQEWKMCLKTKGPALWQDNFCLKTLNGIQLARNQNGEELYDCKQCEDVFCKHPCLKTNMSTQNRGNTSECIQYAKDLLSLYNKTSTIRKVSVFSKHGKSFRLILNVQVQRKCTQDKSFEGTDYGKAFIYQSYLEAHRKTQSGEKLNEWKQCGEAFTHSTSHAVNVETHIIKNPYECKECGKDFRYPTHLNNHMQTHIGIKPYKCKHCGKTFTVPSGFLEHVRTHTGEKPYGCKECGKAFGTSAGLIEHIRCHAREKTFKCDHCGKAFISYPSLFGHLRVHNGEKPYEHKEYGKAFGTSSGVIEDRRSNTGQKRFDCDQCGKVFVSFSSLFAHLRTHTGEKPFKCYKCGKPFTSSACLRIHMRTHTEERLYQCKKCGKAFTKCSYLTKHLRTHAGEKPYECMKCGKAFTERSYLTKHLRRHSGEKPYECKKCGKAFTERSDLTKHLRRHTGDKPYEYKDCGKAFVVSSSLVDHLRTHTGYKPYKCNACEKAYSRSCVLTQHLKTHAAEKTSECNACGNSFRNSMCFHDRLKTLTKIKPYKCKDCGKAFTCHSDLTNHVRIHTGEKPYKCKECGKAFRTSSGRIQHLRTHMGEKPFECDQCGKAFASFSARIAHLKTH

SEQ ID NO: 38041 - protein, 53 aa, Homo sapiens [sequence omitted]

SEQ ID NO: 38042 - protein, 28 aa, Homo sapiens
VKIAALIDSSLHEKLLFSIRRCLITFYA

SEQ ID NO: 38043 - protein, 62 aa, Homo sapiens
VVESTLAVGLSVLLARPVARGRRLSGSQSGARSGSVFVPTPRVFWSGFIRCAPFFKSLESNL

SEQ ID NO: 38044 - protein, 53 aa, Homo sapiens
MSCMGLFFCAFFPPAGSELFKRSLMSGLEQMEELRTGVTGVLQGEKQYCRETV

SEQ ID NO: 38045 - protein, 27 aa, Homo sapiens
MYTIFKDHVSLGDYEIHDGMNLELYYQ

SEQ ID NO: 38046 - protein, 72 aa, Homo sapiens
LCCRMVLVKPGRGGGWGPGRWYSALECPLPRSTASICLNCSAPSTDDTIGDLKKLIAAQTGTRWNKIVLKKW

SEQ ID NO: 38047 - protein, 91 aa, Homo sapiens
LCCRMVLVKPGRGGGWGPGRWYSALECPLPRSTASICLNCSAPSTDDTIGDLKKLIAAQTGTRWNKIVLKKWYTIFKDHVSLGDCILCVTF

SEQ ID NO: 38048 - protein, 20 aa, Homo sapiens
MRILIFLPRFPLPSSSPTLG

SEQ ID NO: 38049 - protein, 182 aa, Homo sapiens
LPSPVCAWNRVNTQEALPTAAIPRDAKGRVYYFNHITNASQWERPSGNSSSGGKNGQGEPARVRCSHLLVKHSQSRRPSSWRQEKITRTKEEALELINGYIQKIKSGEEDFESLASQFSDCSSAKARGDLGAFSRGQMQKPFEDASFALRTGEMSGPVFTDSGIHIILRTECWRQTRGPNCF

SEQ ID NO: 38050 - protein, 187 aa, Homo sapiens
VQTRGARLGLGRKSRGGARAEPARRVPPESKAKQGPGRKGGAGPEAPPPALRGCWTDGRTQVGGRLSRAVRTLAGNCAAATMSQEGVELEKSVRRLREKFHGKVSSKKAGALMRKFGSDHTGVGRSIVYGVKQKDGQELSNDLDAQVTYPLPSQRTGSREGEQEGGPDPFMVTDPPLKQEGPGIVGP

SEQ ID NO: 38051 - protein, 372 aa, Homo sapiens
VQTRGARLGLGRKSRGGARAEPARRVPPESKAKQGPGRKGGAGPEAPPPALRGCWTDGRTQVGGRLSRAVRTLAGNCAAATMSQEGVELEKSVRRLREKFHGKVSSKKAGALMRKFGSDHTGVGRSIVYGVKQKDGQELSNDLDAQDPPEDMKQDRDIQAVATSLLPLTEANLRMFQRAQDDLIPAVDRQFACSSCDHVWWRRVPQRKEVSRCRKCRKRYEPVPADKMWGLAEFHCPKCRHNFRGWAQMGSPSPCYGCGFPVYPTRILPPRWDRDPDRRSTHTHSCSAADCYNRREPHVPGTSCAHPKSRKQNHLPKVLHPSNPHISSGSTVATCLSQGGLLEDLDNLILEDLKEEEEEEEEVEDEEGGPRE

SEQ ID NO: 38052 - protein, 194 aa, Homo sapiens
LRGCWTDGRTQVGGRLSRAVRTLAGNCAAATMSQEGVELEKSVRRLREKFHGKVSSKKAGALMRKFGSDHTGVGRSIVYGVKQKDGQELSNDLDAQDPPEDMKQDRDIQAVATSLLPLTEANLRMFQRAQDDLIPAVDRQFACSSCDHVWWRRVPQRKEVSRCRKCRKRYEPVPADKMWGLAEFHCPKCRHNFR

SEQ ID NO: 38053 - protein, 271 aa, Homo sapiens
LSRAVRTLAGNCAAATMSQEGVELEKSVRRLREKFHGKVSSKKAGALMRKFGSDHTGVGRSIVYGVKQKDGQELSNDLDAQDPPEDMKQDRDIQAVATSLLPLTEANLRMFQRAQDDLIPAVDRQFACSSCDHVWWRRVPQRKEVSRCRKCRKRYEPVPADKMWGLAEFHCPKCRHNFRTHTHSCSAADCYNRREPHVPGTSCAHPKSRKQNHLPKVLHPSNPHISSGSTVATCLSQGGLLEDLDNLILEDLKEEEEEEEEVEDEEGGPRE

SEQ ID NO: 38054 - protein, 357 aa, Homo sapiens
LSPTMGSLYSEYLNPNKVQEHYNYTKETLETQETTSRQVASAFIVILCCAIVVENLLVLIAVARNSKFHSAMYLFLGNLAASDLLAGVAFVANTLLSGSVTLRLTPVQWFAREGSAFITLSASVFSLLAIAIERHVAIAKVKLYGSDKSCRMLLLIGASWLISLVLGGLPILGWNCLGHLEACSTVLPLYAKHYVLCVVTIFSIILLAIVALYVRIYCVVRSSHADMAAPQTLALLKTVTIVLGVFIVCWLPAFSILLLDYACPVHSCPILYKAHYFFAVSTLNSLLNPVIYTWRSRDLRREVLRPLQCWRPGVGVQGRRRGGTPGHHLLPLRSSSSLERGMHMPTSPTFLEGNTVV

SEQ ID NO: 38055 - protein, 14 aa, Homo sapiens
MICIYSFVILPAIY

SEQ ID NO: 38056 - protein, 772 aa, Homo sapiens
VGFLPANRRARPRCRSMPLRPGSLVPEGAGFPKMAADVSVTHRPPLSPKSGAEVEAGDAAERRAPEEELPPLDPEEIRKRLEHTERQFRNRRKILIRGLPGDVTNQEVHDLLSDYELKYCFVDKYKGTAFVTLLNGEQAEAAINAFHQSRLRERELSVQLQPTDALLCVANLPPSLTQQQFEELVRPFGSLERCFLVYSERTGQSKGYGFAEYMKKDSAARAKSDLLGKPLGPRTLYVHWTDAGQLTPALLHSRCLCVDRLPPGFNDVDALCRALSAVHSPTFCQLACGQDGQLKGFAVLEYETAEMAEEAQQQADGLSLGGSHLRVSFCAPGPPGRSMLAALIAAQATALNRGKGLLPEPNILQLLNNLGPSASLQLLLNPLLHGSAGGKQGLLGAPPAMPLLNGPALSTALLQLALQTQGQKKPGILGDSPLGALQPGAQPANPLLGELPAGGGLPPELPPRRGKPPPLLPSVLGPAGGDREALGLGPPAAQLTPPPAPVGLRGSGLRGLQKDSGPLPTPPGVSLLGEPPKDYRIPLNPYLNLHSLLPASNLAGKEARGWGGAGRSRRPAEGPPTNPPAPGGGSSSSKAFQLKSRLLSPLSSARLPPEPGLSDSYSFDYPSDMGPRRLFSHPREPALGPHGPSRHKMSPPPSGFGERSSGGSGGGPLSHFYSGSPTSYFTSGLQAGLKQSHLSKAIGSSPLGSGEGLLGLSPGPNGHSHLLKTPLGGQKRSFAHLLPSPEPSPEGSYVGQHSQGLGGHYADSYLKRKRIF

SEQ ID NO: 38057 - protein, 639 aa, Homo sapiens
VGFLPANRRARPRCRSMPLRPGSLVPEGAGFPKMAADVSVTHRPPLSPKSGAEVEAGDAAERRAPEEELPPLDPEEIRKRLEHTERQFRNRRKILIRGLPGDVTNQEVHDLLSDYELKYCFVDKYKGTAFVTLLNGEQAEAAINAFHQSRLRERELSVQLQPTDALLCVANLPPSLTQQQFEELVRPFGSLERCFLVYSERTGQSKGYGFAEYMKKDSAARAKSDLLGKPLGPRTLYVHWTDAGQLTPALLHSRCLCVDRLPPGFNDVDALCRALSAVHSPTFCQLACGQDGQLKGFAVLEYETAEMAEEAQQQADGLSLGGSHLRVSFCAPGPPGRSMLAALIAAQATALNRGKGLLPEPNILQLLNNLGPSASLQLLLNPLLHGSAGGKQGLLGAPPAMPLLNGPALSTALLQLALQTQGQKKPGILGDSPLGALQPGAQPANPLLGELPAGGGLPPELPPRRGKPPPLLPSVLGPAGGDREALGLGPPAAQLTPPPAPVGLRGSGLRGPLSHFYSGSPTSYFTSGLQAGLKQSHLSKAIGSSPLGSGEGLLGLSPGPNGHSHLLKVRAGGGDMQGWEAPAPQRPLTRPALPSVSRPHWAARNAALPTCCPRPSPAQKAAMWASTPRASAATTRTPT

SEQ ID NO: 38058 - protein, 575 aa, Homo sapiens
LCFRRSGRPRLFPCLPFGHLRKAPSSVRMATMVPSVLWPRACWTLLVCCLLTPGVQGQEFLLRVEPQNPVLSAGGSLFVNCSTDCPSSEKIALETSLSKELVASGMGWAAFNLSNVTGNSRILCSVYCNGSQITGSSNITVYRLPERVELAPLPPWQPVGQNFTLRCQVEDGSPRTSLTVVLLRWEEELSRQPAVEEPAEVTATVLASRDDHGAPFSCRTELDMQPQGLGLFVNTSAPRQLRTFVLPVTPPRLVAPRFLEVETSWPVDCTLDGLFPASEAQVYLALGDQMLNATVMNHGDTLTATATATARADQEGAREIVCNVTLGGERREARENLTVFSFLGPIVNLSEPTAHEGSTVTVSCMAGARVQVTLDGVPAAAPGQPAQLQLNATESDDGRSFFCSATLEVDGEFLHRNSSVQLRVLYGPKIDRATCPQHLKWKDKTRHVLQCQARGNPYPELRCLKEGSSREVPVGIPFFVNVTHNGTYQCQASSSRGKYTLVVVMDIEAGSSHFVPVFVAVLLTLGVVTIVLALMYVFREHQRSGSYHVREESTYLPLTSMQPTEAMGEEPSRAE

SEQ ID NO: 38059 - protein, 32 aa, Homo sapiens
LTHLLLCWIRASSGLLLSSPRSLMDSTFPTGP

SEQ ID NO: 38060 - protein, 33 aa, Homo sapiens
MATMVPSVLWPRACWTLLVCCLLTPGSPVPFTC

SEQ ID NO: 38061 - protein, 206 aa, Homo sapiens
LAPECLPGGANSLSTAMDKWGFGATLLEICFDGEAPLQSRSPSEKEHFYQRQHRLPEPSCPQLATLTSQCLTYEPTQRPSFRTILRDLTRLQPHNLADVLTVNPDSPASDPTVFHKRYLKKIRDLGEGHFGKVSLYCYDPTNDGTGEMVAVKALKADCGPQHRSGWKQEIDILRTLYHEHIIKYKGCCEDQGGRDPASPRDLRGRG

SEQ ID NO: 38062 - protein, 117 aa, Homo sapiens
LRASRAASAPAAVPGDQENGRHGPGRLRVPRQDSEGQEGATWVDIFVGRRNSWGGPGAAETERENQEALRRRRPGGSEALRGSICVLGLAAERPRSLSARGGGVAYLLEPHAARSQA

SEQ ID NO: 38063 - protein, 110 aa, Homo sapiens
LRASRAASAPAAVPGDQENGRHGPGRLRVPRQDSEGQEGATWVDIFVGRRNSWGGPGAAETERENQEALRRRRPGGSEALRGSICVLGSLSARGGGVAYLLEPHAARSQA

SEQ ID NO: 38064 - protein, 89 aa, Homo sapiens
VGGGGERPLSGPYRLRPGPGDFYCDTAGARLCLVMVTCARSAPPPRAAMEAPGLGRWRRSRSAAMAGSLSARGGGVAYLLEPHAARSQA

SEQ ID NO: 38065 - protein, 24 aa, Homo sapiens
LRSLSARGGGVAYLLEPHAARSQA

SEQ ID NO: 38066 - protein, 126 aa, Homo sapiens [sequence omitted]

SEQ ID NO: 38067 - protein, 39 aa, Homo sapiens [sequence omitted]

SEQ ID NO: 38068 - protein, 743 aa, Homo sapiens
LGGAAASRAVSASLQTREGRGGAGESAGGRRGWSPAGMGDERPHYYGKHGTPQKYDPTFKGPIYNRGCTDIICCVFLLLAIVGYVAVGIIAWTHGDPRKVIYPTDSRGEFCGQKGTKNENKPYLFYFNIVKCASPLVLLEFQCPTPQICVEKCPDRYLTYLNARSSRDFEYYKQFCVPGFKNNKGVAEVLQDGDCPAVLIPSKPLARRCFPAIHAYKGVLMVGNETTYEDGHGSRKNITDLVEGAKKANGVLEARQLAMRIFEDYTVSWYWIIIGLVIAMAMSLLFIILLRFLAGIMVWVMIIMVILVLGYGIFHCYMEYSRLRGEAGSDVSLVDLGFQTDFRVYLHLRQTWLAFMIILSILEVIIILLLIFLRKRILIAIALIKEASRAVGYVMCSLLYPLVTFFLLCLCIAYWASTAVFLSTSNEAVYKIFDDSPCPFTAKTCNPETFPSSNESRQCPNARCQFAFYGGESGYHRALLGLQIFNAFMFFWLANFVLALGQVTLAGAFASYYWALRKPDDLPAFPLFSAFGRALRYHTGSLAFGALILAIVQIIRVILEYLDQRLKAAENKFAKCLMTCLKCCFWCLEKFIKFLNRNAYIMIAIYGTNFCTSARNAFFLLMRNIIRVAVLDKVTDFLFLLGKLLIVGSVGILAFFFFTHRIRIVQDTAPPLNYYWVPILTVIVGSYLIAHGFFSVYGMCVDTLFLCFLEDLERNDGSAERPYFMSSTLKKLLNKTNKKAAES

SEQ ID NO: 38069 - protein, 72 aa, Homo sapiens
LSLAQPRLPEVPLLGPEPLARAGLALFLSSSSSWVPQGGWAWAMWVVVAGGLGGLSAPAHASLMGGPRAASL

SEQ ID NO: 38070 - protein, 230 aa, Homo sapiens
VTRMMAAGAALALALWLLMPPVEVGGAGPPPIQDGEFTFLLPAGRKQCFYQSAPANASLETEYQVIGGAGLDVDFTLESPQGVLLVSESRKADGVHTVEPTEAGDYKLCFDNSFSTISEKLVFFELIFDSLQDDEEVEGWAEAVEPEEMLDVKMEDIKESIETMRTRLERSIQMLTLLRAFEARDRNLQEGNLERVNFWSAVNVAVLLLVAVLQVCTLKRFFQDKRPVPT

SEQ ID NO: 38071 - protein, 77 aa, Homo sapiens
VTRMMAAGAALALALWLLMPPVEVGGAGPPPIQDGEFTFLLPAGRKQCFYQSAPANASLETEYQGGANGGRGLQAVL

SEQ ID NO: 38072 - protein, 98 aa, Homo sapiens
VTRMMAAGAALALALWLLMPPVEVGGAGPPPIQDGEFTFLLPAGRKQCFYQSAPANASLETEYQVIGGAGLDVDFTLESPQGVLLGGANGGRGLQAVL

SEQ ID NO: 38073 - protein, 199 aa, Homo sapiens
MPWTILLFAAGSLAIPAPSIRLVPPYPSSQEDPIHIACMAPGNFPGANFTLYRGGQVVQLLQAPTDQRGVTFNLSGGSSKAPGGPFHCQYGVLGELNQSQLSDLSEPVNVSFPVPTWILVLSLSLAGALFLLAGLVAVALVVRKVKLRNLQKKRDRESCWAQINFDSTGLCLHTPDSSGERITPPNAIRPHHTPIKFLL

SEQ ID NO: 38074 - protein, 468 aa, Homo sapiens
MGSQVCLMPKSVPLPRCHAASRSPVVLQRDTTPHLPGALSSRFYGYLSQQQNMMQDYVRTGTYQRAILQNHTDFKDKIVLDVGCGSGILSFFAAQAGARKIYAVEASTMAQHAEVLVKSNNLTDRIVVIPGKVEEVSLPEQVDIIISEPMGYMLFNERMLESYLHAKKYLKPSGNMFPTIGDVHLAPFTDEQLYMEQFTKANFWYQPSFHGVDLSALRGAAVDEYFRQPVVDTFDIRILMAKSVKYTVNFLEAKEGDLHRIEIPFKFHMLHSGLVHGLAFWFDVAFIGSIMTVWLSTAPTEPLTHWYQVRCLFQSPLFAKAGDTLSGTCLLIANKRQSYDISIVAQVDQTGSKSSNLLDLKNPFFRYTGTTPSPPPGSHYTSPSENMWNTGSTYNLSSGMAVAGMPTAYDLSSVIASGSSVGHNNLIPLANTGIVNHTHSRMGSIMSTGIVQGNEGGGGRARGGRASV

SEQ ID NO: 38075 - protein, 253 aa, Homo sapiens
LSGFPSSHCPLPSRIEIPFKFHMLHSGLVHGLAFWFDVAFIGSIMTVWLSTAPTEPLTHWYQVRCLFQSPLFAKAGDTLSGTCLLIANKRQSYDISIVAQVDQTGSKSSNLLDLKNPFFRYTGTTPSPPPGSHYTSPSENMWNTGSTYNLSSGMAVAGMPTAYDLSSVIASGSSVGHNNLIPLANTGIVNHTHSRMGSIMSTGIVQGSSGAQGSGGGSTSAHYAVNSQFTMGGPAISMASPMSIPTNTMHYGS

SEQ ID NO: 38076 - protein, 85 aa, Homo sapiens
VLQHRQFSSPSAPLFLIPPNSDAGAQARRVCTQAGAGAVQAGPPPWLSLLFQGSHRRESRWPGGDMGAPALSQSSLLGCPSPAFI

SEQ ID NO: 38077 - protein, 26 aa, Homo sapiens
LWPGMVMSVIPAVCKLRQENRLRPGV

SEQ ID NO: 38078 - protein, 860 aa, Homo sapiens
VVPSGPGRRWPALLPLPPAARVLRGEVWGRASGPASPFPHYPCEDEPSRRVTGQLQGVPVPLLPPGHPAPKAELCILLPLQGSPAARRAFVPQLRSGKFNVLLTTYEYIIKDKHILAKIRWKYMIVDEGHRMKNHHCKLTQVLNTHYVAPRRLLLTGTPLQNKLPELWALLNFLLPTIFKSCSTFEQWFNAPFAMTGEKVDLNEEETILIIRRLHKVLRPFLLRRLKKEVEAQLPEKVEYVIKCDMSALQRVLYRHMQAKGVLLTDGSEKDKKGKGGTKTLMNTIMQLRKICNHPYMFQHIEESFSEHLGFTGGIVQGLDLYRASGKFELLDRILPKLRATNHKVLLFCQMTSLMTIMEDYFAYRGFKYLRLDGTTKAEDRGMLLKTFNEPGSEYFIFLLSTRAGGLGLNLQSADTVIIFDSDWNPHQDLQAQDRAHRIGQQNEVRVLRLCTVNSVEEKILAAAKYKLNVDQKVIQAGMFDQKSSSHERRAFLQAILEHEEQDEEEDEVPDDETVNQMIARHEEEFDLFMRMDLDRRREEARNPKRKPRLMEEDELPSWIIKDDAEVERLTCEEEEEKMFGRGSRHRKEVDYSDSLTEKQWLKAIEEGTLEEIEEEVRQKKSSRKRKRDSDAGSSTPTTSTRSRDKDDESKKQKKRGRPPAEKLSPNPPNLTKKMKKIVDAVIKYKDSSSGRQLSEVFIQLPSRKELPEYYELIRKPVDFKKIKERIRNHKYRSLNDLEKDVMLLCQNAQTFNLEGSLIYEDSIVLQSVFTSVRQKIEKEDDSEGEESEEEEEGEEEGSESESRSVKVKIKLGRKEKAQDRLKGGRRRPSRGSRAKPVVSDDDSEEEQEEDRSGSGSEED

SEQ ID NO: 38079 - protein, 95 aa, Homo sapiens
LAEAASMGPWGWKLRWTVALLLAAAGTAVGDRCERNEFQCQDGKCISYKWVCDGSAECQDGSDESQETCCESPLGMICIYFCNRDRVSPCWPGWS

SEQ ID NO: 38080 - protein, 122 aa, Homo sapiens
LAEAASMGPWGWKLRWTVALLLAAAGTAVGDRCERNEFQCQDGKCISYKWVCDGSAECQDGSDESQETCLSVTCKSGDFSCGGRVNRCIPQFWRCDGQVDCDNGSDEQGCRKCGPAFAIEPI

SEQ ID NO: 38081 - protein, 866 aa, Homo sapiens
LAEAASMGPWGWKLRWTVALLLAAAGTAVGDRCERNEFQCQDGKCISYKWVCDGSAECQDGSDESQETCLSVTCKSGDFSCGGRVNRCIPQFWRCDGQVDCDNGSDEQGCPPKTCSQDEFRCHDGKCISRQFVCDSDRDCLDGSDEASCPVLTCGPASFQCNSSTCIPQLWACDNDPDCEDGSDEWPQRCRGLYVFQGDSSPCSAFEFHCLSGECIHSSWRCDGGPDCKDKSDEENCAVATCRPDEFQCSDGNCIHGSRQCDREYDCKDMSDEVGCVNVTLCEGPNKFKCHSGECITLDKVCNMARDCRDWSDEPIKECGTNECLDNNGGCSHVCNDLKIGYECLCPDGFQLVAQRRCEDIDECQDPDTCSQLCVNLEGGYKCQCEEGFQLDPHTKACKAVGSIAYLFFTNRHEVRKMTLDRSEYTSLIPNLRNVVALDTEVASNRIYWSDLSQRMICSTQLDRAHGVSSYDTVISRDIQAPDGLAVDWIHSNIYWTDSVLGTVSVADTKGVKRKTLFRENGSKPRAIVVDPVHGFMYWTDWGTPAKIKKGGLNGVDIYSLVTENIQWPNGITLDLLSGRLYWVDSKLHSISSIDVNGGNRKTILEDEKRLAHPFSLAVFEDKVFWTDIINEAIFSANRLTGSDVNLLAENLLSPEDMVLFHNLTQPRGVNWCERTTLSNGGCQYLCLPAPQINPHSPKFTCACPDGMLLARDMRSCLTEAEAAVATQETSTVRLKVSSTAVRTQHTTTRPVPDTSRLPGATPGLTTVEIVTMSHQALGDVAGRGNEKKPSSVRALSIVLPIVLLVFLCLGVFLLWKNWRLKNINSINFDNPVYQKTTEDEVHICHNQDGYSYPSRQMVSLEDDVA

SEQ ID NO: 38082 - protein, 698 aa, Homo sapiens
LAEAASMGPWGWKLRWTVALLLAAAGTAVGDRCERNEFQCQDGKCISYKWVCDGSAECQDGSDESQETCLSVTCKSGDFSCGGRVNRCIPQFWRCDGQVDCDNGSDEQGCLTLCEGPNKFKCHSGECITLDKVCNMARDCRDWSDEPIKECGTNECLDNNGGCSHVCNDLKIGYECLCPDGFQLVAQRRCEDIDECQDPDTCSQLCVNLEGGYKCQCEEGFQLDPHTKACKAVGSIAYLFFTNRHEVRKMTLDRSEYTSLIPNLRNVVALDTEVASNRIYWSDLSQRMICSTQLDRAHGVSSYDTVISRDIQAPDGLAVDWIHSNIYWTDSVLGTVSVADTKGVKRKTLFRENGSKPRAIVVDPVHGFMYWTDWGTPAKIKKGGLNGVDIYSLVTENIQWPNGITLDLLSGRLYWVDSKLHSISSIDVNGGNRKTILEDEKRLAHPFSLAVFEDKVFWTDIINEAIFSANRLTGSDVNLLAENLLSPEDMVLFHNLTQPRGVNWCERTTLSNGGCQYLCLPAPQINPHSPKFTCACPDGMLLARDMRSCLTEAEAAVATQETSTVRLKVSSTAVRTQHTTTRPVPDTSRLPGATPGLTTVEIVTMSHQALGDVAGRGNEKKPSSVRALSIVLPIVLLVFLCLGVFLLWKNWRLKNINSINFDNPVYQKTTEDEVHICHNQDGYSYPSRQMVSLEDDVA

SEQ ID NO: 38083 - protein, 825 aa, Homo sapiens
LAEAASMGPWGWKLRWTVALLLAAAGTAVGDRCERNEFQCQDGKCISYKWVCDGSAECQDGSDESQETCSPKTCSQDEFRCHDGKCISRQFVCDSDRDCLDGSDEASCPVLTCGPASFQCNSSTCIPQLWACDNDPDCEDGSDEWPQRCRGLYVFQGDSSPCSAFEFHCLSGECIHSSWRCDGGPDCKDKSDEENCAVATCRPDEFQCSDGNCIHGSRQCDREYDCKDMSDEVGCVNVTLCEGPNKFKCHSGECITLDKVCNMARDCRDWSDEPIKECGTNECLDNNGGCSHVCNDLKIGYECLCPDGFQLVAQRRCEDIDECQDPDTCSQLCVNLEGGYKCQCEEGFQLDPHTKACKAVGSIAYLFFTNRHEVRKMTLDRSEYTSLIPNLRNVVALDTEVASNRIYWSDLSQRMICSTQLDRAHGVSSYDTVISRDIQAPDGLAVDWIHSNIYWTDSVLGTVSVADTKGVKRKTLFRENGSKPRAIVVDPVHGFMYWTDWGTPAKIKKGGLNGVDIYSLVTENIQWPNGITLDLLSGRLYWVDSKLHSISSIDVNGGNRKTILEDEKRLAHPFSLAVFEDKVFWTDIINEAIFSANRLTGSDVNLLAENLLSPEDMVLFHNLTQPRGVNWCERTTLSNGGCQYLCLPAPQINPHSPKFTCACPDGMLLARDMRSCLTEAEAAVATQETSTVRLKVSSTAVRTQHTTTRPVPDTSRLPGATPGLTTVEIVTMSHQALGDVAGRGNEKKPSSVRALSIVLPIVLLVFLCLGVFLLWKNWRLKNINSINFDNPVYQKTTEDEVHICHNQDGYSYPSRQMVSLEDDVA

SEQ ID NO: 38084 - protein, 688 aa, Homo sapiens
LAEAASMGPWGWKLRWTVALLLAAAGTAVGDRCERNEFQCQDGKCISYKWVCDGSAECQDGSDESQETCLSVTCKSGDFSCGGRVNRCIPQFWRCDGQVDCDNGSDEQGCPVATCRPDEFQCSDGNCIHGSRQCDREYDCKDMSDEVGCVNVTLCEGPNKFKCHSGECITLDKVCNMARDCRDWSDEPIKECGTNECLDNNGGCSHVCNDLKIGYECLCPDGFQLVAQRRCEDIDECQDPDTCSQLCVNLEGGYKCQCEEGFQLDPHTKACKAVGSIAYLFFTNRHEVRKMTLDRSEYTSLIPNLRNVVALDTEVASNRIYWSDLSQRMICSTQLDRAHGVSSYDTVISRDIQAPDGLAVDWIHSNIYWTDSVLGTVSVADTKGVKRKTLFRENGSKPRAIVVDPVHGFMYWTDWGTPAKIKKGGLNGVDIYSLVTENIQWPNGITLDLLSGRLYWVDSKLHSISSIDVNGGNRKTILEDEKRLAHPFSLAVFEDKVFWTDIINEAIFSANRLTGSDVNLLAENLLSPEDMVLFHNLTQPREAEAAVATQETSTVRLKVSSTAVRTQHTTTRPVPDTSRLPGATPGLTTVEIVTMSHQALGDVAGRGNEKKPSSVRALSIVLPIVLLVFLCLGVFLLWKNWRLKNINSINFDNPVYQKTTEDEVHICHNQDGYSYPSRQMVSLEDDVA

SEQ ID NO: 38085 - protein, 864 aa, Homo sapiens
LAEAASMGPWGWKLRWTVALLLAAAGTAVGDRCERNEFQCQDGKCISYKWVCDGSAECQDGSDESQETCLSVTCKSGDFSCGGRVNRCIPQFWRCDGQVDCDNGSDEQGCPPKTCSQDEFRCHDGKCISRQFVCDSDRDCLDGSDEASCPVLTCGPASFQCNSSTCIPQLWACDNDPDCEDGSDEWPQRCRGLYVFQGDSSPCSAFEFHCLSGECIHSSWRCDGGPDCKDKSDEENCAVATCRPDEFQCSDGNCIHGSRQCDREYDCKDMSDEVGCVNVTLCEGPNKFKCHSGECITLDKVCNMARDCRDWSDEPIKECGTNECLDNNGGCSHVCNDLKIGYECLCPDGFQLVAQRRCEDIDECQDPDTCSQLCVNLEGGYKCQCEEGFQLDPHTKACKAVGSIAYLFFTNRHEVRKMTLDRSEYTSLIPNLRNVVALDTEVASNRIYWSDLSQRMICSTQLDRAHGVSSYDTVISRDIQAPDGLAVDWIHSNIYWTDSVLGTVSVADTKGVKRKTLFRENGSKPRAIVVDPVHGFMYWTDWGTPAKIKKGGLNGVDIYSLVTENIQWPNGITLDLLSGRLYWVDSKLHSISSIDVNGGNRKTILEDEKRLAHPFSLAVFEDKVFWTDIINEAIFSANRLTGSDVNLLAENLLSPEDMVLFHNLTQPRGVNWCERTTLSNGGCQYLCLPAPQINPHSPKFTCACPDGMLLARDMRSCLTEAEAAVATQETSTVRLKVSSTAVRTQHTTTRPVPDTSRLPGATPGLTTVEIVTMSHQALGDVAGRGNEKKPSSVRALSIVLPIVLLVFLCLGVFLLWKNWRLKNINSINFDNPVYQKTTEDEVHICHNQDGYSYPSMVSLEDDVA

SEQ ID NO: 38086 - protein, 954 aa, Homo sapiens
LAEAASMGPWGWKLRWTVALLLAAAGTAVGDRCERNEFQCQDGKCISYKWVCDGSAECQDGSDESQETCLSVTCKSGDFSCGGRVNRCIPQFWRCDGQVDCDNGSDEQGCPPKTCSQDEFRCHDGKCISRQFVCDSDRDCLDGSDEASCPVLTCGPASFQCNSSTCIPQLWACDNDPDCEDGSDEWPQRCRGLYVFQGDSSPCSAFEFHCLSGECIHSSWRCDGGPDCKDKSDEENCAVATCRPDEFQCSDGNCIHGSRQCDREYDCKDMSDEVGCVNVTLCEGPNKFKCHSGECITLDKVCNMARDCRDWSDEPIKECGTNECLDNNGGCSHVCNDLKIGYECLCPDGFQLVAQRRCEDIDECQDPDTCSQLCVNLEGGYKCQCEEGFQLDPHTKACKAVGSIAYLFFTNRHEVRKMTLDRSEYTSLIPNLRNVVALDTEVASNRIYWSDLSQRMICSTQLDRAHGVSSYDTVISRDIQAPDGLAVDWIHSNIYWTDSVLGTVSVADTKGVKRKTLFRENGSKPRAIVVDPVHGFMYWTDWGTPAKIKKGGLNGVDIYSLVTENIQWPNGITLDLLSGRLYWVDSKLHSISSIDVNGGNRKTILEDEKRLAHPFSLAVFEDKVFWTDIINEAIFSANRLTGSDVNLLAENLLSPEDMVLFHNLTQPRGVNWCERTTLSNGGCQYLCLPAPQINPHSPKFTCACPDGMLLARDMRSCLTEAEAAVATQETSTVRLKVSSTAVRTQHTTTRPVPDTSRLPGATPGLTTVEIVTMSHQALGDVAGRGNEKKPSSVRALSIVLPIATELGLWSRGQLCDRACLSLQCSSSSFAWGSSFYGRTGGLRTSTASTLTTPSIRRPQRMRSTFATTRTATATPRDRWSVWRMTWREHLPGVPSLPRTLPETSPALFYSKTEKTKALPARALFYIFIHLGGRTGFGQCPCNGLGWDFGFFLSS

SEQ ID NO: 38087 - protein, 69 aa, Homo sapiens
VPLPTVLLVFLCLGVFLLWKNWRLKNINSINFDNPVYQKTTEDEVHICHNQDGYSYPSRQMVSLEDDVA

SEQ ID NO: 38088 - protein, 876 aa, Homo sapiens
LTRSPSSDFQGASVEKKMAQVLHVPAPFPGTPGPASPPAFPAKDPDPPYSVETPYGYRLDLDFLKYVDDIEKGHTLRRVAVQRRPRLSSLPRGPGSWWTSTESLCSNASGDSRHSAYSYCGRGFYPQYGALETRGGFNPRVERTLLDARRRLEDQAATPTGLGSLTPSAAGSTASLVGVGLPPPTPRSSGLSTPVPPSAGHLAHVREQMAGALRKLRQLEEQVKLIPVLQVKLSVLQEEKRQLTVQLKSQKFLGHPTAGRGRSELCLDLPDPPEDPVALETRSVGTWVRERDLGMPDGEAALAAKVAVLETQLKKALQELQAAQARQADPQPQAWPPPDSPVRVDTVRVVEGPREVEVVASTAAGAPAQRAQSLEPYGTGLRALAMPGRPESPPVFRSQEVVETMCPVPAAATSNVHMVKKISITERSCDGAAGLPEVPAESSSSPPGSEVASLTQPEKSTGRVPTQEPTHREPTRQAASQESEEAGGTAPPLSSPPGGPPAGVRSIMKRKEEVADPTAHRRSLQFVGVNGGYESSSEDSSTAENISDNDSTENEAPEPRERVPSVAEAPQLRPAGTAAAKTSRQECQLSRESQHIPTAEGASGSNTEEEIRMELSPDLISACLALEKYLDNPNALTERELKVAYTTVLQEWLRLACRSDAHPELVRRHLVTFRAMSARLLDYVVNIADSNGNTALHYSVSHANFPVVQQLLDSGVCKVDKQNRAGYSPIMLTALATLKTQDDIETVLQLFRLGNINAKASQAGQTALMLAVSHGRVDVVKALLACEADVNVQDDDGSTALMCACEHGHKEIAGLLLAVPSCDISLTDRDGSTALMVALDAGQSEIASMLYSRMNIKCSFAPMSDDESPTSSSAEE

SEQ ID NO: 38089 - protein, 51 aa, Homo sapiens
LLRGYVCSLKMYILTSGLEALSAHQIPNSRGAAPFLCSQTPTNTPSQDQHC

SEQ ID NO: 38090 - protein, 68 aa, Homo sapiens
VESVLLGIVILLAYRLEFTDTFPVHTQGFFCYDSTYAKPYPGPEAASRVPPALVYALVTAGPTLTVRQ

SEQ ID NO: 38091 - protein, 222 aa, Homo sapiens
LLLAAKLQASLSRLVLFLQLWLYQNDGCLWWSPCTPFTEDPPASLEVLSERCWGTMQAVEPGTDDEGPLLEPVGSEHAQDTYLVLDKWLLPRNPPSEDLPGPGGSVDIVAMDEGSEASSCSSALASKPSPEGASAASFEYTILDPSSQLLRPWTLCPELPPTPPHLKYLYLVVSDSGISTDYSSGDSQGAQGGLSDGPYSNPYENSLIPAAEPLPPSYVACS

SEQ ID NO: 38092 - protein, 72 aa, Homo sapiens
VEILEGRTECVLSNLRGRTRYTFAVRARMAEPSFGGFWSAWSEPVSLLTPSGEAPGGGVGGARANHGASPPP

SEQ ID NO: 38093 - protein, 84 aa, Homo sapiens [sequence omitted]

SEQ ID NO: 38094 - protein, 270 aa, Homo sapiens
MERTAGKELALAPLQDWGEETEDGAVYSVSLRRQRSQRRSPAEGPGGSQAPSPIANTFLHYRTSKVRVLRAARLERLVGELVFGDREQDPSFMPAFLATYRTFVPTACLLGFLLPPMPPPPPPGVEIKKTAVQDLSFNKNLRLFRGLRGGRGRAHASRSPAPGLQRGRGGRAADPHRLGALLQGEALRVLGLRVVAEGPAGGCRRLPHCARHRGPVQHRDRLCAGFRARSTGLGRPAEGAAAGEVDPHRPALPRTAELLLLARHPVRPAI

SEQ ID NO: 38095 - protein, 32 aa, Homo sapiens
MCGCGRRRLLIPLVCWRELGHNWAQGAEVLRS

SEQ ID NO: 38096 - protein, 29 aa, Homo sapiens
MLLPLLLLLPMCWAVEVKRPRGVSLTNVY

SEQ ID NO: 38097 - protein, 77 aa, Homo sapiens
LPTDLPAPSAPDLTEPKEEQPPVPSSPTEEEEEEEEEEEEEAEEEEEEEDSEVQGEQPKVRVWGRSGDREGGGRATH

SEQ ID NO: 38098 - protein, 332 aa, Homo sapiens
LACVSPWMDMWTALLILQALLLPSLADGATPALRFVAVGDWGGVPNAPFHTAREMANAKEIARTVQILGADFILSLGDNFYFTGVQDINDKRFQETFEDVFSDRSLRKVPWYVLAGNHDHLGNVSAQIAYSKISKRWNFPSPFYRLHFKIPQTNVSVAIFMLDTVTLCGNSDDFLSQQPERPRDVKLARTQLSWLKKQLAAAREDYVLVAGHYPVWSIAEHGPTHCLVKQLRPLLATYGVTAYLCGHDHNLQYLQDENGVGYVLSGAGNFMDPSKRHQRKVPNGYLRFHYGTEDSLGGFAYVEISSKEMTVTYIEASGKSLFKTRLPRRARP

SEQ ID NO: 38099 - protein, 46 aa, Homo sapiens
LLQETFEDVFSDRSLRKVPWYVLAGNHDHLGNVSAQIAYSKISKRW

SEQ ID NO: 38100 - protein, 126 aa, Homo sapiens
LACVSPWMDMWTALLILQALLLPSLADGATPALRFVAVGDWGGVPNAPFHTAREMANAKEIARTVQILGADFILSLGDNFYFTGVQDINDKRFQVCAQQSGAGGGGGQWGEAALPSDLPLVRAEGR

SEQ ID NO: 38101 - protein, 73 aa, Homo sapiens
LGPPGVRSPADLQLGTGRNARPATAGNKGSGTGSSTLEPTSLSEPPVTGLCLPLDGHVDGAAHPASLVATLPG

SEQ ID NO: 38102 - protein, 130 aa, Homo sapiens
LGPPGVRSPADLQLGTGRNARPATAGIPTQCHVRTQACIADKPHRPRRLSIHVCSNTIRYRAEAQVGMLSCTQEARHTQTHTGNKGSGTGSSTLEPTSLSEPPVTGLCLPLDGHVDGAAHPASLVATLPG

SEQ ID NO: 38103 - protein, 51 aa, Homo sapiens
LGPPGVRSPADLQLGTGRNARPATAGTEGTPECPRDVSRRRPARRRQAGRE

SEQ ID NO: 38104 - protein, 107 aa, Homo sapiens
LGPPGVRSPADLQLGTGRNARPATAGTEGTPECPRDVSRRRPARRRQAGRDSHPVPRENTGVHRRQATQASQAQHTCLQQHHQVQSRGPGRHAQLHAGSKTHPDTHR

SEQ ID NO: 38105 - protein, 33 aa, Homo sapiens
LLLGSVAFCIQSLLLREAPGASATAPVTLSPAL

SEQ ID NO: 38106 - protein, 25 aa, Homo sapiens
LGTDQEAVTDGREKPEKSGTTSHNE

SEQ ID NO: 38107 - protein, 17 aa, Homo sapiens
MQGMWQSLHFFWFLSVS

SEQ ID NO: 38108 - protein, 84 aa, Homo sapiens
LSVALCSSLVTRALGKTVGSSDMDSVAFEDVAVNFTPDEWALLDPSQKNLYREVMQETLRNLASIEVLWKRDSLKVKVISMEKF

SEQ ID NO: 38109 - protein, 552 aa, Homo sapiens
VTRTIHGSPREDTGTPRSREMMFQDSVAFEDVAVSFTQEEWALLDPSQKNLYRDVMQETFKNLTSVGKTWKVQNIEDEYKNPRRNLSLMREKLCESKESHHCGESFNQIADDMLNRKTLPGITPCESSVCGEVGTGHSSLNTHIRADTGHKSSEYQEYGENPYRNKECKKAFSYLDSFQSHDKACTKEKPYDGKECTETFISHSCIQRHRVMHSGDGPYKCKFCGKAFYFLNLCLIHERIHTGVKPYKCKQCGKAFTRSTTLPVHERTHTGVNADECKECGNAFSFPSEIRRHKRSHTGEKPYECKQCGKVFISFSSIQYHKMTHTGEKPYECKQCGKAFRCGSHLQKHGRTHTGEKPYECRQCGKAFRCTSDLQRHEKTHTEDKPYGCKQCGKGFRCASQLQIHERTHSGEKPHECKECGKVFKYFSSLRIHERTHTGEKPHECKQCGKAFRYFSSLHIHERTHTGDKPYECKVCGKAFTCSSSIRYHERTHTGEKPYECKHCGKAFISNYIRYHERTHTGEKPYQCKQCGKAFIRASSCREHERTHTINR

SEQ ID NO: 38110 - protein, 542 aa, Homo sapiens
MFQDSVAFEDVDVNFTQEEWALLDPSQKNLYRDVMWETMRNLASIGKKWKDQNIKDHYKHRGRNLRSHMLERLYQTKDGSQRGGIFSQFANQNLSKKIPGVKLCESIVYGEVSMGQSSLNRHIKDHSGHEPKEYQEYGEKPDTRNQCWKPFSSHHSFRTHEIIHTGEKLYDCKECGKTFFSLKRIRRHIITHSGYTPYKCKVCGKAFDYPSRFRTHERSHTGEKPYECQECGKAFTCITSVRRHMIKHTGDGPYKCKVCGKPFHSLSSFQVHERIHTGEKPFKCKQCGKAFSCSPTLRIHERTHTGEKPYECKQCGKAFSYLPSLRLHERIHTGEKPFVCKQCGKAFRSASTFQIHERTHTGEKPYECKECGEAFSCIPSMRRHMIKHTGEGPYKCKVCGKPFHSLSPFRIHERTHTGEKPYVCKHCGKAFVSSTSIRIHERTHTGEKPYECKQCGKAFSYLNSFRTHEMIHTGEKPFECKRCGKAFRSSSSFRLHERTHTGQKPYHCKECGKAYSCRASFQRHMLTHAEDGPPYKCMWESL

SEQ ID NO: 38111 - protein, 74 aa, Homo sapiens
MSKAEKNGVKIILPVDFVTAGKFDENTKTGQATVASGIPAGWLGLDCGPESSKKYAGAVTQAKQIVWNGPVGGF

SEQ ID NO: 38112 - protein, 331 aa, Homo sapiens
LDSAGPWTMSRALRPPLPPLCFFLLLLAAAGARAGGYETCPTVQPNMLNVHLLPHTHDDVGWLKTVDQYFYGIKNDIQHAGVQYILDSVISALLADPTRRFIYVEIAFFSRWWHQQTNATQEVVRDLVRQGRLEFANGGWVMNDEAATHYGAIVDQMTLGLRFLEDTFGNDGRPRVAWHIDPFGHSREQASLFAQMGFDGFFFGRLDYQDKWVRMQKLEMEQVWRASTSLKPPTADLFTGVLPNGYNPPRNLCWDVLCVDQPLVEDPRSPEYNAKELVDYFLNVATAQGRYYRTNHTVMTMGSDFQYENANMWFKNLDKLIRLVNAQVSET

SEQ ID NO: 38113 - protein, 57 aa, Homo sapiens
MPHPTEPPPCPRRRSRDYCCQRSWSKGGGGSASTSDPSLSAPIPAWSPAHPAASSTS

SEQ ID NO: 38114 - protein, 1019 aa, Homo sapiens
LDVEAAGPSPSRCEGGGSLRARSRGQRHGPPWDEGSSLGPMRIRRAPPPPPVARFHIPPPALPSPRLRGRGWRSWRGPRTWAGVDRRPPPVRRGRSRRHAATAASGAPPGSHTEPQRPSADPGPYLRSLPCAMDWQPDEQGLQQVLQLLKDSQSPNTATQRIVQDKLKQLNQFPDFNNYLIFVLTRLKSEDEPTRSLSGLILKNNVKAHYQSFPPPVADFIKQECLNNIGDASSLIRATIGILITTIASKGELQMWPELLPQLCNLLNSEDYNTCEGAFGALQKICEDSSELLDSDALNRPLNIMIPKFLQFFKHCSPKIRSHAIACVNQFIMDRAQALMDNIDTFIEHLFALAVDDDPEVRKNVCRALVMLLEVRIDRLIPHMHSIIQYMLQRTQDHDENVALEACEFWLTLAEQPICKEVLASHLVQLIPILVNGMKYSEIDIILLKGDVEEDEAVPDSEQDIKPRFHKSRTVTLPHEAERPDGSEDAEDDDDDDALSDWNLRKCSAAALDVLANVFREELLPHLLPLLKGLLFHPEWVVKESGILVLGAIAEGCMQGMVPYLPELIPHLIQCLSDKKALVRSIACWTLSRYAHWVVSQPPDMHLKPLMTELLKRILDGNKRVQEAACSAFATLEEEACTELVPYLSYILDTLVFAFGKYQHKNLLILYDAIGTLADSVGHHLNQPEYIQKLMPPLIQKWNELKDEDKDLFPLLECLSSVATALQSGFLPYCEPVYQRCVTLVQKTLAQAMMYTQHPEQYEAPDKDFMIVALDLLSGLAEGLGGHVEQLVARSNIMTLLFQCMQDSMPEVRQSSFALLGDLTKACFIHVKPCIAEFMPILGTNLNPEFISVCNNATWAIGEICMQMGAEMQPYVQMVLNNLVEIINRPNTPKTLLENTAITIGRLGYVCPQEVAPMLQQFIRPWCTSLRNIRDNEEKDSAFRGICMMIGVNPGGVVQDFIFFCDAVASWVSPKDDLRDMFYKILHGFKDQVGEDNWQQFSEQFPPLLKERLAAFYGV

SEQ ID NO: 38115 - protein, 170 aa, Homo sapiens
VRTAAHEWAVIGCLGLQTFHVPSPCASPQDLSSGLAVAYVLNQIDPSWFNEAWLQGISEDPGPNWKLKVTSGLLIRGQTGQQSEDGLTEPSRVLPGCPGASCVRRASPRCEPHWRVLRPGRARQAASAGAGLCHQLREKAGPHPENHDAGRIGSACGDGSHPRAHDQRHS

SEQ ID NO: 38116 - protein, 124 aa, Homo sapiens
LSSGLAVAYVLNQIDPSWFNEAWLQGISEDPGPNWKLKVTSGLLIRGQTGQQSEDGLTEPSRVLPGCPGASCVRRASPRCEPHWRVLRPGRARQAASAGAGLCHQLREKAGLPHLDPQTTSRES

SEQ ID NO: 38117 - protein, 205 aa, Homo sapiens
LPTQLSVMASGNARIGKPAPDFKATAVVDGAFKEVKLSDYKGKYVVLFFYPLDFTFVCPTEIIAFSNRAEDFRKLGCEVLGVSVDSQFTHLAWINTPRKEGGLGPLNIPLLADVTRRLSEDYGVLKTDEGIAYRGLFIIDGKGVLRQITVNDLPVGRSVDEALRLVQAFQYTDEHGEVCPAGWKPGSDTIKPNVDDSKEYFSKHN

SEQ ID NO: 38118 - protein, 149 aa, Homo sapiens
LPTQLSVMASGNARIGKPAPDFKATAVVDGAFKEVKLSDYKGKYVVLFFYPLDFTFVCPTEIIAFSNRAEDFRKLGCEVLGVSVDSQFTHLAWYEQGPKREVAAKLTPSGPSSVASWPLLNLWNLRFPIVKIMETLPPKSLRMMTVISI

SEQ ID NO: 38119 - protein, 66 aa, Homo sapiens
LPPPRPAMLLSVPLLLGLLGLAVAEPAVYFKEQFLDGGNAWSRLEAAPTTRPAPDPGSALSPVITV

SEQ ID NO: 38120 - protein, 212 aa, Homo sapiens
LPPPRPAMLLSVPLLLGLLGLAVAEPAVYFKEQFLDGDGWTSRWIESKHKSDFGKFVLSSGKFYGDEEKDKGLQTSQDARFYALSASFEPFSNKGQTLVVQFTVKHEQNIDCGGGYVKLFPNSLDQTDMHGDSEYNIMFGPDICGPGTKKVHVIFNYKGKNVLINKDIRCKVCLGVVANGCHGEIQRSASLGGGPRSPSSFFRMMSLHTCTH

SEQ ID NO: 38121 - protein, 424 aa, Homo sapiens
LPPPRPAMLLSVPLLLGLLGLAVAEPAVYFKEQFLDGDGWTSRWIESKHKSDFGKFVLSSGKFYGDEEKDKGLQTSQDARFYALSASFEPFSNKGQTLVVQFTVKHEQNIDCGGGYVKLFPNSLDQTDMHGDSEYNIMFGPDICGPGTKKVHVIFNYKGKNVLINKDIRCKDDEFTHLYTLIVRPDNTYEVKIDNSQVESGSLEDDWDFLPPKKIKDPDASKPEDWDERAKIDDPTDSKPEDWDKPEHIPDPDAKKPEDWDEEMDGEWEPPVIQNPEYKGEWKPRQIDNPDYKGTWIHPEIDNPEYSPDPSIYAYDNFGVLGLDLWQVKSGTIFDNFLITNDEAYAEEFGNETWGVTKAAEKQMKDKQDEEQRLKEEEEDKKRKEEEEAEDKEDDEDKDEDEEDEEDKEEDEEEDVPGQAKDEL

SEQ ID NO: 38122 - protein, 224 aa, Homo sapiens
VRIPGPPRRSGPAMAVTITLKTLQQQTFKIRMEPDETVKVLKEKIEAEKGRDAFPVAGQKLIYAGKILSDDVPIRDYRIDEKNFVVVMVTKTKAGQGTSAPPEASPTAAPESSTSFPPAPTSGMSHPPPAAREDKSPSEESAPTTSPESVSGSVPSSGSSGREEDAASTLVTGSEYETMLTEIMSMGYERERVVAALRASYNNPHRAVEYLLTVRWGFRLPGRP

SEQ ID NO: 38123 - protein, 250 aa, Homo sapiens
LPQSPLHPSRLPPPQACPIPHLPPERTRAHQRNPPPRRPQSLCQVTGSEYETMLTEIMSMGYERERVVAALRASYNNPHRAVEYLLTGIPGSPEPEHGSVQESQVSEQPATEAAGENPLEFLRDQPQFQNMRQVIQQNPALLPALLQQLGQENPQLLQQISRHQEQFIQMLNEPPGELADISDVEGEVGAIGEEAPQMNYIQVTPQEKEAIERLKALGFPESLVIQAYFACEKNENLAANFLLSQNFDDE

SEQ ID NO: 38124 - protein, 262 aa, Homo sapiens
LPQSPLHPSRLPPPQACPIPHLPPERTRAHQRNPPPRRPQSLCQGSSGREEDAASTLVTGSEYETMLTEIMSMGYERERVVAALRASYNNPHRAVEYLLTGIPGSPEPEHGSVQESQVSEQPATEAGENPLEFLRDQPQFQNMRQVIQQNPALLPALLQQLGQENPQLLQQISRHQEQFIQMLNEPPGELADISDVEGEVGAIGEEAPQMNYIQVTPQEKEAIERLKALGFPESLVIQAYFACEKNENLAANFLLSQNFDDE

SEQ ID NO: 38125 - protein, 460 aa, Homo sapiens
LPGLPSPRPAAALPPGRPAMYSPYCLTQDEFHPFIEALLPHVRAFSYTWFNLQARKRKYFKKHEKRMSKDEERAVKDELLGEKPEIKQKWASRLLAKLRKDIRPEFREDFVLTITGKKPPCCVLSNPDQKGKIRRIDCLRQADKVWRLDLVMVILFKGIPLESTDGERLYKSPQCSNPGLCVQPHHIGVTIKELDLYLAYFVHTPESGQSDSSNQQGDADIKPLPNGHLSFQDCFVTSGVWNVTELVRVSQTPVATASGPNFSLADLESPSYYNINQVTLGRRSITSPPSTSTTKRPKSIDDSEMESPVDDVFYPGTGRSPAAGSSQSSGWPNDVDAGPASLKKSGKLDFCSALSSQGSSPRMAFTHHPLPVLAGVRPGSPRATASALHFPSTSIIQQSSPYFTHPTIRYHHHHGQDSLKEFVQFVCSDGSGQATGQHSQRQAPPLPTGLSASDPGTATF

SEQ ID NO: 38126 - protein, 12 aa, Homo sapiens
MSLEDPFFVVRG

SEQ ID NO: 38127 - protein, 66 aa, Homo sapiens
MGPCKSSHRLHCQEEDPVPQHWASPRTSVGAKGAENPAMTRKIQSLTSSVPVPLPRSCLHRFNPEQ

SEQ ID NO: 38128 - protein, 519 aa, Homo sapiens
LVSSLGEMAESGLAMWPSLLLLLLLPGPPPVAGLEDAAFPHLGESLQPLPRACPLRCSCPRVDTVDCDGLDLRVFPDNITRAAQHLSLQNNQLQELPYNELSRLSGLRTLNLHNNLISSEGLPDEAFESLTQLQHLCVAHNKLSVAPQFLPRSLRVADLAANQVMEIFPLTFGEKPALRSVYLHNNQLSNAGLPPDAFRGSEAIATLSLSNNQLSYLPPSLPPSLERLHLQNNLISKVPRGALSRQTQLRELYLQHNQLTDSGLDATTFSKLHSLEYLDLSHNQLTTVPAGLPRTLAILHLGRNRIRQVEAARLHGARGLRYLLLQHNQLGSSGLPAGALRPLRGLHTLHLYGNGLDRVPPALPRRLRALVLPHNHVAALGARDLVATPGLTELNLAYNRLASARVHHRAFRRLRALRSLDLAGNQLTRLPMGLPTGLRTLQLQRNQLRMLEPEPLAGLDQLRELSLAHNRLRVGDIGPGTWHELQALQVRHRLVSHTVPRAPPSPCLPCHVPNILVSW

SEQ ID NO: 38129 - protein, 220 aa, Homo sapiens
LTLPPPQWPSLLLLLLLPGPPPVAGLEDAAFPHLGESLQPLPRACPLRCSCPRVDTVDCDGLDLRVFPDNITRAAQHLSLQNNQLQELPYNELSRLSGLRTLNLHNNLISSEALSGPSVSAPVPPCRGSGCQPSDGDLPPHLWGEAGTQVRVPPQQPAEQRWPAPRRLPRLRGHRHPQPLQQPAQLPAAQPAALTRAAPPAEQSHLQGAPRSPEPPDSTP

SEQ ID NO: 38130 - protein, 1565 aa, Homo sapiens
LVGGGAGPGEGRDTEAALVPPPPTRFPPAPAPGDVPGGGPGFAEPQERHAGPTPERRWTGWWSRPWCLPGDVGQSPPHRPLRAPDTHPAATMARLAAVLWNLCVTAVLVTSATQGLSRAGLPFGLMRRELACEGYPIELRCPGSDVIMVENANYGRTDDKICDADPFQMENVQCYLPDAFKIMSQRCNNRTQCVVVAGSDAFPDPCPGTYKYLEVQYDCVPYKVEQKVFVCPGTLQKVLEPTSTHESEHQSGAWCKDPLQAGDRIYVMPWIPYRTDTLTEYASWEDYVAARHTTTYRLPNRVDGTGFVVYDGAVFYNKERTRNIVKYDLRTRIKSGETVINTANYHDTSPYRWGGKTDIDLAVDENGLWVIYATEGNNGRLVVSQLNPYTLRFEGTWETGYDKRSASNAFMVCGVLYVLRSVYVDDDSEAAGNRVDYAFNTNANREEPVSLTFPNPYQFISSVDYNPRDNQLYVWNNYFVVRYSLEFGPPDPSAGPATSPPLSTTTTARPTPLTSTASPAATTPLRRAPLTTHPVGAINQLGPDLPPATAPVPSTRRPPAPNLHVSPELFCEPREVRRVQWPATQQGMLVERPCPKGTRGIASFQCLPALGLWNPRGPDLSNCTSPWVNQVAQKIKSGENAANIASELARHTRGSIYAGDVSSSVKLMEQLLDILDAQLQALRPIERESAGKNYNKMHKRERTCKDYIKAVVETVDNLLRPEALESWKDMNATEQVHTATMLLDVLEEGAFLLADNVREPARFLAAKENVVLEVTVLNTEGQVQELVFPQEEYPRKNSIQLSAKTIKQNSRNGVVKVVFILYNNLGLFLSTENATVKLAGEAGPGGPGGASLVVNSQVIAASINKESSRVFLMDPVIFTVAHLEDKNHFNANCSFWNYSERSMLGYWSTQGCRLVESNKTHTTCACSHLTNFAVLMAHREIYQGRINELLLSVITWVGIVISLVCLAICISTFCFLRGLQTDRNTIHKNLCINLFLAELLFLVGIDKTQYEIACPIFAGLLHYFFLAAFSWLCLEGVHLYLLLVEVFESEYSRTKYYYLGGYCFPALVVGIAAAIDYRSYGTEKACWLRVDNYFIWSFIGPVSFVIVVNLVFLMVTLHKMIRSSSVLKPDSSRLDNIKSWALGAIALLFLLGLTWAFGLLFINKESVVMAYLFTTFNAFQGVFIFVFHCALQKKVHKEYSKCLRHSYCCIRSPPGGTHGSLKTSAMRSNTRYYTGTQSRIRRMWNDTVRKQTESSFMAGDINSTPTLNRGTMGNHLLTNPVLQPRGGTSPYNTLIAESVGFNPSSPPVFNSPGSYREPKHPLGGREACGMDTLPLNGNFNNSYSLRSGDFPPGDGGPEPPRGRNLADAAAFEKMIISELVHNNLRGSSSAAKGPPPPEPPVPPVPGGGGEEEAGGPGGADRAEIELLYKALEEPLLLPRAQSVLYQSDLDESESCTAEDGATSRPLSSPPGRDSLYASGANLRDSPSYPDSSPEGPSEALPPPPPAPPGPPEIYYTSRPPALVARNPLQGYYQVRRPSHEGYLAAPGLEGPGPDGDGQMQLVTSL

SEQ ID NO: 38131 - protein, 1560 aa, Homo sapiens
LVGGGAGPGEGRDTEAALVPPPPTRFPPAPAPGDVPGGGPGFAEPQERHAGPTPERRWTGWWSRPWCLPGDVGQSPPHRPLRAPDTHPAATMARLAAVLWNLCVTAVLVTSATQGLSRAGLPFGLMRRELACEGYPIELRCPGSDVIMVENANYGRTDDKICDADPFQMENVQCYLPDAFKIMSQRCNNRTQCVVVAGSDAFPDPCPGTYKYLEVQYDCVPYIFVCPGTLQKVLEPTSTHESEHQSGAWCKDPLQAGDRIYVMPWIPYRTDTLTEYASWEDYVAARHTTTYRLPNRVDGTGFVVYDGAVFYNKERTRNIVKYDLRTRIKSGETVINTANYHDTSPYRWGGKTDIDLAVDENGLWVIYATEGNNGRLVVSQLNPYTLRFEGTWETGYDKRSASNAFMVCGVLYVLRSVYVDDDSEAAGNRVDYAFNTNANREEPVSLTFPNPYQFISSVDYNPRDNQLYVWNNYFVVRYSLEFGPPDPSAGPATSPPLSTTTTARPTPLTSTASPAATTPLRRAPLTTHPVGAINQLGPDLPPATAPVPSTRRPPAPNLHVSPELFCEPREVRRVQWPATQQGMLVERPCPKGTRGIASFQCLPALGLWNPRGPDLSNCTSPWVNQVAQKIKSGENAANIASELARHTRGSIYAGDVSSSVKLMEQLLDILDAQLQALRPIERESAGKNYNKMHKRERTCKDYIKAVVETVDNLLRPEALESWKDMNATEQVHTATMLLDVLEEGAFLLADNVREPARFLAAKENVVLEVTVLNTEGQVQELVFPQEEYPRKNSIQLSAKTIKQNSRNGVVKVVFILYNNLGLFLSTENATVKLAGEAGPGGPGGASLVVNSQVIAASINKESSRVFLMDPVIFTVAHLEDKNHFNANCSFWNYSERSMLGYWSTQGCRLVESNKTHTTCACSHLTNFAVLMAHREIYQGRINELLLSVITWVGIVISLVCLAICISTFCFLRGLQTDRNTIHKNLCINLFLAELLFLVGIDKTQYEIACPIFAGLLHYFFLAAFSWLCLEGVHLYLLLVEVFESEYSRTKYYYLGGYCFPALVVGIAAAIDYRSYGTEKACWLRVDNYFIWSFIGPVSFVIVVNLVFLMVTLHKMIRSSSVLKPDSSRLDNIKSWALGAIALLFLLGLTWAFGLLFINKESVVMAYLFTTFNAFQGVFIFVFHCALQKKVHKEYSKCLRHSYCCIRSPPGGTHGSLKTSAMRSNTRYYTGTQSRIRRMWNDTVRKQTESSFMAGDINSTPTLNRGTMGNHLLTNPVLQPRGGTSPYNTLIAESVGFNPSSPPVFNSPGSYREPKHPLGGREACGMDTLPLNGNFNNSYSLRSGDFPPGDGGPEPPRGRNLADAAAFEKMIISELVHNNLRGSSSAAKGPPPPEPPVPPVPGGGGEEEAGGPGGADRAEIELLYKALEEPLLLPRAQSVLYQSDLDESESCTAEDGATSRPLSSPPGRDSLYASGANLRDSPSYPDSSPEGPSEALPPPPPAPPGPPEIYYTSRPPALVARNPLQGYYQVRRPSHEGYLAAPGLEGPGPDGDGQMQLVTSL

SEQ ID NO: 38132 - protein, 58 aa, Homo sapiens [sequence omitted]

SEQ ID NO: 38133 - protein, 851 aa, Homo sapiens
LSHSLFPLPLLPAAPTMGGRVFLAFCVWLTLPGAETQDSRGCARWCPQNSSCVNATACRCNPGFSSFSEIITTPTETCDDINECATPSKVSCGKFSDCWNTEGSYDCVCSPGYEPVSGAKTFKNESENTCQDVDECQQNPRLCKSYGTCVNTLGSYTCQCLPGFKFIPEDPKVCTDVNECTSGQNPCHSSTHCLNNVGSYQCRCRPGWQPIPGSPNGPNNTVCEDVDECSSGQHQCDSSTVCFNTVGSYSCRCRPGWKPRHGIPNNQKDTVCEDMTFSTWTPPPGVHSQTLSRFFDKVQDLGRDSKTSSAEVTIQNVIKLVDELMEAPGDVEALAPPVRHLIATQLLSNLEDIMRILAKSLPKGPFTYISPSNTELTLMIQERGDKNVTMGQSSARMKLNWAVAAGAEDPGPAVAGILSIQNMTTLLANASLNLHSKKQAELEEIYESSIRGVQLRRLSAVNSIFLSHNNTKELNSPILFAFSHLESSDGEAGRDPPAKDVMPGPRQELLCAFWKSDSDRGGHWATEGCQVLGSKNGSTTCQCSHLSSFAILMAHYDVEDWKLTLITRVGLALSLFCLLLCILTFLLVRPIQGSRTTIHLHLCICLFVGSTIFLAGIENEGGQVGLRCRLVAGLLHYCFLAAFCWMSLEGLELYFLVVRVFQGQGLSTRWLCLIGYGVPLLIVGVSAAIYSKGYGRPRYCWLDFEQGFLWSFLGPVTFIILCNAVIFVTTVWKLTQKFSEINPDMKKLKKARALTITAIAQLFLLGCTWVFGLFIFDDRSLVLTYVFTILNCLQGAFLYLLHCLLNKKVREEYRKWACLVAGGSKYSEFTSTTSGTGHNQTRALRASESGI

SEQ ID NO: 38134 - protein, 141 aa, Homo sapiens
VMPGPRQELLCAFWKSDSDRGGHWATEGCQVLGSKNGSTTCQCSHLSSFAILMAHYDVEVSSWRHPQVPTGNEVQLQPDRQLVLHGALLVAQIYLHGCTAQVSPRHTLRSLFLWPLLYNPATIHWVQPLAPLLCLSIPYQL

SEQ ID NO: 38135 - protein, 194 aa, Homo sapiens
LPAPPTSLPTQPMEVFVDDETKLTLHGLQQYYVKLKDSEKNRKLFDLLDVLEFNQVIIFVKSVQRCMALAQLLVEQNFPAIAIHRGMAQEERLSRYQQFKDFQRRILVATNLFGRGMDIERVNIVFNYDMPEDSDTYLHRVARAGRFGTKGLAITFVSDENDAKILNDVQDRFEVNVAELPEEIDISTYIEQSR

SEQ ID NO: 38136 - protein, 92 aa, Homo sapiens
LPAPPTSLPTQPMEVFVDDETKLTLHGLQQYYVKLKDSEKNRKLFDLLDVLEFNQVIIFVKSVQRCMALAQLLVEQNFPAIAIHRGMAQEER

SEQ ID NO: 38137 - protein, 316 aa, Homo sapiens
MAEQDVENDLLDYDEEEEPQAPQESTPAPPKKDIKGSYVSIHSSGFRDFLLKPELLRAIVDCGFEHPSEVQHECIPQAILGMDVLCQAKSGMGKTAVFVLATLQQIEPVNGQVTVLVMCHTRELAFQISKEYERFSKYMPSVKVSVFFGGLSIKKDEEVLKKNCPHVVVGTPGRILALVRNRSFSLKNVKHFVLDECDKMLEQLDMRRDVQEIFRLTPHEKQCMMFSATLSKDIRPVCRKFMQDVSRARVAALAFPRGLEPGAPGHPHGPHGTEDAGMLGAGGASFPPLGLVKLGVKLGPHLSRARAYIQLLSDVY

SEQ ID NO: 38138 - protein, 83 aa, Homo sapiens
MAEQDVENDLLDYDEEEEPQAPQESTPAPPKKDIKGSYVSIHSSGFRDFLLKPELLRAIVDCGFEHPSEALQVSVALSGLGLF

SEQ ID NO: 38139 - protein, 159 aa, Homo sapiens
LLPSCLRRPRRPQAPPCAGDTTPWPPVHHPCPLSLFSPVASLHSPLRKSPLTLEDFKFLAVLGRGHFGKVLLSEFRPSGELFAIKALKKGDIVARDEVESLMCEKRILAAVTSAGHPFLVNLFGCFQTPEHVCFVMEYSAGGDLMLHIHSDVFSEPRAM

SEQ ID NO: 38140 - protein, 264 aa, Homo sapiens
LRRAEPGAHGEAEAAAAAAAAAAAAEQVMFCTLNTHKVDMDKLLGGQIGLEDFIFAHVKGQRKEVEVFKSEDALGLTITDNGAGYAFIKRIKEGSVIDHIHLISVGDMIEAINGQSLLGCRHYEVARLLKELPRGRTFTLKLTEPRKAFDMISQRSAGGRPGSGPQLGTGRGTLRLRSRGPATVEDLPSAFEEKAIEKVDDLLESYMGIRDTELAATMVELGKDKRNPDELAEALDERLGDFAFPDEFVFDVWGAIGDAKVGRY

SEQ ID NO: 38141 - protein, 360 aa, Homo sapiens
LVGGGAGGRRQRVGGPQEGVMGKDYYQTLGLARGASDEEIKRAYRRQALRYHPDKNKEPGAEEKFKEIAEAYDVLSDPRKREIFDRYGEEGLKGSGPSGGSGGGANGTSFSYTFHGDPHAMFAEFFGGRNPFDTFFGQRNGEEGMDIDDPFSGFPMGMGGFTNVNFGRSRSAQEPARKKQDPPVTHDLRVSLEEIYSGCTKKMKISHKRLNPDGKSIRNEDKILTIEVKKGWKEGTKITFPKEGDQTSNNIPADIVFVLKDKPHNIFKRDGSDVIYPARISLREALCGCTVNVPTLDGRTIPVVFKDVIRPGMRRKVPGEGLPLPKTPEKRGDLIIEFEVIFPERIPQTSRTVLEQVLPI

SEQ ID NO: 38142 - protein, 23 aa, Homo sapiens
MKHYEVEILDAKTREKLCFLDKS

SEQ ID NO: 38143 - protein, 248 aa, Homo sapiens
MKHYEVEILDAKTREKLCFLDKVEPHATIAEIKNLFTKTHPQWYPARQSLRLDPKGKSLKDEDVLQKLPVGTTATLYFRDLGAQISWVTVFLTEYAGPLFIYLLFYFRVPFIYGHKYDFTSSRHTVVHLACICHSFHYIKRLLETLFVHRFSHGTMPLRNIFKNCTYYWGFAAWMAYYINHPLYTPPSKWPQTILPSPTVPTQRVLPSWAPLPASSSAYGAQQVKLALAIFVVRRLGVGTGSGESGRP

SEQ ID NO: 38144 - protein, 323 aa, Homo sapiens
MILQETKAACGIPAIPHCSRVEILDAKTREKLCFLDKVEPHATIAEIKNLFTKTHPQWYPARQSLRLDPKGKSLKDEDVLQKLPVGTTATLYFRDLGAQISWVTVFLTEYAGPLFIYLLFYFRVPFIYGHKYDFTSSRHTVVHLACICHSFHYIKRLLETLFVHRFSHGTMPLRNIFKNCTYYWGFAAWMAYYINHPLYTPPTYGAQQVKLALAIFVICQLGNFSIHMALRDLRPAGSKTRKIPYPTKNPFTWLFLLVSCPNYTYEVGSWIGFAIMTQCLPVALFSLVGFTQMTIWAKGKHRSYLKEFRDYPPLRMPIIPFLL

SEQ ID NO: 38145 - protein, 66 aa, Homo sapiens
LAWDTRTTEMQGPLLLPGLCFLLSLFGAVTQKTKSECSEPEQRTCGPRAGPGATHGLQWAGEKCLF

SEQ ID NO: 38146 - protein, 792 aa, Homo sapiens
LPSLRRRDSPVPLTLSPAAPAGSSAGTMGGRVFLVFLAFCVWLTLPGAETQDSRGCARWCPQDSSCVNATACRCNPGFSSFSEIITTPMETCDDINECATLSKVSCGKFSDCWNTEGSYDCVCSPGYEPVSGAKTFKNESENTCQDVDECQQNPRLCKSYGTCVNTLGSYTCQCLPGFKLKPEDPKLCTDVNECTSGQNPCHSSTHCLNNVGSYQCRCRPGWQPIPGSPNGPNNTVCEDVDECSSGQHQCDSSTVCFNTVGSYSCRCRPGWKPRHGIPNNQKDTVCEDMTFSTWTPPPGVHSQTLSRFFDKVQDLGRDYKPGLANNTIQSILQALDELLEAPGDLETLPRLQQHCVASHLLDGLEDVLRGLSKNLSNGLLNFSYPAGTELSLEVQKQVDRSVTLRQNQAVMQLDWNQAQKSGDPGPSVVGLVSIPGMGKLLAEAPLVLEPEKQMLLHETHQGLLQDGSPILLSDVISAFLSNNDTQNLSSPVTFTFSHREEDPVLTVITYMGLSVSLLCLLLAALTFLLCKAIQNTSTSLHLQLSLCLFLAHLLFLVAIDQTGHKVLCSIIAGTLHYLYLATLTWMLLEALYLFLTARNLTVVNYSSINRFMKKLMFPVGYGVPAVTVAISAASRPHLYGTPSRCWLQPEKGFIWGFLGPVCAIFSVNLVLFLVTLWILKNRLSSLNSEVSTLRNTRMLAFKATAQLFILGCTWCLGILQVGPAARVMAYLFTIINSLQGVFIFLVYCLLSQQVREQYGKWSKGIRKLKTESEMHTLSSSAKADTSKPSTVN

SEQ ID NO: 38147 - protein, 880 aa, Homo sapiens
LHRQFRGGPWASGCPPPLLYKVLASGQPAQLPSLRRRDSPVPLTLSPAAPAGSSAGTMGGRVFLVFLAFCVWLTLPGAETQDSRGCARWCPQDSSCVNATACRCNPGFSSFSEIITTPMETCDDINECATLSKVSCGKFSDCWNTEGSYDCVCSPGYEPVSGAKTFKNESENTCQDVDECQQNPRLCKSYGTCVNTLGSYTCQCLPGFKLKPEDPKLCTDVNECTSGQNPCHSSTHCLNNVGSYQCRCRPGWQPIPGSPNGPNNTVCEDVDECSSGQHQCDSSTVCFNTVGSYSCRCRPGWKPRHGIPNNQKDTVCEDMTFSTWTPPPGVHSQTLSRFFDKVQDLGRDYKPGLANNTIQSILQALDELLEAPGDLETLPRLQQHCVASHLLDGLEDVLRGLSKNLSNGLLNFSYPAGTELSLEVQKQVDRSVTLRQNQAVMQLDWNQAQKSGDPGPSVVGLVSIPGMGKLLAEAPLVLEPEKQMLLHETHQGLLQDGSPILLSDVISAFLSNNDTQNLSSPVTFTFSHRSVIPRQKVLCVFWEHGQNGCGHWATTGCSTIGTRDTSTICRCTHLSSFAVLMAHYDVQEEDPVLTVITYMGLSVSLLCLLLAALTFLLCKAIQNTSTSLHLQLSLCLFLAHLLFLVAIDQTGHKVLCSIIAGTLHYLYLATLTWMLLEALYLFLTARNLTVVNYSSINRFMKKLMFPVGYGVPAVTVAISAASRPHLYGTPSRCWLQPEKGFIWGFLGPVCAIFSVNLVLFLVTLWILKNRLSSLNSEVSTLRNTRMLAFKATAQLFILGCTWCLGILQVGPAARVMAYLFTIINSLQGVFIFLVYCLLSQQVREQYGKWSKGIRKLKTESEMHTLSSSAKADTSKPSTVN

SEQ ID NO: 38148 - protein, 858 aa, Homo sapiens
LPSLRRRDSPVPLTLSPAAPAGSSAGTMGGRVFLVFLAFCVWLTLPGAETQDSRGCARWCPQDSSCVNATACRCNPGFSSFSEIITTPMETCDDINECATLSKVSCGKFSDCWNTEGSYDCVCSPGYEPVSGAKTFKNESENTCQDVDECQQNPRLCKSYGTCVNTLGSYTCQCLPGFKLKPEDPKLCTDVNECTSGQNPCHSSTHCLNNVGSYQCRCRPGWQPIPGSPNGPNNTVCEDVDECSSGQHQCDSSTVCFNTVGSYSCRCRPGWKPRHGIPNNQKDTVCEDMTFSTWTPPPGVHSQTLSRFFDKVQDLGRDYKPGLANNTIQSILQALDELLEAPGDLETLPRLQQHCVASHLLDGLEDVLRGLSKNLSNGLLNFSYPAGTELSLEVQKQVDRSVTLRQNQAVMQLDWNQAQKSGDPGMGKLLAEAPLVLEPEKQMLLHETHQGLLQDGSPILLSDVISAFLSNNDTQNLSSPVTFTFSHRSVIPRQKVLCVFWEHGQNGCGHWATTGCSTIGTRDTSTICRCTHLSSFAVLMAHYDVQEEDPVLTVITYMGLSVSLLCLLLAALTFLLCKAIQNTSTSLHLQLSLCLFLAHLLFLVAIDQTGHKVLCSIIAGTLHYLYLATLTWMLLEALYLFLTARNLTVVNYSSINRFMKKLMFPVGYGVPAVTVAISAASRPHLYGTPSRCWLQPEKGFIWGFLGPVCAIFSVNLVLFLVTLWILKNRLSSLNSEVSTLRNTRMLAFKATAQLFILGCTWCLGILQVGPAARVMAYLFTIINSLQGVFIFLVYCLLSQQVREQYGKWSKGIRKLKTESEMHTLSSSAKADTSKPSTPGTVVQACNASTLGGQSRKIT

SEQ ID NO: 38149 - protein, 406 aa, Homo sapiens
LPSLRRRDSPVPLTLSPAAPAGSSAGTMGGRVFLVFLAFCVWLTLPGAETQDSRGCARWCPQDSSCVNATACRCNPGFSSFSEIITTPMETCDDINECATLSKVSCGKFSDCWNTEGSYDCVCSPGYEPVSGAKTFKNESENTCQDVDECQQNPRLCKSYGTCVNTLGSYTCQCLPGFKLKPEDPKLCTDVDECSSGQHQCDSSTVCFNTVGSYSCRCRPGWKPRHGIPNNQKDTVCEDMTFSTWTPPPGVHSQTLSRFFDKVQDLGRDYKPGLANNTIQSILQALDELLEAPGDLETLPRLQQHCVASHLLDGLEDVLRGLSKNLSNGLLNFSYPAGTELSLEVQKQVDRSVTLRQNQAVMQLDWNQAQKSGDPGGGSRADCHHLHGAERLSAVPPPGGPHFSPV

SEQ ID NO: 38150 - protein, 296 aa, Homo sapiens
LHRQFRGGPWASGCPPPLLYKVLASGQPAQLPSLRRRDSPVPLTLSPAAPAGSSAGTMGGRVFLVFLAFCVWLTLPGAETQDSRGCARWCPQDSSCVNATACRCNPGFSSFSEIITTPMETCDDINECATLSKVSCGKFSDCWNTEGSYDCVCSPGYEPVSGAKTFKNESENTCQDVDECQQNPRLCKSYGTCVNTLGSYTCQCLPGFKLKPEDPKLCTDVNECTSGQNPCHSSTHCLNNVGSYQCRCRPGWQPIPGSPNGPNNTVCEGRELRSHVPRDPQTSDHMFNGAHTNQAE

SEQ ID NO: 38151 - protein, 156 aa, Homo sapiens
LPSLRRRDSPVPLTLSPAAPAGSSAGTMGGRVFLVFLAFCVWLTLPGAETQDSRGCARWCPQDSSCVNATACRCNPGFSSFSEIITTPMETCDDINECATLSKVSCGKFSDCWNTEGSYDCVCSPGYEPVSGAKTFKNESENTCQAHHGPRHPVQK

SEQ ID NO: 38152 - protein, 150 aa, Homo sapiens
MGGRVFLVFLAFCVWLTLPGAETQDSRGCARWCPQDSSCVNATACRCNPGFSSFSEIITTPMETCDDINECATLSKVSCGKFSDCWNTEGSYDCVCSPGYEPVSGAKTFKNESENTCQGKNHPTSSITTVHEVWGHQSCFCSIQGAGTQV

SEQ ID NO: 38153 - protein, 51 aa, Homo sapiens
LGAVWYGTYLLPPCMCVCVCEDWCAWTRLKQACGALSGTTEEGAVCSAQPP

SEQ ID NO: 38154 - protein, 47 aa, Homo sapiens
LLLVLLGAFGTLGVGAGFALGAKLCRPDAEVRHWSWETCCSLGPDPP

SEQ ID NO: 38155 - protein, 25 aa, Homo sapiens
LLNSILFLILSSPPDTMALLISEMV

SEQ ID NO: 38156 - protein, 30 aa, Homo sapiens
LGLWTLTTSLLNLAVTSVQESSRSVCGRTL

SEQ ID NO: 38157 - protein, 103 aa, Homo sapiens
LAAAAAAAAAAGLFVLVSRSRGAEAVAAAAAAAAAGGARGRARPVSSAERRAGPGAAQAARGGGGGSGRTAGGGGVRPSVSECLVKNVMGSLACLRRAALGRD

SEQ ID NO: 38158 - protein, 304 aa, Homo sapiens
LPQPPQSPPRTPRPPRQRPAMEAIKKKMQMLKLDKENAIDRAEQAEADKKAAEDKCKQVEEELTHLQKKLKGTEDELDKYSEDLKDAQEKLELTEKKASDAEGDVAALNRRIQLVEEELDRAQERLATALQKLEEAEKAADESERGMKVIENRAMKDEEKMEIQEMQLKEAKHIAEEADRKYEEVARKLVILEGELERAEERAEVSELKCGDLEEELKNVTNNLKSLEAASEKYSEKEDKYEEEIKLLSDKLKEAETRAEFAERTVAKLEKTIDDLEEKLAQAKEENVGLHQTLDQTLNELNCI

SEQ ID NO: 38159 - protein, 325 aa, Homo sapiens
LWPAVPTSGPPPAVLTSAVRPGDLIAPTAAGPGGGERRGRPPRRQRLGGPGRGCAALAGAEPSRASAAARAPLRLRAMAGLNSLEAVKRKIQALQQQADEAEDRAQGLQRELDGERERREKAEGDVAALNRRIQLVEEELDRAQERLATALQKLEEAEKAADESERGMKVIENRAMKDEEKMEIQEMQLKEAKHIAEEADRKYEEVARKLVILEGELERAEERAEVSELKCGDLEEELKNVTNNLKSLEAASEKYSEKEDKYEEEIKLLSDKLKEAETRAEFAERTVAKLEKTIDDLEEKLAQAKEENVGLHQTLDQTLNELNCI

SEQ ID NO: 38160 - protein, 157 aa, Homo sapiens
LRLRAMAGLNSLEAVKRKIQALQQQADEAEDRAQGLQRELDGERERREKAEGDVAALNRRIQLVEEELDRAQERLATALQKLEEAEKAADESERGMKVIENRAMKDEEKMEIQEMQLKEAKHIAEEADRKYEEVARKLVILEGELERAEERAEVSEL

SEQ ID NO: 38161 - protein, 239 aa, Homo sapiens
LEPIRGGLGADGRCWWPVERRWPHFPSGRECNMAKTYDYLFKLLLIGDSGVGKTCVLFRFSEDAFNSTFISTIGIDFKIRTIELDGKRIKLQIWDTAGQERFRTITTAYYRGAMGIMLVYDITNEKSFDNIRNWIRNIEEHASADVEKMILGNKCDVNDKRQVSKERGEKLALDYGIKFMETSAKANINVENAFFTLARDIKAKMDKKLEGNSPQGSNQGVKITPDQQKRSSFFRCVLL

SEQ ID NO: 38162 - protein, 33 aa, Homo sapiens
VFLELVFVHSLLFVLPSLSPCPTHVLRHSGSTW

SEQ ID NO: 38163 - protein, 36 aa, Homo sapiens
LHLLKKITALVWLLGTGALGHLGGGGSGEFDGGQPH

SEQ ID NO: 38164 - protein, 14 aa, Homo sapiens
LRSEAGFSFLLSLV

SEQ ID NO: 38165 - protein, 207 aa, Homo sapiens
VTVSLCHILALCAGLPPLLRAWRVPPAPPVSGPGPSPHPSSGPLLPPRFYPRYVLPLAFGKYFASVSAHVSIWKVPVSYAHTVKATMPIWVVLLSRIIMKEKQSTKVYLSLIPIISGVLLATVTELSFDMWGLVSALAATLCFSLQNIFSKKVLRDSRIHHLRLLNILGCHAVFFMIPTWVLVDLSAFLVSSDLVSCTAPRTRHFLG

SEQ ID NO: 38166 - protein, 59 aa, Homo sapiens
LLFGTLLMNAGAVLNFKLKKKDTQGFGEESREPSTDPEHGGGAGSHLQPGEIPYYQRGT

SEQ ID NO: 38167 - protein, 28 aa, Homo sapiens
LLWVSSPCVFSVFSSTFLCAVCTHTIKG

SEQ ID NO: 38168 - protein, 23 aa, Homo sapiens
MIGDILLFGTLLMNAGAVLNFKL

SEQ ID NO: 38169 - protein, 1526 aa, Homo sapiens
LLIWMQRGKPCRALPTLKCQTFCQRHGLMFEVVDLRWGIRNIEATDHLTTELCLEEVDRCWKTSIGPAFVALIGDQYGPCLIPSRIDEKEWEVLRDHLTARPSDLELVARYFQRDENAFPPTYVLQAPGTGEACEPEEATLTSVLRSGAQEARRLGLITQEQWQHYHRSVIEWEIERSLLSSEDREQGATVFLREIQDLHKHILEDCALRMVDRLADGCLDADAQNLLSSLKSHITDMHPGVLKTHRLPWSRDLVNPKNKTHACYLKELGEQFVVRANHQVLTRLRELDTAGQELAWLYQEIRHHLWQSSEVIQTFCGRQELLARLGQQLRHDDSKQHTPLVLFGPPGIGKTALMCKLAEQMPRLLGHKTVTVLRLLGTSQMSSDARGLLKSICFQVCLAYGLPLPPAQVLDAHTRVVQFFHTLLHTVSCRNFESLVLLLDAMDDLDSVRHARRVPWLPLNCPPRVHLILSACSGALGVLDTLQRVLLDPEAYWEVKPLSGNQGQQMIQLLLAAARRTLSPVHTDLLWASLPECGNPGRLRLAFEEARKWASFTVPVPLATTAEEATHQLCTRLEQTHGQLLVAHVLGYIVSSRHGLSEAELKDVLSLDDEVLQDVYRDWTPPSKELLRFPPLLWVRLRRDLGYYLARRPVDGFTLLAIAHRQLVEVVRERYLSGSERAKRHGVLADFFSGTWSQGTKKLITLPLVGKPLNLDRKVAPQPLWFSHTVANLRKLKELPYHLLHSGRLEELKQEVLGSMSWISCRGISGGIEDLLDDFDLCAPHLDSPEVGLVREALQLCRPAVELRGMERSLLYTELLARLHFFATSHPALVGQLCQQAQSWFQLCAHPVLVPLGGFLQPPGGPLRATLSGCHKGITAMAWGVEEKLLVIGTQDGIMAVWDMEEQHVIHMLTGHTGEVRCVKIFAKGTLANSASKDYTLHLWNLLSGQEKFTIWDGGSKNPAEPQIWNLHVDEAHKVVYSASGSKINAWNLETAEPVFHILGDASDPWMCMAVLASQATLLTVSRDGVVSLWSSATGKLQGKQHMSSIKEETPTCAVSVQKQGKLVTGFSNGSISLVSSKGDRLLEKLPDAVRFLVVSEDESLLAAGFGRSVRIFLADSRGFRRFMAMDLEHEDMVETAVFGTENNLIITGSLDALIQVWDLSDAHRSRVPAPFLDRTGLTAVSHNGSYVYFPKIGDKNKVTIWDLAEGEEQDSLDTSSEIRCLEVAEQRKLLFTGLVSGVVLVFPLNSRQDVICIPPPEARKAINCMSLSKCEDRLAIAYDNIVLVLDITSGDPCPVIDGPRYTFYTQLPETLSSVAILTDYRVVYSMTNGDLFLYECATSKAFPLETHRSRVACVEVSHKEQLVVSGSEDALLCLWDLQARKWKFEMSYTSSYCRGVQCACFSKDDKYVYVGLKDRSILVWSVLDGTLLTVQFVHAVVNRIIPTTSGFIAPTRHGYLIRENFQCLSAKASPQDPLKNFKKAMWMVKSRQREELVAAAGAPQDLESESAQGNETKSNKCSQVCLIV

SEQ ID NO: 38170 - protein, 143 aa, Homo sapiens
MWRGLWTLAAQAARGPRSRRTPPPGASRDHRALGLLDTEAEPPRCADSPPLRFQIVHAPEQRRTSPRLRRHHLRAKLWPRPLRHRSDPDQRPRQRPRPPNSHSTPRPAPCSPRQPAPAQRSPLRGASGPRTGALVPRSPEFHR

SEQ ID NO: 38171 - protein, 49 aa, Homo sapiens
MSRLSLSWESLTNAIWPLDLQDIKGYLPNPLPQRVNLRKQILSISKEPN

SEQ ID NO: 38172 - protein, 123 aa, Homo sapiens
MDPVPGTDSAPLAGLAWSSASAPPPRGFSAISCTVEGAPASFGKSFAQKSGYFLCLSSLGSLENPQENVVADIQIVVDKSPLPLGFSPVCDPMDSSKGCFGGESCPGPLQGGAGEEGRRARGI

SEQ ID NO: 38173 - protein, 321 aa, Homo sapiens
LRTLGFPPTPLPSKTTSIPQLFPRPAGTPAMARSYGGRVLAAMTLLGIAAAVLAALGAQLLFQLQAGRAELRGLRAEGLGQELGAGPGLPEDAAGTLLPLAAALAALVLVLGFTCLLLAALCGHLGAELARGPGPRRSDWFLYDCRLLRHVALGLFCCGISVYLAALSIYALLLFEIETGAAAASILGSGTLVLVAVLTHTLLRAARAARRGLHELSPPSFEDDLARPAEVSKASPRAQPQQGIHRRTPYSTCPEPGDPFGSMATATAPAALEGGWESSLPASRMHRTLSAGLGHWDGVTHEMRRMLGHRPGSMGKDSTLV

SEQ ID NO: 38174 - protein, 83 aa, Homo sapiens
LRTSGPPLDPLAGHRGLSCGVVSSQLLLSNHVHTGSINGVPTACQQQGLALGNWEEPSPLHLFMCPAFIKHLLYARFPCYGSE

SEQ ID NO: 38175 - protein, 1100 aa, Homo sapiens
VVDKKGRGCGGSGRGLQPFRCGPFKRRGLRGGRRERRGGPKMAAVAGSGAAAAPSSLLLVVGSEFGSPGLLTYVLEELERGIRSWDVDPGVCNLDEQLKVFVSRHSATFSSIVKGQRSLHHRGDNLETLVLLNPSDKSLYDELRNLLLDPASHKLLVLAGPCLEETGELLLQTGGFSPHHFLQVLKDREIRDILATTPPPVQPPILTITCPTFGDWAQLAPAVPGLQGALRLQLRLNPPAQLPNSEGLCEFLEYVAESLEPPSPFELLEPPTSGGFLRLGRPCCYIFPGGLGDAAFFAVNGFTVLVNGGSNPKSSFWKLVRHLDRVDAVLVTHPGADSLPGLNSLLRRKLAERSEVAAGGGSWDDRLRRLISPNLGVVFFNACEAASRLARGEDEAELALSLLAQLGITPLPLSRGPVPAKPTVLFEKMGVGRLDMYVLHPPSAGAERTLASVCALLVWHPAGPGEKVVRVLFPGCTPPACLLDGLVRLQHLRFLREPVVTPQDLEGPGRAESKESVGSRDSSKREGLLATHPRPGQERPGVARKEPARAEAPRKTEKEAKTPRELKKDPKPSVSRTQPREVRRAASSVPNLKKTNAQAAPKPRKAPSTSHSGFPPVANGPRSPPSLRCGEASPPSAACGSPASQLVATPSLELGPIPAGEEKALELPLAASSIPRPRTPSPESHRSPAEGSERLSLSPLRGGEAGPDASPTVTTPTVTTPSLPAEVGSPHSTEVDESLSVSFEQVLPPSAPTSEAGLSLPLRGPRARRSASPHDVDLCLVSPCEFEHRKAVPMAPAPASPGSSNDSSARSQERAGGLGAEETPPTSVSESLPTLSDSDPVPLAPGAADSDEDTEGFGVPRHDPLPDPLKVPPPLPDPSSICMVDPEMLPPKTARQTENVSRTRKPLARPNSRAAAPKATPVAAAKTKGLAGGDRASRPLSARSEPSEKGGRAPLSRKSSTPKTATRGPSGSASSRPGVSATPPKSPVYLDLAYLPSGSSAHLVDEEFFQRVRALCYVISGQDQRKEEGMRAVLDALLASKQHWDRDLQVTLIPTFDSVAMHTWYAETHARHQALGITVLGSNSMVSMQDDAFPACKVEF

SEQ ID NO: 38176 - protein, 179 aa, Homo sapiens
MAAVAGSGAAAAPSSLLLVVGSEFGSPGLLTYVLEELERGIRSWDVDPGVCNLDEQLKVFVSRHSATFSSIVKGQRSLHHRGDNLETLVLLNPSDKSLYDECSPPPSAPEPSVGPCLSQATGVGWALPGGDGGAAATDRGLLASPLPPGPEGQRDPGHPGHHAPTCAAAHTHHHLPHLR

SEQ ID NO: 38177 - protein, 1051 aa, Homo sapiens
VFSEHLLCARPLGSGHRDMAGMIDRFSPANTGIRSWDVDPGVCNLDEQLKVFVSRHSATFSSIVKGQRSLHHRGDNLETLVLLNPSDKSLYDELRNLLLDPASHKLLVLAGPCLEETGELLLQTGGFSPHHFLQVLKDREIRDILATTPPPVQPPILTITCPTFGDWAQLAPAVPGLQGALRLQLRLNPPAQLPNSEGLCEFLEYVAESLEPPSPFELLEPPTSGGFLRLGRPCCYIFPGGLGDAAFFAVNGFTVLVNGGSNPKSSFWKLVRHLDRVDAVLVTHPGADSLPGLNSLLRRKLAERSEVAAGGGSWDDRLRRLISPNLGVVFFNACEAASRLARGEDEAELALSLLAQLGITPLPLSRGPVPAKPTVLFEKMGVGRLDMYVLHPPSAGAERTLASVCALLVWHPAGPGEKVVRVLFPGCTPPACLLDGLVRLQHLRFLREPVVTPQDLEGPGRAESKESVGSRDSSKREGLLATHPRPGQERPGVARKEPARAEAPRKTEKEAKTPRELKKDPKPSVSRTQPREVRRAASSVPNLKKTNAQAAPKPRKAPSTSHSGFPPVANGPRSPPSLRCGEASPPSAACGSPASQLVATPSLELGPIPAGEEKALELPLAASSIPRPRTPSPESHRSPAEGSERLSLSPLRGGEAGPDASPTVTTPTVTTPSLPAEVGSPHSTEVDESLSVSFEQVLPPSAPTSEAGLSLPLRGPRARRSASPHDVDLCLVSPCEFEHRKAVPMAPAPASPGSSNDSSARSQERAGGLGAEETPPTSVSESLPTLSDSDPVPLAPGAADSDEDTEGFGVPRHDPLPDPLKVPPPLPDPSSICMVDPEMLPPKTARQTENVSRTRKPLARPNSRAAAPKATPVAAAKTKGLAGGDRASRPLSARSEPSEKGGRAPLSRKSSTPKTATRGPSGSASSRPGVSATPPKSPVYLDLAYLPSGSSAHLVDEEFFQRVRALCYVISGQDQRKEEGMRAVLDALLASKQHWDRDLQVTLIPTFDSVAMHTWYAETHARHQALGITVLGSNSMVSMQDDAFPACKVEF

SEQ ID NO: 38178 - protein, 82 aa, Homo sapiens
LSPFLCLSWPLSLSMLGVLTPPPHIYVSSGHCPLHGSGHPDPLPCPPQVPRGPGSPFWLHLPCLQRAPGLRGPSLGTLIFKP

SEQ ID NO: 38179 - protein, 863 aa, Homo sapiens
VRGTPSRPRGSPETLSPCPPFSSDQWTISVFSTPSPCLGSFPCSAIGDGRRFSGLVCWGGVSSAPSFNTPSPRSSPLFYPSAPSGHRQLLGVGPTLSPSSTFYRFSTSGADSSSLSPPLPALGRTREQTLLGARSRGRVLLPAIPDPFLWRMENLGVGEGAEACSRLSRSRGRHSMTRAPKHLWRQPRRPIRIQQRFYSDPDKSAGCRERDLSPRPELRKSRLSWPVSSCRRFDLENGLSCGRRALDPQSSPGLGRIMQAPVPHSQRRESFLYRSDSDYELSPKAMSRNSSVASDLHGEDMIVTPFAQVLASLRTVRSNVAALARQQCLGAAKQGPVGNPSSSNQLPPAEDTGQKLALETLDELDWCLDQLETLQTRHSVGEMASNKFKRILNRELTHLSETSRSGNQVSEYISRTFLDQQTEVELPKVTAEEAPQPMSRISGLHGLCHSASLSSATVPRFGVQTDQEEQLAKELEDTNKWGLDVFKVAELSGNRPLTAIIFSIFQERDLLKTFQIPADTLATYLLMLEGHYHANVAYHNSLHAADVAQSTHVLLATPALEAVFTDLEILAALFASAIHDVDHPGVSNQFLINTNSELALMYNDASVLENHHLAVGFKLLQAENCDIFQNLSAKQRLSLRRMVIDMVLATDMSKHMNLLADLKTMVETKKVTSLGVLLLDNYSDRIQVLQNLVHCADLSNPTKPLPLYRQWTDRIMAEFFQQGDRERESGLDISPMCDKHTASVEKSQVGFIDYIAHPLWETWADLVHPDAQDLLDTLEDNREWYQSKIPRSPSDLTNPERDGPDRFQFELTLEEAEEEDEEEEEEGEETALAKEALELPDTELLSPEAGPDPGDLPLDNQRT

SEQ ID NO: 38180 - protein, 79 aa, Homo sapiens
LLKPAILRLEMLLGVFWFCETAVPKLAGFLEESVLKASFKPSLWFSGQHFPGGFVLHFLEPLRAATRREIFILSCSCWD

SEQ ID NO: 38181 - protein, 159 aa, Homo sapiens
MLPLSLLKTAQNHPMLVELKNGETYNGHLVSCDNWMNINLREVICTSRVGAAPTNGGGMQGVHTQPPPSLPGPHGRSQWGRPPRTARPSRGQSGGTGQGELGHQVSQCALDFDPVGDFPAVCLLVPPLTWKDLGLGTPCGSGWGSPLQGRPKTPGLCCL

SEQ ID NO: 38182 - protein, 441 aa, Homo sapiens
MGVGAGRVSQSGAPSPGGAGRANSCPPSSMASCAEPSEPSAPLPAGVPPLEDFEVLDGVEDAEGEEEEEEEEEEEDDLSELPPLEDMGQPPAEEAEQPGALAREFLAAMEPEPAPAPAPEEWLDILGNGLLRKKTLVPGPPGSSRPVKGQVVTVHLQTSLENGTRVQEEPELVFTLGDCDVIQALDLSVPLMDVGETAMVTADSKYCYGPQGRSPYIPPHAALCLEVTLKTAVDGPDLEMLTGQERVALANRKRECGNAHYQRADFVLAANSYDLAIKAITSSAKVDMTFEEEAQLLQLKVKCLNNLAASQLKLDHYRAALRSCSLVLEHQPDNIKALFRKGKVLAQQGEYSEAIPILRAALKLEPSNKTIHAELSKLVKKHAAQRSTETALYRKMLGNPSRLPAKCPGKGAWSIPWKWLFGATAVALGGVALSVVIAARN

SEQ ID NO: 38183 - protein, 140 aa, Homo sapiens
VRKRFRRRLDANMQIFVKTLTGKTITLEVEPSDTIENVKAKIQDKEGIPPDQQRLIFAGKQLEDGRTLSDYNIQKESTLHLVLRLRGGIIEPSLRQLAQKYNCDKMICRKCYARLHPRAVNCRKKKCGHTNNLRPKKKVK

SEQ ID NO: 38184 - protein, 157 aa, Homo sapiens
VRKRFRRRLGGFRFRYLLFLQRGGRADANMQIFVKTLTGKTITLEVEPSDTIENVKAKIQDKEGIPPDQQRLIFAGKQLEDGRTLSDYNIQKESTLHLVLRLRGGIIEPSLRQLAQKYNCDKMICRKCYARLHPRAVNCRKKKCGHTNNLRPKKKVK

SEQ ID NO: 38185 - protein, 94 aa, Homo sapiens
LVGGGGRAGSRRAESGLGAAGGCRGLGGRRGGPELAHAGQSRQGGWAGLARPRLGAQTGAQEASAVLERSLPALPASVTPRGLGREEVLGADPS

SEQ ID NO: 38186 - protein, 47 aa, Homo sapiens
LVGGGGRADANMQIFVKTLTGKTITLEVEPSDTIENVKAKIQDKEGE

SEQ ID NO: 38187 - protein, 139 aa, Homo sapiens
LVGGGGRADANMQIFVKTLTGKTITLEVEPSDTIENVKAKIQDKEGIPPDQQRLIFAGKQLEDGRTLSDYNIQKESTLHLVLRLRGGIIEPSLRQLAQKYNCDKMICRKCYARLHPRAVNCRKKKCGHTNNLRPKKKVK

SEQ ID NO: 38188 - protein, 173 aa, Homo sapiens
LGRAREATARSPDRGPGGERRFGEEPACSACQRDPTRPRAGRDANMQIFVKTLTGKTITLEVEPSDTIENVKAKIQDKEGIPPDQQRLIFAGKQLEDGRTLSDYNIQKESTLHLVLRLRGGIIEPSLRQLAQKYNCDKMICRKCYARLHPRAVNCRKKKCGHTNNLRPKKKVK

SEQ ID NO: 38189 - protein, 22 aa, Homo sapiens
LSLHTWLHYYVCKEELVVVSAF

SEQ ID NO: 38190 - protein, 212 aa, Homo sapiens
LSPKLEFSGAVSAHCNLHLPGSSDSSASASRVAGIIGACHHAQLIFVVLVETEFHHVSQAHLELLTSNDPSASAFQSAGITDANMQIFVKTLTGKTITLEVEPSDTIENVKAKIQDKEGIPPDQQRLIFAGKQLEDGRTLSDYNIQKESTLHLVLRLRGGIIEPSLRQLAQKYNCDKMICRKCYARLHPRAVNCRKKKCGHTNNLRPKKKVK

SEQ ID NO: 38191 - protein, 180 aa, Homo sapiens
LRQEGMCVVGDGFPSRLAAGAACADQDLAAVEEGGTAFREDGSSKMMPKDANMQIFVKTLTGKTITLEVEPSDTIENVKAKIQDKEGIPPDQQRLIFAGKQLEDGRTLSDYNIQKESTLHLVLRLRGGIIEPSLRQLAQKYNCDKMICRKCYARLHPRAVNCRKKKCGHTNNLRPKKKVK

SEQ ID NO: 38192 - protein, 417 aa, Homo sapiens
LESPAPPAFRPAMAAVALMPPPLLLLLLLASPPAASAPSARDPFAPQLGDTQNCQLRCRDRDLGPQPSQAGLEGASESPYDRAVLISACERGCRLFSICRFVARSSKPNATQTECEAACVEAYVKEAEQQACSHGCWSQPAEPEPEQKRKVLEAPSGALSLLDLFSTLCNDLVNSAQGFVSSTWTYYLQTDNGKVVVFQTQPIVESLGFQGGRLQRVEVTWRGSHPEALEVHVGKVQPRPVFLPWVAPLPQGVGLANRPSRIGISISQVLGSMAHPPGLHGLFPRVPWSTSQGSMVHFSGFRGLLPRVPWSISPGSMVYLPGIRGPPLRVPWPTSRVPWPPPRVPCSASQRSVVHLPGIHGSLSRVLWPISLGSVAHLPGFHGSSLRVPWVHLLGSSPRVHLQGFFGPSLRVPWFIS

SEQ ID NO: 38193 - protein, 298 aa, Homo sapiens
LESPAPPAFRPAMAAVALMPPPLLLLLLLASPPAASAPSARDPFAPQLGDTQNCQLRCRDRDLGPQPSQAGLEGASESPYDRAVLISACERGCRLFSICRFVARSSKPNATQTECEAACVEAYVKEAEQQACSHGCWSQPAEPEPEQKRKVLEAPSGALSLLDLFSTLCNDLVNSAQGFVSSTWTYYLQTDNGKVVVFQTQPIVESLGFQGGRLQRVEVTWRGSHPEALEVHVDPVGPLDKVRKAKIRVKTSSKAKVESEEPQDNDFLSCMSRWVAGPWGWEGGGTGGTGLPGPGLGS

SEQ ID NO: 38194 - protein, 354 aa, Homo sapiens
LESPAPPAFRPAMAAVALMPPPLLLLLLLASPPAASAPSARDPFAPQLGDTQNCQLRCRDRDLGPQPSQAGLEGASESPYDRAVLISACERGCRLFSICRFVARSSKPNATQTECEAACVEAYVKEAEQQACSHGCWSQPAEPEPEQKRKVLEAPSGALSLLDLFSTLCNDLVNSAQGFVSSTWTYYLQTDNGKVVVFQTQPIVESLGFQGGRLQRVEVTWRGSHPEALEVHVDPVGPLDKVRKAKIRVKTSSKAKVESEEPQDNDFLSCMSRRSGLPRWILACCLFLSVLVMLWLSCSTLVTAPGQHLKFQPLTLEQHKGFMMEPDWPLYPPPSHACEDSLPPYKLKLDLTKL

SEQ ID NO: 38195 - protein, 210 aa, Homo sapiens
LGEGQASLGRRVLQGLGSMSMPLKEACFRGGQDPGPWTAPSPLPPLARQVMDEADRLLEQGCTDFTVDLEAILAAVPARRQTLLFSATLTDTLRELQGLATNQPFFWEAQAPVSTVEQLDQRYLLVPEKVKDAYLVHLIQRFQDEHEDWSIIIFTNTCKTCQILCMMLRKFSFPTVALHSMMKQKERFAALAKFKSSIYRILIATDVASR

SEQ ID NO: 38196 - protein, 55 aa, Homo sapiens
VLSSLLSGALAGALAKTAVAPLDRTKIIFQVSSKRFSAKVSHYVTAPAWGQSPLP

SEQ ID NO: 38197 - protein, 51 aa, Homo sapiens
VLSSLLSGALAGALAKTAVAPLDRTKIIFQEPCPLGLASSPAHWLERQPLH

SEQ ID NO: 38198 - protein, 384 aa, Homo sapiens
VHRVLARVMAVLGVQLVVTLLTATLMHRLAPHCSFARWLLCNGSLFRYKHPSEEELRALAGKPRPRGRKERWANGLSEEKPLSVPRDAPFQLETCPLTTVDALGLASMTQNLEPLLKKQGWDWALPVAKLAIRVGLAVVGSVLGAFLTFPGLRLAQTHRDALTMSEDRPMLQFLLHTSFLSPLFILWLWTKPIARDFLHQPPFGETRFSLLSDSAFDSGRLWLLVVLCLLRLAVTRPHLQAYLCLAKARVEQLRREAGRIEAREIQQRVVRVYCYVTVVSLQYLTPLILTLNCTLLLKTLGGYSWGLGPAPLLSPDPSSASAAPIGSGEDEVQQTAARIAGALGGLLTPLFLRGVLAYLIWWTAACQLLASLFGLYFHQHLAGS

SEQ ID NO: 38199 - protein, 487 aa, Homo sapiens
VHRVLARVMAVLGVQLVVTLLTATLMHRLAPHCSFARWLLCNGSLFRYKHPSEEELRALAGKPRPRGRKERWANGLSEEKPLSVPRDAPFQLETCPLTTVDALVLRFFLEYQWFVDFAVYSGGVYLFTEAYYYMLGPAKETNIAVFWCLLTVTFSIKMFLTVTRLYFSAEEGGERSVCLTFAFLFLLLAMLVQVVREETLELGLEPGLASMTQNLEPLLKKQGWDWALPVAKLAIRVGLAVVGSVLGAFLTFPGLRLAQTHRDALTMSEDRPMLQFLLHTSFLSPLFILWLWTKPIARDFLHQPPFGETRFSLLSDSAFDSGRLWLLVVLCLLRLAVTRPHLQAYLCLAKARVEQLRREAGRIEAREIQQRVVRVYCYVTVVSLQYLTPLILTLNCTLLLKTLGGYSWGLGPAPLLSPDPSSASAAPIGSGEDEVQQTAARIAGALGGLLTPLFLRGVLAYLIWWTAACQLLASLFGLYFHQHLAGS

SEQ ID NO: 38200 - protein, 181 aa, Homo sapiens
LCPILSPARSCGTDMTHSLVCPETVSRVSSVLNRNTRQFGKKHLFDQDEETCWNSDQGPSQWVTLEFPQLIRVSQLQIQFQGGFSSRRGCLEGSQGTQALHKIVDFYPEDNNSLQTFPIPAAEVDRLKVTFEDATDFFGRVVIYHLRVLGEKGTNRDPCRDLHYRAKLGEPRTHPRNLNFP

SEQ ID NO: 38201 - protein, 153 aa, Homo sapiens
LCPILSPARSCGTDMTHSLVCPETVSRVSSVLNRNTRQFGKKHLFDQDEETCWNSDQGPSQWVTLEFPQLIRVSQLQIQFQGGFSSRRGCLEGSQGTQALHKIVDFYPEDNNSLQTFPIPAAEVDRLKVTFEDATDFFGRVVIYHLRVLGEKV

SEQ ID NO: 38202 - protein, 141 aa, Homo sapiens
LCPILSPARSCGTDMTHSLVCPETVSRVSSVLNRNTRQFGKKHLFDQDEETCWNSDQGPSQWVTLEFPQLIRVSQLQIQFQGGFSSRRGCLEGSQGTQALHKIVDFYPEDNNSLQISCPCFWGGWSVPLEALDSPKPEWEP

SEQ ID NO: 38203 - protein, 127 aa, Homo sapiens
LCPILSPARSCGTDMTHSLVCPETVSRVSSVLNRNTRQFGKKHLFDQDEETCWNSDQGPSQWVTLEFPQLIRVSQLQIQFQGGFSSRRGCLEGTRRPWVAGVPGVTPDTHCLSLLKVHRALRLSTRL

SEQ ID NO: 38204 - protein, 68 aa, Homo sapiens
LCPILSPARSCGTDMTHSLVCPETVSRVSSVLNRNTRQFGKKHLFDQDEETCWNSDQVHRALRLSTRL

SEQ ID NO: 38205 - protein, 27 aa, Homo sapiens
LCPILSPARSCGTDMTHSLVCPETVSR

SEQ ID NO: 38206 - protein, 126 aa, Homo sapiens
VAGDQRKKVAEIRKEAQKSQAASQKVSPPEDEEVKNLAEKLARFIADGGPEVETIALQNNRENQAFRCLMEKVSSTCPVAFGTHSSPWPGASQALKWKFTVLFSLCCVRSQGLPFMMREMAGNGEL

SEQ ID NO: 38207 - protein, 64 aa, Homo sapiens
MCAAEGRIIWPAARAGGRTGAASAAGPGGPTGGTSARGPASPAPPPPGPAGDPGPAAPVTCALP

SEQ ID NO: 38208 - protein, 436 aa, Homo sapiens
MIKQLKEELRLEEAKLVLLKKLRQSQIQKEATAQKTSSARMPGSVIPPPLVRGGQQASSKLGPQASSQVVMPPLVRGAQQIHSIRQHSSTGPPPLLLAPRASVPSVQIQGQRIIQQGLIRVANVPNTSLLVNIPQPTPASLKGTTATSAQANSTPTSVASVVTSAESPASRQAAAKLALRKQLEKTLLEIPPPKPPAPEMNFLPSAANNEFIYLVGLEEVVQNLLETQAGRMSAATVLSREPYMCAQCKTDFTCRWREEKSGAIMCENCMTTNQKKALKVEHTSRLKAAFVKALQQEQEIEQRLLQQGTAPAQAKAEPTAAPHPVLKQASSQLSRGSATTPRGVLHTFSPSPKLQNSASATALVSRTGRHSERTVSAGKGSATSNWKKTPLSTGGTLAFVSPSLAVHKSSSAVDRQREYLLDMIPPRSIPQSATWK

SEQ ID NO: 38209 - protein, 61 aa, Homo sapiens
LWFILLNFFLFSIHFDGRNLKPPWPCSWEVSVHRCVQVRRCRPGVRRAAAHRCQDFRLGLV

SEQ ID NO: 38210 - protein, 38 aa, Homo sapiens
MFYELLRRLCILMMLRSVLYTFIRNNCFLLPSSPLFPY

SEQ ID NO: 38211 - protein, 83 aa, Homo sapiens
LSLAAAGAPNLVLAASCLLLQPLWPCDLQVLGDPQLRDPRKPRNGIVVTKPDLITCLEQGKKPFTVKRHEMIAKSPAPRGEVL

SEQ ID NO: 38212 - protein, 146 aa, Homo sapiens [sequence omitted]

SEQ ID NO: 38213 - protein, 394 aa, Homo sapiens
MDSQSRKVVVCDNDTGFVKCGYAGSNFPEHIFPALVGRSIIRSTTKVGNIEIKDLMVGDEASELRSMLEVNYPMENGIVRNWDDTKHLWDYTFGPEKPNIDTRNCKILLTEPLMNPTKNREKMVEVMFETYQFSGVYVAIQAVLTLYARGLLTAVVVDSGDGVTHIYPVLEGFSLPHLTRRLDIAGRDITRYLIKLLLLQGYTFNHSADFETVRMIKEKLCYVGYNIVQEQKLALETTVLVESYTLPDGGIIKVGGERFETPEALFQPHLINVEGVGVAELLFNTIQAADIDTRSEFYKHIVLSGGSTMYPGLSSRLKRELKQLYLERVLKDDAEKLPKFKICIEDPSRRKHMVFLGGAVLADIMKDKDNFWMTRQEYQEKGVLVLEKLGVTVR

SEQ ID NO: 38214 - protein, 21 aa, Homo sapiens
MPGKAFFFIRGVLFITSSIEK

SEQ ID NO: 38215 - protein, 117 aa, Homo sapiens
LGATLLASKVWDDQAVWNVDYCQILKDITVEDMNEMERHFSELLQFNINVPASVYAKHYLDHRSLADDHLNFLFAPLSKERAQNLEAISRLCEDKDLCGAAVRRSFSADQLHWYSAL

SEQ ID NO: 38216 - protein, 1291 aa, Homo sapiens
MWRGRCFWLQPQFPVSPSLLCVLSLCGPVTCGIGRSTANMPGAPGSLEMGPLTFRDVTIEFSLEEWQCLDTVQQNLYRDVMLENYRNLVFLGMAVFKPDLITCLKQGKEPWNMKRHEMVTKPPVMRSHFTQDLWPDQSTKDSFQEVILRTYARCGHKNLRLRKDCKSANEGKMHKEGYNKLNQCRTATQRKIFQCNKHMKVFHKYSNRNKVRHTKKKTFKCIKCSKSFFMLSCLIRHKRIHIRQNIYKCEERGKAFKSFSTLTKHKIIHTEDKPYKYKKCGNAFKFSSTFTKHKRIHTGETPFRCEECGKAFNQSSNLTDHKRIHTGEKTYKCEECGKAFKGSSNFNAHKVIHTAEKPYKCEDCGKTFNHFSALRKHKIIHTGKKPYKREECGKAFSQSSTLRKHEIIHTGEKPYKCEECGKAFKWSSKLTVHKVVHTGEKPYKCEECGKAFSQFSTLKKHKIIHTGKKPYKCEECGKAFNSSSTLMKHKIIHTGEKPYKCEECGKAFRQSSHLTRHKAIHTGEKPYKCEECGKAFNHFSDLRRHKIIHTGKKPYKCEECGKAFSQSSTLRNHQIIHTGEKPYKCEECGKAFKWSSKLTVHKVIHTGEKPCKCEECGKAFKHFSALRKHKVIHTREKLYKCEECGKAFNNSSILAKHKIIHTGKKPYKCEECGKAFRQSSHLTRHKAIHTGEKPYKCEECGKAFSHFSALRRHKIIHTGKKPYKCEECGKAFSHFSALRRHKIIHTGEKPYKCEECGKAFKWSSKLTVHKVIHTAEKPCKCEECGKSFKHFSALRKHKVIHTREKLYKCEECVKAFNSFSALMKHKVIHTGEKPYKCEECGKAFKWSSKLTVHKVIHTGEKPCKCEECGKAFKHFSALRKHKVIHTGKKPYKCEECGKAFSQSSSLRKHEIIHSGEKPYKCEECGKAFKWLSKLTVHKVIHTAEKPCKCEECGKAFKHFSALRKHKIIHTGKKPYKCEECGKAFNDSSTLMKHKIIHTGKKPYKCAECGKAFKQSSHLTRHKAIHTGEKPYKCEECGKDFNNSSTLKKHKLIHTREKLYKCEECVKAFNNFSALMKHKIIHTGEKPYKCEECGKAFKWSSKLTEHKVIHTGEKPCKCEECDKAFKHFSALRKHKVIHTGKKPYQCDECGKAFNNSSTLTKHKIIHTGEKPYKCEECGKAFSQSSILTKHKIIHSVEKPYKCEECGKAFNQSSHLTRHKTIHTGEKPYKCEECGKAFIQCSYLIRHKTIHTREKPTNVKKVPKLLSNPHTLLDKTIHTGEKPYKCEECAKAF

SEQ ID NO: 38217 - protein, 58 aa, Homo sapiens
MPGHPGSWEKAVSLSLPRLECNGVISAHYNLHLPGSRDSPASASQVLTTKEIVTYCWA

SEQ ID NO: 38218 - protein, 88 aa, Homo sapiens
LAGLLSLAAARAWDRFLLFNVLHLCPPLAPAGDRLLPCDLQVLGRAQTAKMPGHSRRWERGSSLPWMIKATPGAEAGESLELGKQKLQ

SEQ ID NO: 38219 - protein, 114 aa, Homo sapiens
LSLSAAGAPGLVLTTLCLLLLGAQPLWPCDLPPGSLEMGLLTFRDVAIEFSLEEWQCLDTAQKNLYRNVMLENYRNLAFLGIAVSKPDLIICLEKEKEPWNMKRDEMVDEPPGR

SEQ ID NO: 38220 - protein, 126 aa, Homo sapiens
LSLSAAGAPGLVLTTLCLLLLGAQPLWPCDLPPGSLEMGLLTFRDVAIEFSLEEWQCLDTAQKNLYRNVMLENYRNLAFLGIAVSKPDLIICLEKEKEPWNMKRDEMVDEPPDGVSLCHPGWSAVA

SEQ ID NO: 38221 - protein, 42 aa, Homo sapiens
MVSGIWLGLCLSLPPELGIRLCSSAFSTSGAPGDSVTASVAL

SEQ ID NO: 38222 - protein, 46 aa, Homo sapiens
MVLLLAQVVWATLDMGVHRASFTALIMSGSPPAGVCPADPDSTTDE

SEQ ID NO: 38223 - protein, 351 aa, Homo sapiens
LTRWHRDLQVGRKPRPQRRLVAPSPDAAPLQVCPALQDCRISFPAARCRHASRASSRLRRGWKVVPVTGLAVGAAVAMLSVASRSGPFAPVLSATSRGVAGALRPLVQATVPATPEQPVLDLKRPFLSRESLSGQAVRRPLVASVGLNVPASVCYSHTDIKVPDFSEYRRLEVLDSTKSSRESSEARKGFSYLVTGVTTVGVAYAAKNAVTQFVSSMSASADVLALAKIEIKLSDIPEGKNMAFKWRGKPLFVRHRTQKEIEQEAAVELSQLRDPQHDLDRVKKPEWVILIGVCTHLGCVPIANAGDFGGYYCPCHGSHYDASGRIRLGPAPLNLEVPTYEFTSDDMVIVG

SEQ ID NO: 38224 - protein, 481 aa, Homo sapiens
LEVTALMTTWSSLQGSHVSKRALAYALVVTNCQERIQHWKKVDNDYNALRERLSTLPDKLSYNIMVPFGPFAFMPGKLVHTNEVTVLLGDNWFAKCSAKQAVGLVEHRKEHVRKTIDDLKKVMKNFESRVEFTEDLQKMSDAAGDIVDIREEIKCDFEFKAKHRIAHKPHSKPKTSDIFEADIANDVKSKDLLADKELWARLEELERQEELLGELDSKPDTVIANGEDTTSSEEEKEDRNTNVNAMHQVTDSHTPCHKDVASSEPFSGQVNSQLNCSVNGSSSYHSDDDDDDDDDDDDDNIDDDDGDNDHEALGVGDNSIPTIYFSHTVEPKRVRINTGKNTTLKFSEKKEEAKRKRKNSTGSGHSAQELPTIRTPADIYRAFVDVVNGEYVPRKSILKSRSRENSVCSDTSESSAAEFDDRRGVLRSISCEEATCSDTSESILEEEPQENQKKLLPLSVTPEVLRLVGYSRNLAPLNVIL

SEQ ID NO: 38225 - protein, 14 aa, Homo sapiens
LIFVALCIALFFHE

SEQ ID NO: 38226 - protein, 39 aa, Homo sapiens
VWGPLAWSGLVLAGLDPSTISAFGASSRTEFSFSGVQLL

SEQ ID NO: 38227 - protein, 111 aa, Homo sapiens
MLHGNADSCVLIVFDLCFRCREAEMRNSILAQVLDQSARARLSNLALVKPEKTKAVENYLIQMARYGQLSEKVSEQGLIEILKKVSQQTEKTTTVKFNRRKVMDSDEDDDY

SEQ ID NO: 38228 - protein, 182 aa, Homo sapiens
LEEVAPAKETAGVWWPDMHRLADRIHLEELAHMGILSGSVDAMVQAHLGAVFMPHGLGHFLGIDVHDVGGYPEGVERIDEPGLRSLRTARHLQPGMVLTVEPGIYFIDHLLDEALADPARASFLNREVLQRFRGFGGVRIEEDVVVTDSGIELLTCVPRTVEEIEACMAGCDKAFTPFSGPK

SEQ ID NO: 38229 - protein, 160 aa, Homo sapiens [sequence omitted]

SEQ ID NO: 38230 - protein, 407 aa, Homo sapiens
LLFGAAGLLLFISLQDPTELAPQQVPGIKFNIRPRQPHHDLPPGGSQDGDLKEPTERVTRDLSSGAPRGRNLPAPDQPQPPLQRGTRLRLRQRRRRLLIKKMPAAATIPANSSDAPFIRPGPGTLDGRWVSLHRSQQERKRVMQEACAKYRASSSRRAVTPRHVSRIFVEDRHRVLYCEVPKAGCSNWKRVLMVLAGLASSTADIQHNTVHYGSALKRLDTFDRQGILHRLSTYTKMLFVREPFERLVSAFRDKFEHPNSYYHPVFGKAILARYRANASREALRTGSGVRFPEFVQYLLDVHRPVGMDIHWDHVSRLCSPCLIDYDFVGKFESMEDDANFFLSLIRAPRNLTFPRFKDRHSQEARTTARIAHQYFAQLSALQRQRTYDFYYMDYLMFNYSKPFADLY

SEQ ID NO: 38231 - protein, 33 aa, Homo sapiens
LLSLTSTLDHMVTCLMEMPFLKLRFAELHYFYT

SEQ ID NO: 38232 - protein, 50 aa, Homo sapiens
LSSGPEVRSVMSKCRYLSFPIFRTGLLFGTVPATACTPRTLPVTWKVFDL

SEQ ID NO: 38233 - protein, 577 aa, Homo sapiens
VHRECSGAMVALCSLQHLGSSDPRALPTLPTATSGQRPAKRRRKSPAMAALTRDPQFQKLQQWYREHRSELNLRRLFDANKDRFNHFSLTLNTNHGHILVDYSKNLVTEDVMRMLVDLAKSRGVEAARERMFNGEKINYTEGRAVLHVALRNRSNTPILVDGKDVMPEVNKVLDKMKSFCQGPLMVTEALKPYSSGGPRVWYVSNIDGTHIAKTLAQLNPESSLFIIASKTFTTQETITNAETAKEWFLQAAKDPSAVAKHFVALSTNTTKVKEFGIDPQNMFEFWDWVGGRYSLWSAIGLSIALHVGFDNFEQLLSGAHWMDQHFRTTPLEKNAPVLLALLGIWYINCFGCETHAMLPYDQYLHRFAAYFQQGDMESNGKYITKSGTRVDHQTGPIVWGEPGTNGQHAFYQLIHQGTKMIPCDFLIPVQTQHPIRKGLHHKILLANFLAQTEALMRGKSTEEARKELQAAGKSPEDLERLLPHKVFEGNRPTNSIVFTKLTPFMLGALVAMYEHKIFVQGIIWDINSFDQWGVELGKQLAKKIEPELDGSAQVTSHDASTNGLINFIKQQREARVQ

SEQ ID NO: 38234 - protein, 581 aa, Homo sapiens
LLRAAGAPSSSARVSLSVPSSPAMAALTRDPQFQKLQQWYREHRSELNLRRLFDANKDRFNHFSLTLNTNHGHILVDYSKNLVTEDVMRMLVDLAKSRGVEAARERMFNGEKINYTEGRAVLHVALRNRSNTPILVDGKDVMPEVNKVLDKMKSFCQRVRSGDWKGYTGKTITDVINIGIGGSDLGPLMVTEALKPYSSGGPRVWYVSNIDGTHIAKTLAQLNPESSLFIIASKTFTTQETITNAETAKEWFLQAAKDPSAVAKHFVALSTNTTKVKEFGIDPQNMFEFWDWVGGRYSLWSAIGLSIALHVGFDNFEQLLSGAHWMDQHFRTTPLEKNAPVLLALLGIWYINCFGCETHAMLPYDQYLHRFAAYFQQGDMESNGKYITKSGTRVDHQTGPIVWGEPGTNGQHAFYQLIHQGTKMIPCDFLIPVQTQHPIRKGLHHKILLANFLAQTEALMRGKSTEEARKELQAAGKSPEDLERLLPHKVFEGNRPTNSIVFTKLTPFMLGALVAMYEHKIFVQGIIWDINSFDQWGVELGKQLAKKIEPELDGSAQVTSHDASTNGLINFIKQQREARVQ

SEQ ID NO: 38235 - protein, 474 aa, Homo sapiens
MAALTRDPQFQKLQQWYREHRSELNLRRLFDANKDRFNHFSLTLNTNHGHILVDYSKNLVTEDVMRMLVDLAKSRGVEAARERMFNGEKINYTEGRAVLHVALRNRSNTPILVDGKDVMPEVNKVLDKMKSFCQRVRSGDWKGYTGKTITDVINIGIGGSDLGPLMVTEALKPYSSGGPRVWYVSNIDGTHIAKTLAQLNPESSLFIIASKTFTTQETITNAETAKEWFLQAAKDPSAVAKHFVALSTNTTKVKEFGIDPQNMFEFWDWVGGRYSLWSAIGLSIALHVGFDNFEQLLSGAHWMDQHFRTTPLEKNAPVLLALLGIWYINCFGCETHAMLPYDQYLHRFAAYFQQGDMESNGKYITKSGTRVDHQTGPIVWGEPGTNGQHAFYQLIHQGTKMIPCDFLIPVQTQHPIRKGLHHKILLANFLAQTEALMRGKSTEEARKELQAAGKSPEDLERLLPHKSGAGKAAG

SEQ ID NO: 38236 - protein, 64 aa, Homo sapiens
VEAAAVRDISEASTFNAYVLPKLYVKLHYCVSCAIHSKVVRNRSHEARKDPTPPPRFRPAGASP

SEQ ID NO: 38237 - protein, 17 aa, Homo sapiens
LLETTAHRTPWAGLCQL

SEQ ID NO: 38238 - protein, 813 aa, Homo sapiens
LFQTLSMDDVLPLMPWETLLAQGSPQGSPDLPAGQRKQQPQGDRAQGLASESWKLLEVPIIHITPSSDGESPACTPTPRRRQQQRMPDPQSLSQDSTTPHSGRSTPSSSPSLRKRLQLLPPSRPPPEPEPGTMVEKGSDSSSEKGGVPGTPSTQSLGSRNFIRNSKKMQSWYSMLSPTYKQRNEDFRKLFSKLPEAERLIVDYSCALQREILLQGRLYLSENWICFYSNIFRWETTISIQLKEVTCLKKEKTAKLIPNAIQICTESEKHFFTSFGARDRCFLLIFRLWQNALLEKTLSPRELWHLVHQCYGSELGLTSEDEDYVSPLQLNGLGTPKEVGDVIALSDITSSGAADRSQEPSPVGSRRGHVTPNLSRASSDADHGAEEDKEEQVDSQPDASSSQTVTPVAEPPSTEPTQPDGPTTLGPLDLLPSEELLTDTSNSSSSTGEEADLAALLPDLSGRLLINSVFHVGAERLQQMLFSDSPFLQGFLQQCKFTDVTLSPWSGDSKCHQRRVLTYTIPISNPLGPKSASVVETQTLFRRGPQAGGCVVDSEVLTQGIPYQDYFYTAHRYCILGLARNKARLRVSSEIRYRKQPWSLVKSLIEKNSWSGIEDYFHHLERELAKAEKLSLEEGGKDARGLLSGLRRRKRPLSWRAHGDGPQHPDPDPCARAGIHTSGSLSSRFSEPSVDQGPGAGIPSALVLISIVLIILIALNVLLFYRLWSLERTAHTFESWHSLALAKGKFPQTATEWAEILALQKQFHSVEVHKWRQILRASVELLDEMKFSLEKLHQGITVSDPPFDTQPRPDDSFS

SEQ ID NO: 38239 - protein, 74 aa, Homo sapiens
LLSLVNHTGQRSDMQKVTLGLLVFLAGFPVLDANDLEDKNSPFYYGESPCPLSPPHNPTYCLVPRVPIQGWGLT

SEQ ID NO: 38240 - protein, 746 aa, Homo sapiens
LHGSRCAWFGRSRWGPEGTCGPQAPSQRASHLVRALGDGAHLGQPTSGEGGRGTPPRRSPLSPALGSHPCVPGPNHSPERAAGGVWLGGPRRVKHLSPPYLKACPLSTSFTLIKTSRMQQDGLGVGTRNGSGKGRSVHPSWPWCAPRPLRYFGRDARARRAQTAAMALLAGGLSRGLGSHPAAAGRDAVVFVWLLLSTWCTAPARAIQVTVSNPYHVVILFQPVTLPCTYQMTSTPTQPIVIWKYKSFCRDRIADAFSPASVDNQLNAQLAAGNPGYNPYVECQDSVRTVRVVATKQGNAVTLGDYYQGRRITITGNADLTFDQTAWGDSGVYYCSVVSAQDLQGNNEAYAELIVLDWLFVVVVCLAAFLIFLLLGICWCQCCPHTCCCYVRCPCCPDKCCCPEALYAAGKAATSGVPSIYAPSTYAHLSPAKTPPPPAMIPMGPAYNGYPGGYPGDVDRSSSAGGQGSYVPLLRDTDSSVASVRSGYRIQASQQDDSMRVLYYMEKELANFDPSRPGPPSGRVERAMSEVTSLHEDDWRSRPSRGPALTPIRDEEWGGHSPRSPRGWDQEPAREQAGGGWRARRPRARSVDALDDLTPPSTAESGSRSPTSNGGRSRAYMPPRSRSRDDLYDQDDSRDFPRSRDPHYDDFRSRERPPADPRSHHHRTRDPRDNGSRSGDLPYDGRLLEEAVRKKGSEERRRPHKEEEEEAYYPPAPPPYSETDSQASRERRLKKNLALSRESLVV

SEQ ID NO: 38241 - protein, 72 aa, Homo sapiens
LLLLLLGLAWTQGSHGWGADASSLQKRAGRDDQNYNYNQHAYPTAYGGKYSVKTPAKASRVQPGLLQWVKFW

SEQ ID NO: 38242 - protein, 529 aa, Homo sapiens
LRTGERRLQTQREGGQGVGRRRTEEGTETQSKGGKEETLVGGRHSGERGGWAEMKFQGPLACLLLALCLGSGEAGPLQSGEESTGTNIGEALGHGLGDALSEGVGKAIGKEAGGAAGSKVSEALGQGTREAVGTGVRQVPGFGVADALGNRVGEAAHALGNTGHEIGRQAEDVIRHGADAVRGSWQGVPGHNGAWETSGGHGIFGSQGGLGGQGQGNPGGLGTPWVHGYPGNSAGSFGMNPQGAPWGQGGNGGPPNFGTNTQGAVAQPGYGSVRASNQNEGCTNPPPSGSGGGSSNSGGGSGSQSGSSGSGSNGDNNNGSSSGGSSSGSSSGGSSGGSSGGSSGNSGGSRGDSGSESSWGSSTGSSSGNHGGSGGGNGHKPGCEKPGNEARGSGESGIQNSETSPGMFNFDTFWKNFKSKLGFINWDAINKNQVPPPSTRALLYFSRLWEDFKQNTPFLNWKAIIEGADASSLQKRAGRDDQNYNYNQHAYPTAYGGKYSVKTPAKGGVSPSSSASRVQPGLLQWVKFW

SEQ ID NO: 38243 - protein, 263 aa, Homo sapiens
VASLAPLCILPDLPSNMHLARLVGSCSLLLLLGALSGWAASDDPIEKVIEGINRGLSNAEREVGKALDGINSGITHAGREVEKVFNGLSNMGSHTGKELDKGVQGLNHGMDKVAHEINHGIGQAGKEAEKLGHGVNNAAGQAGKEADKAVQGFHTGVHQAGKEAEKLGQGVNHAADQAGKEVEKLGQGAHHAAGQAGKELQNAHNGVNQASKEANQLLNGNHQSGSSSHQGGATTTPLASGASVNTPFINLPALWRSVANIMP

SEQ ID NO: 38244 - protein, 1043 aa, Homo sapiens
VGAQAPGTMGKAENYELYSVELGPGPGGDMAAKMSKKKKAGGGGGKRKEKLENMKKEMEINDHQLSVAELEQKYQTSATKGLSASLAAELLLRDGPNALRPPRGTPEYVKFARQLAGGLQCLMWVAAAICLIAFAIQASEGDLTTDDNLYLAIALIAVVVVTGCFGYYQEFKSTNIIASFKNLVPQQATVIRDGDKFQINADQLVVGDLVEMKGGDRVPADIRILAAQGCKVDNSSLTGESEPQTRSPECTHESPLETRNIAFFSTMCLEGTVQGLVVNTGDRTIIGRIASLASGVENEKTPIAIEIEHFVDIIAGLAILFGATFFIVAMCIGYTFLRAMVFFMAIVVAYVPEGLLATVTVCLSLTAKRLASKNCVVKNLEAVETLGSTSVICSDKTGTLTQNRMTVSHLWFDNHIHTADTTEDQSGQTFDQSSETWRALCRVLTLCNRAAFKSGQDAVPVPKRIVIGDASETALLKFSELTLGNAMGYRDRFPKVCEIPFNSTNKFQLSIHTLEDPRDPRHLLVMKGAPERVLERCSSILIKGQELPLDEQWREAFQTAYLSLGGLGERVLGFCQLYLNEKDYPPGYAFDVEAMNFPSSGLCFAGLVSMIDPPRATVPDAVLKCRTAGIRVIMVTGDHPITAKAIAASVGIISEGSETVEDIAARLRVPVDQVNRKDARACVINGMQLKDMDPSELVEALRTHPEMVFARTSPQQKLVIVESCQRLGAIVAVTGDGVNDSPALKKADIGVAMGIAGSDAAKNAADMILLDDNFASIVTGVEQGRLIFDNLKKSIAYTLTKNIPELTPYLIYITVSVPLPLGCITILFIELCTDIFPSVSLAYEKAESDIMHLRPRNPKRDRLVNEPLAAYSYFQIGAIQSFAGFTDYFTAMAQEGWFPLLCVGLRAQWEDHHLQDLQDSYGQEWTFGQRLYQQYTCYTVFFISIEVCQIADVLIRKTRRLSAFQQGFFRNKILVIAIVFQVCIGCFLCYCPGMPNIFNFMPIRFQWWLVPLPYGILIFVYDEIRKLGVRCCPGSWWDQELYY

SEQ ID NO: 38245 - protein, 259 aa, Homo sapiens
MMASAAAAEAEKGSPVVVGLLVVGNIIILLSGLSLFAETIWVTADQYRVYPLMGVSGKDDVFAGAWIAIFCGFSFFMVASFGVGAALCRRRSMVLTYLVLMLIVYIFECASCITSYTHRDYMVSNPSLITKQMLTFYSADTDQGQELTRLWDRVMIEQECCGTSGPMDWVNFTSAFRAATPEVVFPWPPLCCRRTGNFIPLNEEGCRLGHMDYLFTKGCFEHIGHAIDSYTWGISWFGFAILMWTLPVMLIAMYFYTML

SEQ ID NO: 38246 - protein, 88 aa, Homo sapiens
MGPGRCLLTALLLLALAPPPEASQYCGRLEYWNPDNKCCSSCLQRFGPPPCPGENPRPSLAWAELAGDRERGRGEVCGLRAREACLGV

SEQ ID NO: 38247 - protein, 7 aa, Homo sapiens
MCWFSWR

SEQ ID NO: 38248 - protein, 7 aa, Homo sapiens
MRLPWIV

SEQ ID NO: 38249 - protein, 8 aa, Homo sapiens
MFQPSPEP

SEQ ID NO: 38250 - protein, 8 aa, Homo sapiens
MTAAAILS

SEQ ID NO: 38251 - protein, 9 aa, Homo sapiens
MAEGCALQP

SEQ ID NO: 38252 - protein, 11 aa, Homo sapiens
MVPSALPARPR

SEQ ID NO: 38253 - protein, 11 aa, Homo sapiens
MTVNQPISSRS

SEQ ID NO: 38254 - protein, 11 aa, Homo sapiens
MCAMRVAPDRS

SEQ ID NO: 38255 - protein, 12 aa, Homo sapiens
MWPAPASSRAAS

SEQ ID NO: 38256 - protein, 12 aa, Homo sapiens
MRSDARGSAESL

SEQ ID NO: 38257 - protein, 13 aa, Homo sapiens
MLFFVSAVKCVPG

SEQ ID NO: 38258 - protein, 28 aa, Homo sapiens
MPDASGVTLSTRSMRHCVPASLSFWQRL

SEQ ID NO: 38259 - protein, 28 aa, Homo sapiens
MTDSPLRGDSSSAVAAETDERRLLAAGP

SEQ ID NO: 38260 - protein, 16 aa, Homo sapiens
MPPPRCPESRSDSEKG

SEQ ID NO: 38261 - protein, 31 aa, Homo sapiens
MRRRMSLRASVKSLSEKAGLRCSSVATLIMR

SEQ ID NO: 38262 - protein, 16 aa, Homo sapiens
MNPSQDNPTAPVGMFS

SEQ ID NO: 38263 - protein, 17 aa, Homo sapiens
MRRGTPVLATGRRRRRR

SEQ ID NO: 38264 - protein, 33 aa, Homo sapiens
MAAFARSAITASLRGLQGVRSMSPLTKVQKLAS

SEQ ID NO: 38265 - protein, 34 aa, Homo sapiens
MINDLMINLDASSHASGHPTGNDTPAPGIRLSST

SEQ ID NO: 38266 - protein, 20 aa, Homo sapiens
MERKTTFCSHLLMNFNKLSY

SEQ ID NO: 38267 - protein, 20 aa, Homo sapiens
MNAWKSGWERTHDRRTKGAA

SEQ ID NO: 38268 - protein, 37 aa, Homo sapiens
MAAPGILCSGCRGCRRPRRSRAVLSERTAPSRSTTTA

SEQ ID NO: 38269 - protein, 20 aa, Homo sapiens
TLAGLGSLTAESLRVCGGGR

SEQ ID NO: 38270 - protein, 21 aa, Homo sapiens
MSVCHSARSTWRGRSWGCCCC

SEQ ID NO: 38271 - protein, 23 aa, Homo sapiens
MAAAAAAAAAGTSVGLRRRSRRF

SEQ ID NO: 38272 - protein, 43 aa, Homo sapiens
MCGGWDPVAHPCRSCPSHARRRVFVVTPCCHLFSSLCEDLDWQ

SEQ ID NO: 38273 - protein, 52 aa, Homo sapiens [sequence omitted]

SEQ ID NO: 38274 - protein, 108 aa, Homo sapiens
MRGRARGVVFPRTPGGLPRPVLCTSSPTKGETEAPRGVGRAGWTSGPAAGAVVRPLCRGGPLGFRVSSGKRLAGLVGCAAILETDDSSPLDGFAGSAPASAPIFPAAP

SEQ ID NO: 38275 - protein, 6 aa, Homo sapiens
MASSAE

SEQ ID NO: 38276 - protein, 33 aa, Homo sapiens
MATPVGVEHGEQSQAFSDDGAVSLSFQSRKRIL

SEQ ID NO: 38277 - protein, 34 aa, Homo sapiens
MRDVARSHPTHGLIFMGLWDQKNRNSNNKSPAAV

SEQ ID NO: 38278 - protein, 35 aa, Homo sapiens
MGRTWARSIRKETWTLVGSSAQARLTQMVLDTVPR

SEQ ID NO: 38279 - protein, 6 aa, Homo sapiens
PNHLPK

SEQ ID NO: 38280 - protein, 37 aa, Homo sapiens
MSCILICLTVHVFHLQPFACVQPTVCLQFLNCTSCVS

SEQ ID NO: 38281 - protein, 38 aa, Homo sapiens
MGSPAADLRRSVPCVQVLRTTWVPGAFRVLAAAAGVQT

SEQ ID NO: 38282 - protein, 38 aa, Homo sapiens
MLSLRAPLGRREASSGSGLRSVGASARLSPALAGLSGP

SEQ ID NO: 38283 - protein, 40 aa, Homo sapiens
MELPSSLSFPRCQLGQGRWSNFAVERLHVLPNESPACLSR

SEQ ID NO: 38284 - protein, 43 aa, Homo sapiens
MTKALPQFIFLPVYFPFAFLESCCITEAGSSDVPLKSQWKVLT

SEQ ID NO: 38285 - protein, 43 aa, Homo sapiens
MMFWRQEAPSWPRMKDFLCLKLQEYPPTSPVQMQTPQLGRTNG

SEQ ID NO: 38286 - protein, 44 aa, Homo sapiens
MVSSSPQPRMTSSTGSRRNWTAFCCRSSCQRFFFSPHSPVASGT

SEQ ID NO: 38287 - protein, 47 aa, Homo sapiens
MLPAQQVHQRARMNYGCHECPCEAVGKPWLDCEGYLKSILESTRSSM

SEQ ID NO: 38288 - protein, 47 aa, Homo sapiens
WLQLALSPLSCFVAGILAKTLSLPPYSSRVVIFFFHQEISLAGNLSN

SEQ ID NO: 38289 - protein, 50 aa, Homo sapiens
MPQRPAAGGAGAGAWGGGGGPERSPRPPRGARPAAVPAARAPGMQPRLRR

SEQ ID NO: 38290 - protein, 55 aa, Homo sapiens
GVFVVARDRRRRELRTGAFSLLLGVVALLPLCGKRIQALPRACGCGGPEVLVVPR

SEQ ID NO: 38291 - protein, 60 aa, Homo sapiens
KVLFFFFSAEILVGAGKLLQNSRPGSQPAPQPPPKPPTLLLWEASPHPLSPERDIQLDPK

SEQ ID NO: 38292 - protein, 64 aa, Homo sapiens
DSFLRNKGRVSRRPFHTSSRPPPTVGGIARQRQRRSVGPDIAAQGSRVSVWGGGLLRGLWGGYI

SEQ ID NO: 38293 - protein, 11 aa, Homo sapiens
MVQAELRAIPR

SEQ ID NO: 38294 - protein, 67 aa, Homo sapiens
MRLGGCRALAAVAAAAAATAAPTGVGGFAAAPGAAPVPSGGGFRLRDDPRGHAEAEAAAARGSNRAY

SEQ ID NO: 38295 - protein, 68 aa, Homo sapiens
MCRGIQTLENVPPEFPASSKETRASMEPPLVAGGLSPRGIHHCRPLGGTNLEMGLVERGIEKSRRAYK

SEQ ID NO: 38296 - protein, 12 aa, Homo sapiens
MHLEFPRSPLRG

SEQ ID NO: 38297 - protein, 88 aa, Homo sapiens
PAAPGRDAPNAAVPVRGCRVAPRLSVSEGRNPSSRASAVWPQALASGARDPGPPQPLASRDPNLQLEQLGTARAPGKPWPGRALGEGS

SEQ ID NO: 38298 - protein, 142 aa, Homo sapiens [sequence omitted]

SEQ ID NO: 38299 - protein, 150 aa, Homo sapiens [sequence omitted]

SEQ ID NO: 38300 - protein, 48 aa, Homo sapiens
MLGCSFKLRTTHHAYPGAEGPDHHSLRTEEAACYSWCCIPPDTLLFPA

SEQ ID NO: 38301 - protein, 15 aa, Homo sapiens
MIGRRIVVLFSSLAV

SEQ ID NO: 38302 - protein, 8 aa, Homo sapiens
FLRLVLGL

SEQ ID NO: 38303 - protein, 28 aa, Homo sapiens
WRFSGAVLHVLVLKAETVVATATSTATA

SEQ ID NO: 38304 - protein, 30 aa, Homo sapiens
YVWLLVIAGLSADLCPVCPVAPGDVSSRRG

SEQ ID NO: 38305 - protein, 41 aa, Homo sapiens
MRTGLQPSQAPWLLSWMLSVLRFTMRIVFPALAPDPYYSVN

SEQ ID NO: 38306 - protein, 48 aa, Homo sapiens
MPVCCMQAFWLPTLQQNNCTNSLVPIPPTESPGATVFFALHCRRGTKC

SEQ ID NO: 38307 - protein, 103 aa, Homo sapiens
MAPPWAGGERRGPGTTCLHSPWMLEAAPPWAGGEGRELGAACLHSLRMLEAGGSEAATARGRGDFGAASCSDLAFRCASSQNPRSLEPVASSPERRRRQPSRA

SEQ ID NO: 38308 - protein, 17 aa, Homo sapiens
MAQAALGISAQGNHIPL

SEQ ID NO: 38309 - protein, 52 aa, Homo sapiens
MRFLISIICTWRFIQERITGADLNHGAHKWGGCSSGHGKNFLLQLETAFCVG

SEQ ID NO: 38310 - protein, 68 aa, Homo sapiens
MCCCSRRRCCRCRCRRPWCPGSSAALRGGSRGRGRGSRVQGAARLRRPGASRCSRRPPRVMPPPPASA

SEQ ID NO: 38311 - protein, 18 aa, Homo sapiens
MCAVSGAIPGPVAPEPRV

SEQ ID NO: 38312 - protein, 7 aa, Homo sapiens
MEGMLLA

SEQ ID NO: 38313 - protein, 8 aa, Homo sapiens
MSKEGVVG

SEQ ID NO: 38314 - protein, 9 aa, Homo sapiens
MAVFALVLV

SEQ ID NO: 38315 - protein, 9 aa, Homo sapiens
MADADRNQR

SEQ ID NO: 38316 - protein, 13 aa, Homo sapiens
MESEGRKFIPETK

SEQ ID NO: 38317 - protein, 14 aa, Homo sapiens
MRTGRSVGDLESRG

SEQ ID NO: 38318 - protein, 16 aa, Homo sapiens
MSYLIKQHHSAITQGS

SEQ ID NO: 38319 - protein, 16 aa, Homo sapiens
MNQQWKRKYCKLADCW

SEQ ID NO: 38320 - protein, 17 aa, Homo sapiens
MLLQFGAQTYDQHMEMW

SEQ ID NO: 38321 - protein, 20 aa, Homo sapiens
MCVVSQDATCRRRRGRAEPA

SEQ ID NO: 38322 - protein, 19 aa, Homo sapiens
MAHMISQKFIFIADTCLSF

SEQ ID NO: 38323 - protein, 19 aa, Homo sapiens
MSPFVALCGPCGIHRRSFI

SEQ ID NO: 38324 - protein, 21 aa, Homo sapiens
MPPPVSPGPQAVSRHLGAEAL

SEQ ID NO: 38325 - protein, 23 aa, Homo sapiens
MRLSQARGLSGSSCCAGGSWPPL

SEQ ID NO: 38326 - protein, 24 aa, Homo sapiens
MRNSKERIQLQFKSLQNLRLSLLL

SEQ ID NO: 38327 - protein, 28 aa, Homo sapiens
MEELQDQALLSVCSTDVTTAHAWLTVLV

SEQ ID NO: 38328 - protein, 31 aa, Homo sapiens
MGLQRLATHIDGAYVQAPVHRKEQNRHSSWS

SEQ ID NO: 38329 - protein, 33 aa, Homo sapiens
MEVFFVRLLLLALWVHATFMSCNTYCKDVQFHS

SEQ ID NO: 38330 - protein, 38 aa, Homo sapiens
MDEKMLVLWVVALSGISTLFFAADHLVVCECTYRFGRE

SEQ ID NO: 38331 - protein, 42 aa, Homo sapiens
MESRTLLLLFSGAVALIQTWADYNYNQGRNDLIFTLQLWKRQ

SEQ ID NO: 38332 - protein, 42 aa, Homo sapiens
MFSPQELTGEGMGQDPSLCKASVTVMFQHLIIYPGEFSCLPG

SEQ ID NO: 38333 - protein, 25 aa, Homo sapiens
MPVWWRRRRLRARSWALRGARKPLR

SEQ ID NO: 38334 - protein, 47 aa, Homo sapiens
AEIRAEKSLGAGAETHAFDTAAKTPIPATLAGNRGAKAAPSSGLGRV

SEQ ID NO: 38335 - protein, 25 aa, Homo sapiens
MEFCSVLLALLSQRNPRQQMPIRSV

SEQ ID NO: 38336 - protein, 25 aa, Homo sapiens
MDFGRGSHHWTSKEATCRHLQPSIS

SEQ ID NO: 38337 - protein, 60 aa, Homo sapiens [sequence omitted]

SEQ ID NO: 38338 - protein, 61 aa, Homo sapiens
MRLLLEWRVYLRLTCATKDGMARECPTTWLSPPAKPDFAQRHSVKPTALQGGRWSRLGASP

SEQ ID NO: 38339 - protein, 26 aa, Homo sapiens
MNALASLTVRTCDRFWQTEPALLPPG

SEQ ID NO: 38340 - protein, 99 aa, Homo sapiens
YWSLVFFHLFSLISFACTLPGCWRLEAVTQQQREATLERPHIATSPSAARPPRAQEARNLWHPSLKGEDGNPAEALLGWGLHDRAGLIKWRPTRGSNPG

SEQ ID NO: 38341 - protein, 103 aa, Homo sapiens
MYCLIPEHGRKAGSLLGMLFSGGQAKLWGTASESLCSQSAADTCRQSPLLQDVPLHGELPEAEKGATDLKAAQRRVLPKAQGDRCLVSAGVYSKPKGSPVSKW

SEQ ID NO: 38342 - protein, 28 aa, Homo sapiens
MQEETFRRKTGREKLRLTLNLPNRASLR

SEQ ID NO: 38343 - protein, 6 aa, Homo sapiens
MHLRKR

SEQ ID NO: 38344 - protein, 14 aa, Homo sapiens
MAAPSRVRCGRLCL

SEQ ID NO: 38345 - protein, 7 aa, Homo sapiens
MAPAASA

SEQ ID NO: 38346 - protein, 7 aa, Homo sapiens
MTLFVHT

SEQ ID NO: 38347 - protein, 8 aa, Homo sapiens
MSRETFAG

SEQ ID NO: 38348 - protein, 30 aa, Homo sapiens
MSFCFIFQVSLSPSGAFFGGASEGGQSLRI

SEQ ID NO: 38349 - protein, 9 aa, Homo sapiens
MCIFLFWTI

SEQ ID NO: 38350 - protein, 30 aa, Homo sapiens
MVFYGKYLSVGLNVKERGRERNPFIMFSLP

SEQ ID NO: 38351 - protein, 10 aa, Homo sapiens
MEELPAAPGG

SEQ ID NO: 38352 - protein, 32 aa, Homo sapiens
MARGHRGQPGVRLPFAARALQWSLGPPASVSA

SEQ ID NO: 38353 - protein, 13 aa, Homo sapiens
MPRAAAAAVAGGK

SEQ ID NO: 38354 - protein, 40 aa, Homo sapiens
MAMVMAAVTRTTPVKLRSGRYIQKVPRRNFLLEKMKKQYL

SEQ ID NO: 38355 - protein, 16 aa, Homo sapiens
MAEALPLPLLPLQGKC

SEQ ID NO: 38356 - protein, 16 aa, Homo sapiens
MQIAPLERLTTNRALA

SEQ ID NO: 38357 - protein, 19 aa, Homo sapiens
MHWGKRWTLIVGGLLICDL

SEQ ID NO: 38358 - protein, 20 aa, Homo sapiens
MTSTSSSALLQLLKLIFKAT

SEQ ID NO: 38359 - protein, 20 aa, Homo sapiens
MEAEGMHRGSQNLGQGLARC

SEQ ID NO: 38360 - protein, 21 aa, Homo sapiens
IWNFPVKRPPTTLLLSLCTCV

SEQ ID NO: 38361 - protein, 22 aa, Homo sapiens
FHFHSTTLLILGLLTNTLTIYQ

SEQ ID NO: 38362 - protein, 59 aa, Homo sapiens [sequence omitted]

SEQ ID NO: 38363 - protein, 24 aa, Homo sapiens
MLKLSPSCRTDIYSNTKVQISIDL

SEQ ID NO: 38364 - protein, 59 aa, Homo sapiens
MGLSVLLPLCLLGPGRFTSGQKPLDTPGLGAAVLSVRKAGLKMRSHLTPSVCTVPSPGS

SEQ ID NO: 38365 - protein, 25 aa, Homo sapiens
MGPEAGLLHSSDDAGGGPSDSQLPP

SEQ ID NO: 38366 - protein, 27 aa, Homo sapiens
MSLPQGTGSISSSSVVQAMVAESPPRV

SEQ ID NO: 38367 - protein, 77 aa, Homo sapiens
MLRSRVGDWAVGYRPGKHAASKAAFLREICVTLLPSVYRPCTSPGRFFHNLNLSSPGIQLQQLRAFHVTPGARRRLV

SEQ ID NO: 38368 - protein, 28 aa, Homo sapiens
MGSGVAADTGSGKVSQTYTSGRAAAGYP

SEQ ID NO: 38369 - protein, 28 aa, Homo sapiens
MPPIKLIFEPRRLGSSLPKLEPCRASFP

SEQ ID NO: 38370 - protein, 29 aa, Homo sapiens
MGLWMHLDVCNEHCGWHAPVFWIPMHRTP

SEQ ID NO: 38371 - protein, 144 aa, Homo sapiens
MGRTETGVEKVMERTLGGAVPAERRLLQGLRTQVGAGRPGPAPQAPPRAPPPRLKPRRRLRGAPLRSPAARALGLTVHARPARPTRPPPADRHSRTHCRVLPAARTHSMTIRCFVSHPFSMENQGDRAMIATGSFEERDTFREA

SEQ ID NO: 38372 - protein, 31 aa, Homo sapiens
MLGAARGWGRPEDVRVSAVLLLSPVPSASPK

SEQ ID NO: 38373 - protein, 31 aa, Homo sapiens
MKGHNLGLTLAAQMATCAFSAASPGEKAMRA

SEQ ID NO: 38374 - protein, 32 aa, Homo sapiens
MRKLRLGEVTKLVQNHTTCKGHSQDSEPGCKN

SEQ ID NO: 38375 - protein, 34 aa, Homo sapiens
MELRAADREPPANPSLHARLAFGREMRQWNLEGR

SEQ ID NO: 38376 - protein, 35 aa, Homo sapiens
MIPFQAQWCPVASRSQTFMWTRKAYRGNGNSPLAH

SEQ ID NO: 38377 - protein, 35 aa, Homo sapiens
MTIVRRIWGRDTEKNPANTVRMKLPKGCKSLSNTN

SEQ ID NO: 38378 - protein, 35 aa, Homo sapiens
MEPAVRMRGAEDQKTQGVNGACHPWSFSRISGLSA

SEQ ID NO: 38379 - protein, 37 aa, Homo sapiens
MQENYSPLLARPGCEIFSPALSRALCNPKMKDRRGES

SEQ ID NO: 38380 - protein, 8 aa, Homo sapiens
MSGAVTAL

SEQ ID NO: 38381 - protein, 39 aa, Homo sapiens
MPSPQLASVFRWNIRCTFMAILSVRADFCQAQHSIFADK

SEQ ID NO: 38382 - protein, 39 aa, Homo sapiens
MLVAWTVKGEKWIWETFRRWHQKRRKLLLILKPKPKRRL

SEQ ID NO: 38383 - protein, 8 aa, Homo sapiens
MAAAAAWS

SEQ ID NO: 38384 - protein, 39 aa, Homo sapiens
MPRTLLRARIRTTWGSQNLPDDILEGLRKGGLGAGWWVG

SEQ ID NO: 38385 - protein, 41 aa, Homo sapiens
MLPVLSMLQSDVCPATQAGRLSSVFIFLEADRSGARVRWWS

SEQ ID NO: 38386 - protein, 42 aa, Homo sapiens
MDPRGNAPAAKEPSPILMWKKWRTQNQGFPSDFFQSTGISLC

SEQ ID NO: 38387 - protein, 8 aa, Homo sapiens
MKHFSRVV

SEQ ID NO: 38388 - protein, 47 aa, Homo sapiens
APLRRALPVRSGGRKPPGAAGSGRRRGPESRLQTQHLLSVGHLCEHH

SEQ ID NO: 38389 - protein, 48 aa, Homo sapiens
MEGAGALGLVLAGLPLECALGADQERWSPGRSRLGLPPGFGAGSPRPS

SEQ ID NO: 38390 - protein, 49 aa, Homo sapiens [sequence omitted]

SEQ ID NO: 38391 - protein, 50 aa, Homo sapiens
MLPGPWAGRLCPAARSPPGHLPAHELPSPSACGPCQRPTGHWVPLEPPQA

SEQ ID NO: 38392 - protein, 9 aa, Homo sapiens
MPRRAPGPP

SEQ ID NO: 38393 - protein, 51 aa, Homo sapiens
MWMTFYWLLKLLTAACNILRTYFTSFRSLGIGSQPRRPNFVFPECPTWGMR

SEQ ID NO: 38394 - protein, 54 aa, Homo sapiens
MCHSVYILSMCFLLLLFVHLPRMKTPWEHGYSVLFTPASPGPETEVGRQSLKQK

SEQ ID NO: 38395 - protein, 54 aa, Homo sapiens
MYCLIPEHGRKAGSLLGMLFSGGQAKLWGTASESLCSQSAADTCRQSPLLQIIL

SEQ ID NO: 38396 - protein, 63 aa, Homo sapiens [sequence omitted]

SEQ ID NO: 38397 - protein, 68 aa, Homo sapiens
MSPGRNVPPQIMLFISLGGSAARQHQAPGGRCARSPALPSSPCAAAAATPGLGVAPASVPGQGSFHED

SEQ ID NO: 38398 - protein, 74 aa, Homo sapiens
MTLGARAALLTEVALVRTVGLCCACVVGRGSEAVSSAPFPAAAAAELGGGVGGRREPALGAAAGGSAPSSREDP

SEQ ID NO: 38399 - protein, 13 aa, Homo sapiens
MELVTGKEYSVGE

SEQ ID NO: 38400 - protein, 75 aa, Homo sapiens
MSRAVTPAPGSMCAAEGRIIWPAARAGGRTGAASAAGPGGPTGGTSARGPASPAPPPPGPAGDPGPAAPVTCALP

SEQ ID NO: 38401 - protein, 13 aa, Homo sapiens
MPRPLRAATKSRG

SEQ ID NO: 38402 - protein, 79 aa, Homo sapiens
MFCSEQGLKNMIFSTVDCSLVFRTLPPAEKIDEGNTGGGIRAVSCLGWLKTNLEEHDVTTSTEIKRRHQSEGPVGTVEQ

SEQ ID NO: 38403 - protein, 79 aa, Homo sapiens
QPRRRVFPAAGRGPGRKCSQWGRQGFLEPLQSLGARLLSGNCRIFLLTPACLAPAAPVESTDASSASSLGKSGVVSRRA

SEQ ID NO: 38404 - protein, 89 aa, Homo sapiens
MTLSTSNLKSFTSYLVSDLSWYPFPTPLDNPSQFLMLIEELWLQGTFQDFTPTQISFFSFCLLCLWDILSPHPQSLTAGPPSSASHTTY

SEQ ID NO: 38405 - protein, 92 aa, Homo sapiens
MAGLFVFAVCFSCWVLPQGQYGRRCHMYIMAFVTWTSWRACRIVKDGGFCRLVPRRAGEKVGWTVLDCCITQPIRNGGGIDHSQLEQKMELD

SEQ ID NO: 38406 - protein, 93 aa, Homo sapiens [sequence omitted]

SEQ ID NO: 38407 - protein, 15 aa, Homo sapiens
MSPAAQAERPVALFF

SEQ ID NO: 38408 - protein, 95 aa, Homo sapiens [sequence omitted]

SEQ ID NO: 38409 - protein, 15 aa, Homo sapiens
MKGPSWGLLATSAVS

SEQ ID NO: 38410 - protein, 105 aa, Homo sapiens [sequence omitted]

SEQ ID NO: 38411 - protein, 118 aa, Homo sapiens
QPVSYPGNSSRLTLFRHFRSATGSEVRPVAFPGVRRLLGLQQLKCSVFLGLAVCTSLPGSISPRPVVRPSRRARTGVAIRARGRRGPGTHVPQGRLGGWRGQIPGYLWRLFSVASSLC

SEQ ID NO: 38412 - protein, 127 aa, Homo sapiens [sequence omitted]

SEQ ID NO: 38413 - protein, 128 aa, Homo sapiens [sequence omitted]

SEQ ID NO: 38414 - protein, 133 aa, Homo sapiens
MLELTGPSGSVPGAGLSRRIARSRRLGHGLGALAGAELSRTRSGRDLAFSRTTWVLRAVSRVSGSDRPVDPKVALLGAGASGLSFLANAVCTKPAAACRGPSDSSREPVRRSSRGRGAPAALGGLWGRGRSSI

SEQ ID NO: 38415 - protein, 137 aa, Homo sapiens [sequence omitted]

SEQ ID NO: 38416 - protein, 16 aa, Homo sapiens
MPGRMSRGPRRGRDSL

SEQ ID NO: 38417 - protein, 6 aa, Homo sapiens
MAPSAG

SEQ ID NO: 38418 - protein, 6 aa, Homo sapiens
MPGTGR

SEQ ID NO: 38419 - protein, 17 aa, Homo sapiens
MSAAGSRGAAGTRLGAS

SEQ ID NO: 38420 - protein, 6 aa, Homo sapiens
MVNMPL

SEQ ID NO: 38421 - protein, 6 aa, Homo sapiens
MESDHC

SEQ ID NO: 38422 - protein, 17 aa, Homo sapiens
MAAASSTLLFLPPGTSD

SEQ ID NO: 38423 - protein, 6 aa, Homo sapiens
MPTIKV

SEQ ID NO: 38424 - protein, 6 aa, Homo sapiens
MFPVTQ

SEQ ID NO: 38425 - protein, 6 aa, Homo sapiens
MRILCS

SEQ ID NO: 38426 - protein, 6 aa, Homo sapiens
MLLCCP

SEQ ID NO: 38427 - protein, 18 aa, Homo sapiens
MAAPSNKTELAWSPRLAA

SEQ ID NO: 38428 - protein, 7 aa, Homo sapiens
MVVRTAV

SEQ ID NO: 38429 - protein, 7 aa, Homo sapiens
MLLLQGV

SEQ ID NO: 38430 - protein, 7 aa, Homo sapiens
MGPEKNP

SEQ ID NO: 38431 - protein, 22 aa, Homo sapiens
MGFAVLRELASFPWLVLSGRTI

SEQ ID NO: 38432 - protein, 8 aa, Homo sapiens
MKRAMWPA

SEQ ID NO: 38433 - protein, 26 aa, Homo sapiens
MESREPGAGRPETRPTLRPRAAGSPR

SEQ ID NO: 38434 - protein, 8 aa, Homo sapiens
MAHRDPFC

SEQ ID NO: 38435 - protein, 9 aa, Homo sapiens
MKLAAFLLL

SEQ ID NO: 38436 - protein, 9 aa, Homo sapiens
NVPFLKRLC

SEQ ID NO: 38437 - protein, 26 aa, Homo sapiens
MEKDRCTLLGLEKKTKMSKRDAPSVL

SEQ ID NO: 38438 - protein, 9 aa, Homo sapiens
MHADSCKFP

SEQ ID NO: 38439 - protein, 9 aa, Homo sapiens
MNHLSNNQI

SEQ ID NO: 38440 - protein, 31 aa, Homo sapiens
MVTVRAGPLPLPLPPPPQKQHPRLGAEEPPL

SEQ ID NO: 38441 - protein, 10 aa, Homo sapiens
MRTVMCVLKL

SEQ ID NO: 38442 - protein, 10 aa, Homo sapiens
MAAWLAFIFC

SEQ ID NO: 38443 - protein, 10 aa, Homo sapiens
MVFTPLHQRT

SEQ ID NO: 38444 - protein, 35 aa, Homo sapiens
MLPLPSQVGSRYLLSIRRSGLPERVHEVFRVGKLR

SEQ ID NO: 38445 - protein, 11 aa, Homo sapiens
MEVSSFGKSFI

SEQ ID NO: 38446 - protein, 11 aa, Homo sapiens
MAAPWGRGVAS

SEQ ID NO: 38447 - protein, 11 aa, Homo sapiens
MAAPRASRPSL

SEQ ID NO: 38448 - protein, 45 aa, Homo sapiens
MVQWKNWPESLEVWVLVLAVPLTHCDLGILCCEDISQVLHVSQQI

SEQ ID NO: 38449 - protein, 11 aa, Homo sapiens
MPRQRDGHADV

SEQ ID NO: 38450 - protein, 45 aa, Homo sapiens
MARGWSSRPPPPQPPPPTPTTTCREQPRPKPEQGPESRLEWGLRV

SEQ ID NO: 38451 - protein, 11 aa, Homo sapiens
MPQRRSGRLRP

SEQ ID NO: 38452 - protein, 11 aa, Homo sapiens
MLATGVVGLML

SEQ ID NO: 38453 - protein, 12 aa, Homo sapiens
RGASVAHRTTCL

SEQ ID NO: 38454 - protein, 12 aa, Homo sapiens
MNDPPAWGEDSR

SEQ ID NO: 38455 - protein, 12 aa, Homo sapiens
MVDNADHLWKGY

SEQ ID NO: 38456 - protein, 12 aa, Homo sapiens
MEFPGRSHFKTS

SEQ ID NO: 38457 - protein, 13 aa, Homo sapiens
VQPEAKVLTTEGR

SEQ ID NO: 38458 - protein, 13 aa, Homo sapiens
MRAKVALGSSLGA

SEQ ID NO: 38459 - protein, 58 aa, Homo sapiens
METESWPGRGRGELVIRPPQLFCLRIRALTNLPAGAPSPSLPAKMRSLGCLRVFSSLG

SEQ ID NO: 38460 - protein, 60 aa, Homo sapiens
MKPGTHFPGMPSLHSSIPDDFKNVFDQKTDNLPRKSKLVVGGKVFAEVCMVSQPRPCFQR

SEQ ID NO: 38461 - protein, 13 aa, Homo sapiens
MSKHREVCSLSRV

SEQ ID NO: 38462 - protein, 69 aa, Homo sapiens
MRAAPLGKISRCPSRALSSVIGSGSLCQAAGRIKETTRRRSALSRLAPCGLLFPSLRPGETELIIVTGL

SEQ ID NO: 38463 - protein, 13 aa, Homo sapiens
MPRDPMWTSFKPF

SEQ ID NO: 38464 - protein, 86 aa, Homo sapiens [sequence omitted]

SEQ ID NO: 38465 - protein, 14 aa, Homo sapiens
MLASVTPCFCQLSN

SEQ ID NO: 38466 - protein, 14 aa, Homo sapiens
LLGPKGTDVLPRTI

SEQ ID NO: 38467 - protein, 14 aa, Homo sapiens
MMDARTCTWGLVTR

SEQ ID NO: 38468 - protein, 14 aa, Homo sapiens
MKSVVLSRLMIIVT

SEQ ID NO: 38469 - protein, 15 aa, Homo sapiens
MPIFWLSPAFSKLTI

SEQ ID NO: 38470 - protein, 15 aa, Homo sapiens
MYSLVCIYVCVYSLL

SEQ ID NO: 38471 - protein, 15 aa, Homo sapiens
MAGTSSALPLQSSLP

SEQ ID NO: 38472 - protein, 15 aa, Homo sapiens
MLIRTTWHLPEQDFQ

SEQ ID NO: 38473 - protein, 9 aa, Homo sapiens
MEPGSGRCC

SEQ ID NO: 38474 - protein, 15 aa, Homo sapiens
TNRPLLASAIAFFLF

SEQ ID NO: 38475 - protein, 16 aa, Homo sapiens
MDCLSPSFHPGETVQI

SEQ ID NO: 38476 - protein, 9 aa, Homo sapiens
MYLSVGGLC

SEQ ID NO: 38477 - protein, 10 aa, Homo sapiens
LLLSDVRGNK

SEQ ID NO: 38478 - protein, 37 aa, Homo sapiens
MRVVMARLLSEGEQGIPTACAAFAQQPAGGHVAAWLG

SEQ ID NO: 38479 - protein, 17 aa, Homo sapiens
MAAKQAPGRSRSGAGRK

SEQ ID NO: 38480 - protein, 17 aa, Homo sapiens
MISSLRPPLPTGLGLQI

SEQ ID NO: 38481 - protein, 17 aa, Homo sapiens
MVPGGAETKARKTEKRV

SEQ ID NO: 38482 - protein, 17 aa, Homo sapiens
MLGFMFASEQVSCSHRK

SEQ ID NO: 38483 - protein, 17 aa, Homo sapiens
RIFTLRKGIPRLIFFLL

SEQ ID NO: 38484 - protein, 13 aa, Homo sapiens
MARRPQGTDSPTS

SEQ ID NO: 38485 - protein, 18 aa, Homo sapiens
MREQAKGKRKPRARPVTG

SEQ ID NO: 38486 - protein, 18 aa, Homo sapiens
MARASLWRAGGTLTLTAL

SEQ ID NO: 38487 - protein, 43 aa, Homo sapiens
MLKYYEPSELVERLQSFGCYGPFSWAHTFGVVQNQKQPCFPNT

SEQ ID NO: 38488 - protein, 15 aa, Homo sapiens
MRMLAASCGLRVTQR

SEQ ID NO: 38489 - protein, 18 aa, Homo sapiens
MPSCPARSATGPLGFRAF

SEQ ID NO: 38490 - protein, 16 aa, Homo sapiens
MRFPWKSFKRKMEGAV

SEQ ID NO: 38491 - protein, 19 aa, Homo sapiens
MRLHLCGYTLLVWTLSKFR

SEQ ID NO: 38492 - protein, 16 aa, Homo sapiens
MAHRGSPGCSWRLISI

SEQ ID NO: 38493 - protein, 19 aa, Homo sapiens
GAASGRPRAGGRGSCGREA

SEQ ID NO: 38494 - protein, 24 aa, Homo sapiens
SSTAILGPTCCLTIPEPRWEPWLR

SEQ ID NO: 38495 - protein, 49 aa, Homo sapiens
MRGARGLGRAQLLRAPDEATGMDLRRQPAPGRRARGLGGRAAAAPGRAL

SEQ ID NO: 38496 - protein, 19 aa, Homo sapiens
MSVFQSTWIKRLLLFVYLD

SEQ ID NO: 38497 - protein, 19 aa, Homo sapiens
MLKFFKNQSFGGDVIENDE

SEQ ID NO: 38498 - protein, 19 aa, Homo sapiens
MLFSDSRYTLVLFSLFLQS

SEQ ID NO: 38499 - protein, 19 aa, Homo sapiens
MQIRKFESHGSKKLHKHTK

SEQ ID NO: 38500 - protein, 17 aa, Homo sapiens
MVFGLEWKCSLRPVLGF

SEQ ID NO: 38501 - protein, 20 aa, Homo sapiens
TVFKLTDIFLCLIHCAVESL

SEQ ID NO: 38502 - protein, 20 aa, Homo sapiens
MVVFVCRPASLYIHRSCKTS

SEQ ID NO: 38503 - protein, 20 aa, Homo sapiens
MELRLKAVAGVEHEFQQAAC

SEQ ID NO: 38504 - protein, 20 aa, Homo sapiens
MAAAAAAAVLVVLGGRSRIL

SEQ ID NO: 38505 - protein, 20 aa, Homo sapiens
MRVAVRFSVVSVEGQSHTRS

SEQ ID NO: 38506 - protein, 20 aa, Homo sapiens
MLSDLLKVPISQELEPRPVL

SEQ ID NO: 38507 - protein, 20 aa, Homo sapiens
MQITFLLLNRTCASDFLPSA

SEQ ID NO: 38508 - protein, 20 aa, Homo sapiens
EARWPPRFLSVFFAFASTAP

SEQ ID NO: 38509 - protein, 19 aa, Homo sapiens
MRDWTAGCTGEFTGRIIHP

SEQ ID NO: 38510 - protein, 21 aa, Homo sapiens
MEAGTFFDPVKEEDLLFSKSE

SEQ ID NO: 38511 - protein, 21 aa, Homo sapiens
MQSYSLPAWTCLQYLLWDLPC

SEQ ID NO: 38512 - protein, 58 aa, Homo sapiens
MVLLLAGLGPGSKPPLPPALELLLRVCHSGLPVAGREELLHRQGFSSRNPTDNLNLNL

SEQ ID NO: 38513 - protein, 22 aa, Homo sapiens
LLPPSLLLLLASAIVEAGAGTG

SEQ ID NO: 38514 - protein, 22 aa, Homo sapiens
KCWPAARGLFLSVPGRRVVYAE

SEQ ID NO: 38515 - protein, 22 aa, Homo sapiens
MLVLEASGPRSVFGLIDPRFSG

SEQ ID NO: 38516 - protein, 23 aa, Homo sapiens
EVGGSPFIWLLILAGISGLSAGP

SEQ ID NO: 38517 - protein, 23 aa, Homo sapiens
MEASGGRAWSGASASGAAAAALY

SEQ ID NO: 38518 - protein, 23 aa, Homo sapiens
MPGEPGAMKGSCLTGAAAEGLAG

SEQ ID NO: 38519 - protein, 23 aa, Homo sapiens
MKYFRPSSRTSLCHSLLYLLLVI

SEQ ID NO: 38520 - protein, 23 aa, Homo sapiens
MCPCGHTVLLSEAVGFSLRDKKK

SEQ ID NO: 38521 - protein, 24 aa, Homo sapiens
MRLPPALGLEPSRLQTAFPVRWLL

SEQ ID NO: 38522 - protein, 24 aa, Homo sapiens
MQRYTKKLPEHLGEYLMENRLVKT

SEQ ID NO: 38523 - protein, 24 aa, Homo sapiens
MCPVPVRGSVESRVRAAAARGEKS

SEQ ID NO: 38524 - protein, 33 aa, Homo sapiens
MLLPCLKEDNKSPTGQNFRNLCGRKRQVSFKSR

SEQ ID NO: 38525 - protein, 24 aa, Homo sapiens
GRSAPSSQLRILIQAGARGPSPPL

SEQ ID NO: 38526 - protein, 24 aa, Homo sapiens
MSPPCSQAYARRPDRAVSGPWTLL

SEQ ID NO: 38527 - protein, 25 aa, Homo sapiens
VTVSKTASIGRAAGSIDGKLELPTW

SEQ ID NO: 38528 - protein, 25 aa, Homo sapiens
MHATDPLLPDPRSRRPRPVGLRLTD

SEQ ID NO: 38529 - protein, 37 aa, Homo sapiens
MVSARWFILELDLFKTDKCWYFIFYKWTIISFLKTTT

SEQ ID NO: 38530 - protein, 25 aa, Homo sapiens
MLRGWEAGTQAPSDPRIASPGPGWY

SEQ ID NO: 38531 - protein, 25 aa, Homo sapiens
SYPWAPCALPAAKTGSPTRRSQERG

SEQ ID NO: 38532 - protein, 25 aa, Homo sapiens
MTGVSSCALVSSFVLLDMLGPSLRL

SEQ ID NO: 38533 - protein, 25 aa, Homo sapiens
MDEMPNLRSRGGVENEKSFTAVETC

SEQ ID NO: 38534 - protein, 25 aa, Homo sapiens
MARAMDSLLWMKLRHSFHLFCILGF

SEQ ID NO: 38535 - protein, 45 aa, Homo sapiens
MLAFWAPNWHWEGVTESTRLIPGPTFKRSSTYNPSISLKTKTSLN

SEQ ID NO: 38536 - protein, 26 aa, Homo sapiens
LSLGRGVSSDPLGLSGELRQSHCNYF

SEQ ID NO: 38537 - protein, 26 aa, Homo sapiens
MRQESVPSKLLDPVNLLGKVSEAPVC

SEQ ID NO: 38538 - protein, 26 aa, Homo sapiens
LYPGLWGENRSLEVDEQASGLPGRRA

SEQ ID NO: 38539 - protein, 26 aa, Homo sapiens
MGLTLLLPVTTSLTSYTFSTMEWLSL

SEQ ID NO: 38540 - protein, 26 aa, Homo sapiens
MKRLQWPQPQQRHRRWLRCGWPELGW

SEQ ID NO: 38541 - protein, 26 aa, Homo sapiens
EVPFLTSLLLGTASRAVSAFALLAAS

SEQ ID NO: 38542 - protein, 56 aa, Homo sapiens
MHRLWIGPAFFLMTSLSVSGAVIPRNGGPGGVSSGPCLLQLLCGQAGSSTIRKIPS

SEQ ID NO: 38543 - protein, 26 aa, Homo sapiens
EDPLDPRAGCRAHTWVRPRTGTLLPL

SEQ ID NO: 38544 - protein, 27 aa, Homo sapiens
AGGVPVKKTGYCPEAYILPQLSFLEIL

SEQ ID NO: 38545 - protein, 27 aa, Homo sapiens
AAAAGVGLLRCATVSVATVSLAGPELC

SEQ ID NO: 38546 - protein, 27 aa, Homo sapiens
MSRRPSVGDCVTRGGPLVKFQARPLRF

SEQ ID NO: 38547 - protein, 28 aa, Homo sapiens
MTCAQSLISRRPGGPIGPPGWLQGPHLG

SEQ ID NO: 38548 - protein, 28 aa, Homo sapiens
MALQGCGLRPHRESTARGSPKSEVLGER

SEQ ID NO: 38549 - protein, 28 aa, Homo sapiens
MLHGPWFVTIVFLMASRWNRETWSPWPV

SEQ ID NO: 38550 - protein, 28 aa, Homo sapiens
MGYMCKEYRLLVKPEVLLYFLGDPGRPC

SEQ ID NO: 38551 - protein, 29 aa, Homo sapiens
ELTSVLIPVAPAVTISALLGLTAAPLDSV

SEQ ID NO: 38552 - protein, 29 aa, Homo sapiens [sequence omitted]

SEQ ID NO: 38553 - protein, 123 aa, Homo sapiens
MSRWTLSISCGSWESTVAQRLQSWTQECPPTSSADLRAPCAVYPDQTSVDAFVRSITCKRACISFPVPRERLAFYSSLGRDRRMLNKSTIRVLSGYLLPKKRTLLSRHCLAYYPSKDCSFVDF

SEQ ID NO: 38554 - protein, 29 aa, Homo sapiens
MRLGGGRVGPSTKTCPQGPPPPPLLLPPA

SEQ ID NO: 38555 - protein, 29 aa, Homo sapiens
MPFLHLHNMSVTWLARPGAQPHVESSPLL

SEQ ID NO: 38556 - protein, 29 aa, Homo sapiens
CFIFFFLIFPYSSHTRGPNCTSSFSENTC

SEQ ID NO: 38557 - protein, 29 aa, Homo sapiens
RILGPLTLLTRFLFLAYCLVHHSRTKRGR

SEQ ID NO: 38558 - protein, 29 aa, Homo sapiens
KLISARLFATFASCFRCVCCVLLRAPQSP

SEQ ID NO: 38559 - protein, 29 aa, Homo sapiens
MNVPRMRMLPKAKIKSSQRINMKYINYFL

SEQ ID NO: 38560 - protein, 29 aa, Homo sapiens
MEERDPPTKKRVFCELHSGGKRLGMLEIK

SEQ ID NO: 38561 - protein, 20 aa, Homo sapiens
MAWVQTAPQPLGRRGPSEPF

SEQ ID NO: 38562 - protein, 30 aa, Homo sapiens
MAEPGVRRPRRRRRRRRRRRRPLSARASGP

SEQ ID NO: 38563 - protein, 30 aa, Homo sapiens
RRRRGSHRLAPALWTLSRSGAETAAARELF

SEQ ID NO: 38564 - protein, 30 aa, Homo sapiens
MGGGPAAGGPGRVTPGARPAPDPDPRGAAP

SEQ ID NO: 38565 - protein, 30 aa, Homo sapiens [sequence omitted]

SEQ ID NO: 38566 - protein, 30 aa, Homo sapiens
ARAAGSWVFFSAICSRRRLLLLPLLLPLPP

SEQ ID NO: 38567 - protein, 30 aa, Homo sapiens
ACAGPPRSLPALSVARGARSLRPRPGPRQA

SEQ ID NO: 38568 - protein, 30 aa, Homo sapiens
MRFPQSPGRSLGSRASRAPAEPARPRSRRG

SEQ ID NO: 38569 - protein, 30 aa, Homo sapiens [sequence omitted]

SEQ ID NO: 38570 - protein, 30 aa, Homo sapiens
MAGSDSLLSGVFLVFLDLEVVPCGYLHGRR

SEQ ID NO: 38571 - protein, 9 aa, Homo sapiens
MTVARPRRR

SEQ ID NO: 38572 - protein, 31 aa, Homo sapiens
KVDSVQESKLLLLTVQRLTGACLHCNKGLIY

SEQ ID NO: 38573 - protein, 31 aa, Homo sapiens
MAPPISGRLHPPPAGARGAAGWEQANVLRPG

SEQ ID NO: 38574 - protein, 31 aa, Homo sapiens
QRRPKKSLLEGDQGGKRRCFGPASKKREGIA

SEQ ID NO: 38575 - protein, 31 aa, Homo sapiens
MKKEQKRDLTVAERGIFFPRWRLLHDRTRSI

SEQ ID NO: 38576 - protein, 31 aa, Homo sapiens
MTIFARLHCTFSQVSSLSLMCDTSSWTRYFS

SEQ ID NO: 38577 - protein, 29 aa, Homo sapiens
MLIHLQERLRKRALNIRKNTSSVLRSYLF

SEQ ID NO: 38578 - protein, 31 aa, Homo sapiens
MTGSDSKVLCFLLLALMGLAPTTVNGQQREL

SEQ ID NO: 38579 - protein, 32 aa, Homo sapiens
MWLLSLRRSVVARTATMSLQAARYPSPGLEPV

SEQ ID NO: 38580 - protein, 40 aa, Homo sapiens
MSRWQPGWAGRAGSNGTSPRSFFPRIQCGPSGGRGAALRS

SEQ ID NO: 38581 - protein, 32 aa, Homo sapiens
MERPQRSGAARERKAAVSWEPRKPQGRQLASE

SEQ ID NO: 38582 - protein, 6 aa, Homo sapiens
MKRRPW

SEQ ID NO: 38583 - protein, 33 aa, Homo sapiens
LRAPAPERCPVPGEQRDLKEQVPLPQTSAVTSQ

SEQ ID NO: 38584 - protein, 9 aa, Homo sapiens
MVSVSAFPA

SEQ ID NO: 38585 - protein, 33 aa, Homo sapiens [sequence omitted]

SEQ ID NO: 38586 - protein, 33 aa, Homo sapiens
VFLLRCSEGPILLPSPPSWLRGRRPPGPREENS

SEQ ID NO: 38587 - protein, 34 aa, Homo sapiens
SPHSLFSFLLFLKKIFRILLVGVDDIFTVFTDTK

SEQ ID NO: 38588 - protein, 15 aa, Homo sapiens
MAAPGSDRLLGLRRE

SEQ ID NO: 38589 - protein, 35 aa, Homo sapiens
MVTKVIRPKFEAHPLHSRCAVLLLFPLMCEAQLHN

SEQ ID NO: 38590 - protein, 35 aa, Homo sapiens
MFVASNVLWSFLLQSDLGLESLIFATDVCSFQCTC

SEQ ID NO: 38591 - protein, 36 aa, Homo sapiens
MTASEAEEPCKKSDCPAGEIKWRGQETTWRENAQPS

SEQ ID NO: 38592 - protein, 36 aa, Homo sapiens
PAFARFRSSSSPLLPLLLLLRLLAEAGGSSGGGGGG

SEQ ID NO: 38593 - protein, 36 aa, Homo sapiens
EEKHIFSFACIIRVSTPLLSFLATLLQSSTNYPCPG

SEQ ID NO: 38594 - protein, 36 aa, Homo sapiens
MAQLLGSSDPPASASGVAAGTAGTCHHAWLKHKVFS

SEQ ID NO: 38595 - protein, 10 aa, Homo sapiens
MYWRPDQKPF

SEQ ID NO: 38596 - protein, 37 aa, Homo sapiens
MATLPCPRRSPGPPAPRTRLATQSPPAMAGSSWSVAC

SEQ ID NO: 38597 - protein, 37 aa, Homo sapiens
LALLYLQAGSPEIPAPNPPCTLGPALLPPERTFLQLF

SEQ ID NO: 38598 - protein, 38 aa, Homo sapiens
GRRAVAALALGTGLVASGNSLAPAAVRVTPHPAPSRHG

SEQ ID NO: 38599 - protein, 38 aa, Homo sapiens
MLGISSATFFGIQLLKTNRMQIPQLQVMKTVLGKLKTT

SEQ ID NO: 38600 - protein, 11 aa, Homo sapiens
MLKMMTFFQGL

SEQ ID NO: 38601 - protein, 38 aa, Homo sapiens
MVGPSASSCSGPSSGVWGRRNRLRGPDNGPPPQHPGLA

SEQ ID NO: 38602 - protein, 39 aa, Homo sapiens
MPSRRRGGSSLIPDVGYLSEVDCPWPEHFPKIILSKISV

SEQ ID NO: 38603 - protein, 39 aa, Homo sapiens
MGRPPAGSPPSPMPLPAREGGRRDPVGPRPPRRLPHAGL

SEQ ID NO: 38604 - protein, 39 aa, Homo sapiens
MRSYRIPLLVISSQESKSKPLLSFTLNILCFIAQNIQFF

SEQ ID NO: 38605 - protein, 18 aa, Homo sapiens
MEMAKISLGIYGPGEVME

SEQ ID NO: 38606 - protein, 18 aa, Homo sapiens
MYFLKLKRQVQTERKIDS

SEQ ID NO: 38607 - protein, 23 aa, Homo sapiens
MVKPISLTGEQRQDVSLSTSSSQ

SEQ ID NO: 38608 - protein, 40 aa, Homo sapiens
MLKKEKYKRVCAGLPLVVTVEAFTRLSIWHYYERSPDRRT

SEQ ID NO: 38609 - protein, 24 aa, Homo sapiens
MGSMSLLGLGTRRKQDIFTRKTKY

SEQ ID NO: 38610 - protein, 41 aa, Homo sapiens
MCVRAVAGALTAGARHPRGPARACGRGRPGGGGGRSRPGRA

SEQ ID NO: 38611 - protein, 26 aa, Homo sapiens
MGGAGPSAVPVKMAAPSRVRCGRLCL

SEQ ID NO: 38612 - protein, 41 aa, Homo sapiens
MHLNLKEDNFKTVLSFPWFHHFHILNQITSVSDNSIIYLSH

SEQ ID NO: 38613 - protein, 27 aa, Homo sapiens
MRRCRRPCPAGRGEGGGGRSPVVATVA

SEQ ID NO: 38614 - protein, 42 aa, Homo sapiens
RPARSTLNCGRALPCCSCCSPRRGGGLWRWSLARRDVEEESL

SEQ ID NO: 38615 - protein, 28 aa, Homo sapiens
MLQLGPPLSERSFAALKLTGEGKASPGV

SEQ ID NO: 38616 - protein, 42 aa, Homo sapiens
MMLQWQEQLKFIIVLRERSSAVLGRDSRTPGDPHLGAPGHGL

SEQ ID NO: 38617 - protein, 31 aa, Homo sapiens
MTPFPWCIHIIVHLVKTMKIIYNATLLFLVS

SEQ ID NO: 38618 - protein, 42 aa, Homo sapiens [sequence omitted]

SEQ ID NO: 38619 - protein, 32 aa, Homo sapiens [sequence omitted]

SEQ ID NO: 38620 - protein, 53 aa, Homo sapiens
MRPPCARSPEGQGHPQARPLAPPAGPEVRDAGAAAERAPGRRLPPGSAAGSQA

SEQ ID NO: 38621 - protein, 44 aa, Homo sapiens
AAARNPPQGRTHRRSTPGPAPGDPVRERARACAGAAARRRGDAR

SEQ ID NO: 38622 - protein, 61 aa, Homo sapiens
MTSRELETASSNRAFPLPQEDATRMLAAGHHDSDSDSWPPPARLCAGRHSAREDAPGSGRK

SEQ ID NO: 38623 - protein, 45 aa, Homo sapiens
CFALPEKISGLINSSGLLKQLPRIFNPFPQKLIEYTFLLSTRSCC

SEQ ID NO: 38624 - protein, 45 aa, Homo sapiens
MTVSLFLLLATSQSQDGCCDSGSCPNSRQQEGHGAAPASSCLPIP

SEQ ID NO: 38625 - protein, 89 aa, Homo sapiens [sequence omitted]

SEQ ID NO: 38626 - protein, 138 aa, Homo sapiens
MATRSSAVSASSAMAAAMAVCVATPRARKAMLPASGRGSLPAGRAAGGGGCAGCCGCCRDALTRSRKGTRAAPPALEASHSYLPACASVMLLRKSMPLPVSDAECPPRPSNPPSSWAWARGRPSRGWGTFLQVTNGCG

SEQ ID NO: 38627 - protein, 46 aa, Homo sapiens [sequence omitted]

SEQ ID NO: 38628 - protein, 46 aa, Homo sapiens
LASENPEPGTLDCCKLSLVLISAKRVCCRVRSRGRCLVNTSAGGKA

SEQ ID NO: 38629 - protein, 46 aa, Homo sapiens [sequence omitted]

SEQ ID NO: 38630 - protein, 46 aa, Homo sapiens [sequence omitted]

SEQ ID NO: 38631 - protein, 46 aa, Homo sapiens
MGIHPAFKGSQSLRKKVTRLRGAGAAGISGSEASEGRRGAGAWATG

SEQ ID NO: 38632 - protein, 47 aa, Homo sapiens
MHLLLLPVIFLPWVLPQHKHTSATPGFSSEKQFMSETENQTANVKFY

SEQ ID NO: 38633 - protein, 8 aa, Homo sapiens
MAVRGGRL

SEQ ID NO: 38634 - protein, 47 aa, Homo sapiens
MIASLISGGWVLWLGKGLIRFVEAFHGLPELAPGRSSHPRVPSVRFG

SEQ ID NO: 38635 - protein, 47 aa, Homo sapiens
PCFLFWTGSWGVLWQSIAPCTREKSRNDIFLGCISLPWSSSSSSQKH

SEQ ID NO: 38636 - protein, 48 aa, Homo sapiens
MKTQSWLLHSLFFFPSPDFSKSTAQRRRQQNPILVQLLRTLHFPRRKN

SEQ ID NO: 38637 - protein, 48 aa, Homo sapiens
MGITSGPPVCITFPPLCSKKNHFSTSSVIMMKLVLTEWQLWIFNSNSQ

SEQ ID NO: 38638 - protein, 48 aa, Homo sapiens
LSYPGLEGSDARLRGGLRCASGSVSQIVNNLGKARKKLSPSCLYPLLL

SEQ ID NO: 38639 - protein, 49 aa, Homo sapiens
WVWPAALVSAVSCALHAGSALQGLLSAQRTPAARGRRGPELPPAAVFTH

SEQ ID NO: 38640 - protein, 49 aa, Homo sapiens [sequence omitted]

SEQ ID NO: 38641 - protein, 49 aa, Homo sapiens
AAGRALAVGAAAGSAAAATEAAGAAARAAGLGRGAEPGPGSRAARVWGT

SEQ ID NO: 38642 - protein, 49 aa, Homo sapiens [sequence omitted]

SEQ ID NO: 38643 - protein, 10 aa, Homo sapiens
MKSRDLSLLL

SEQ ID NO: 38644 - protein, 51 aa, Homo sapiens
MRETGPALSSQSSSSSSSGRGRVFRRFLSAARTRWQRPRRGAEPGLGGAAC

SEQ ID NO: 38645 - protein, 51 aa, Homo sapiens
RTAESRPTRTTRASGALDAGGDAGETPAGGRRGLCQQSEQPRGPIPHILQV

SEQ ID NO: 38646 - protein, 51 aa, Homo sapiens
GKLVAAAAVVFSWCPAETAAAQGVAGPTQDLPGPSALRDKGPALAKADGQE

SEQ ID NO: 38647 - protein, 13 aa, Homo sapiens
MAACPCFATVPTL

SEQ ID NO: 38648 - protein, 52 aa, Homo sapiens
MALTCPAAAAGSGAAVRGSGRKSSSSFKRGVEGGGGGDGGGDGGGAARGPGC

SEQ ID NO: 38649 - protein, 52 aa, Homo sapiens
MSSFGFSIAPFVFLLHVIPQHQSAQAQGAQEQRRAGSREGPTMSFWGALNGN

SEQ ID NO: 38650 - protein, 17 aa, Homo sapiens
FCLFSRELRPLVLVIFV

SEQ ID NO: 38651 - protein, 53 aa, Homo sapiens
ATAPGLFTFLTKLGITVALGLAGRRGCKKKRGTEHPEVPSIPSCTCPSPTVQQ

SEQ ID NO: 38652 - protein, 53 aa, Homo sapiens
AGSFSLRLIAAVTRQQRLASSVTAPILATFASLCQEQSPPPWQIVLGRVRVLG

SEQ ID NO: 38653 - protein, 54 aa, Homo sapiens
LGAVECGSENQVKKSCYLGHGLRETSKKPVTENDLFERASSLSKFTNQNLALKK

SEQ ID NO: 38654 - protein, 55 aa, Homo sapiens
RAGFWLSSLFLHVFSLTRSLSSRWSNSGSQPHYFLTLLECICAFTVSVCKRCLAY

SEQ ID NO: 38655 - protein, 15 aa, Homo sapiens
MMLPPPPPPRSEKPR

SEQ ID NO: 38656 - protein, 55 aa, Homo sapiens
PQVPEVLCRSASLSHFQDHNSQRLRLHDVSLFARSLPELAGLRPARGPQRRRDPS

SEQ ID NO: 38657 - protein, 17 aa, Homo sapiens
MRRAWRPRLLGAALVAH

SEQ ID NO: 38658 - protein, 56 aa, Homo sapiens
LVPVIIRYWLLWVWAGLEPEGDLFFLSYATPGGEGGRFQTPVSPLPFYSQASLAPV

SEQ ID NO: 38659 - protein, 57 aa, Homo sapiens
GDKHSAAVAAAALLRVLSLCRRCPAHWPPPSLVERGCQRGSLSPAPRGPQRAPQRAP

SEQ ID NO: 38660 - protein, 58 aa, Homo sapiens
SIICNIYVLSLLLSLVCSVDSPVEWSEPECPGLWPPSERAVLRGIATLGNLCSCGFSD

SEQ ID NO: 38661 - protein, 58 aa, Homo sapiens
MFYWQRLGLALLASVLGFFLCTAGLALLTSPGVIEHPCACCHPLPVCRIPDSVSGDRN

SEQ ID NO: 38662 - protein, 58 aa, Homo sapiens
MNPVKGDRPGSPRNIYSCDSHKMEKGLNFCFFKELVFCVCVYTASSHQPNCLAPLQLR

SEQ ID NO: 38663 - protein, 59 aa, Homo sapiens
MSREAGLSLLLLVHSVACLSLSVEPGAGCRGGERTPPRKRIKRHPSSPKPLPKITDKLA

SEQ ID NO: 38664 - protein, 59 aa, Homo sapiens
ANAESGAARTPAGAVRRNRRVAAADRGRLGDGPEVPEGGRRTVNLSRVEVGLGKGQREA

SEQ ID NO: 38665 - protein, 59 aa, Homo sapiens
LLLVLSLCFWFASFGPWGPGKTRHRIARTQSSSPRLLSPQQLGFRGECPARWLHRPWRS

SEQ ID NO: 38666 - protein, 23 aa, Homo sapiens
MAALTPGERSRRRPRGPERSSRG

SEQ ID NO: 38667 - protein, 59 aa, Homo sapiens
MATNFLNKEDRTLNRRISHLQGTLPFILHFVTNLQNSINWVGFHPFLAKFLKLNPLVRV

SEQ ID NO: 38668 - protein, 59 aa, Homo sapiens
MCKSTTGARLHTSKKSGVGGSATFASVAPPCSPLCPRHSLMLVLRWAELGGGGNCNWWL

SEQ ID NO: 38669 - protein, 60 aa, Homo sapiens [sequence omitted]

SEQ ID NO: 38670 - protein, 61 aa, Homo sapiens
MEPLSTHSLQGSRRVSLRRKCDDGNRGWKMEEDPESRNAGRKEKPGFSPKASRWNTALPPP

SEQ ID NO: 38671 - protein, 61 aa, Homo sapiens
MRCGRAAQEASGGTCKGTSRELPPSAQTEPRGARERAGGGAHGLGRRGGIWQRRVGLGQLG

SEQ ID NO: 38672 - protein, 62 aa, Homo sapiens
EQPDQVPLAVLPGSLILALVYFQNQGSGPYGIAQVAAQAQYLRTGPSPFPLWDLSSGPSLLR

SEQ ID NO: 38673 - protein, 62 aa, Homo sapiens
GLSLAGGRALSRRRRSSFPSRGLGGTVPRVRAASSAWPSHANAWSPRAAAAALKVPHILPSG

SEQ ID NO: 38674 - protein, 62 aa, Homo sapiens
QHRPPARPARPAPRLSRLSASSVARGAALVLWPGPWQPSREASRGGGGPCRLRRGAGRGGTL

SEQ ID NO: 38675 - protein, 27 aa, Homo sapiens
MGVTIPALLAARSGCESSGVDAAWGKP

SEQ ID NO: 38676 - protein, 63 aa, Homo sapiens
FPFRPAPFPLLLPLGVAAAAAAAARERGCFEGSGTLQSGDVGRLEGEKAGGRVGRRWRRAVRG

SEQ ID NO: 38677 - protein, 63 aa, Homo sapiens
MSGAQSSLISASLRVAGPRAVCITGALQTRAAKPITAPPTGQACPPPGRDPIHHQAWPVRSSS

SEQ ID NO: 38678 - protein, 63 aa, Homo sapiens
DFPSPVVSSPLPFASWAEKLLPPGNNRLPLLAGCYCPEPALQGTAGQTVSGVQRRLWTRRGPR

SEQ ID NO: 38679 - protein, 64 aa, Homo sapiens
MRRPRLPAQASGSKACVPGIRGGHFSIPSFRATTWVRRGDVGSYVCGTAPAKLKNESSGLTKLN

SEQ ID NO: 38680 - protein, 65 aa, Homo sapiens
DDTKDVKVITKLPDRYIFQHQGADQHRSVIQKSGFVLERAQGLRRTQKQVKITLGTTVYQKINFC

SEQ ID NO: 38681 - protein, 32 aa, Homo sapiens
MAVGGTAVITRRLLGRSGFSFQVTIRKAKFAV

SEQ ID NO: 38682 - protein, 66 aa, Homo sapiens
IIFLLQYKFLTVSVSIWEDSPFFISISDGCLTASLNVFVLDFRHANQILLINSVSGHDISILYFKD

SEQ ID NO: 38683 - protein, 33 aa, Homo sapiens
MSATPATPRGKKSLPGVDSMTFPSCAPRCLDRV

SEQ ID NO: 38684 - protein, 67 aa, Homo sapiens
APGRRRGAGPDEALGREGRGHRKSRGRQSSRESGERKRRPRRRRAALGPGSGRRTRELAPPAAAELG

SEQ ID NO: 38685 - protein, 67 aa, Homo sapiens
KRGGRGGGGGGVGGGGDGGAEAKAAAGAARRARPGAERAGGRSGGPSGRLRRAAEAVALGGGTKSSD

SEQ ID NO: 38686 - protein, 69 aa, Homo sapiens
MCRRQNAKLTLQGATAGARDQPAVSHPSIQGIYCTVLFLEVRHTRLLYKRKIPGAQKRKGLHFESPLEC

SEQ ID NO: 38687 - protein, 71 aa, Homo sapiens
PFYFWGFVFVLNFPVTFSGLTSHVGGVYEWRRAWVLGTGGQGSFCPGVPGCSACSARPLLGATRPETQLVP

SEQ ID NO: 38688 - protein, 71 aa, Homo sapiens
MARPGPRAAASAPPPARSPGLLGLPRRRRGPEPEPEPEGVPGFLAPLPGRLRRGRPGERAPLCGAGGEVDP

SEQ ID NO: 38689 - protein, 71 aa, Homo sapiens
PPPTPLHVRVSLGSVHLARPVLGLLLLLTTTTTTGAASAVPGVSSCSGHTAPGDCSSSNQNLGLTGTLAPK

SEQ ID NO: 38690 - protein, 72 aa, Homo sapiens
MRTQPQSDSRPGSGGGGRGVGGGDFRTCDFRTTLAGGAAFSRGRPEETLRGPVALPLLLPDPAASLTEPAAG

SEQ ID NO: 38691 - protein, 73 aa, Homo sapiens
NRSRVRTGDTARRPRPRFLLPPPSPPPPPPLIGADAAAAPSFPRAVAAESVFSPPPPPPPQERRASGASVTEG

SEQ ID NO: 38692 - protein, 74 aa, Homo sapiens
VLVHADKALSFSLLETETRKADTPRPGTHVGAHPGLHTAVSPAPEVAATLSLQCIGLCTARQPLLAGAGFPLPA

SEQ ID NO: 38693 - protein, 75 aa, Homo sapiens
NCIVSRFNLFLLAIPHLNRADGLGRLLYFPKSLWILETSRKRKEVARAPERSRGRERRGQRERAGVRAAKATGAK

SEQ ID NO: 38694 - protein, 48 aa, Homo sapiens
MESPSRAGGVGLGKAASPLCSESSGYCGAFPRRSARRHLHLGPTSWAG

SEQ ID NO: 38695 - protein, 50 aa, Homo sapiens
MFVRGRSLPLRSTRESMKVPATPGLEKTALAMGRSPSCGGRWSVQGSGNR

SEQ ID NO: 38696 - protein, 51 aa, Homo sapiens
MEKAHRIPLKFNEKKAASRHIRVTFLNFKDETFYKHPVRESRLLTKGQKSG

SEQ ID NO: 38697 - protein, 76 aa, Homo sapiens [sequence omitted]

SEQ ID NO: 38698 - protein, 79 aa, Homo sapiens [sequence omitted]

SEQ ID NO: 38699 - protein, 79 aa, Homo sapiens
GTSTLFTEVKVFFWLLLPLWLPAFLPSHLAELWREGEEEVRAPARRGRFPSGSLSVRCSRSVGGKWRLAEGAGSVAAAG

SEQ ID NO: 38700 - protein, 81 aa, Homo sapiens
GGTGGGASLSAGRGGRGVSWSCRQCGPAPSPGCPRRDPSSALGARTLGPRGAGRLASLPVDPSQRSDGALPGPGAHGSALL

SEQ ID NO: 38701 - protein, 81 aa, Homo sapiens
VVGAADSPPPPSSSPHRRSFAVCRELCRVHELECKRHQRIPALSPGLRLATLDIPGLLFNRENSPAFLLLSSPKSRTLICL

SEQ ID NO: 38702 - protein, 65 aa, Homo sapiens [sequence omitted]

SEQ ID NO: 38703 - protein, 68 aa, Homo sapiens; identical to SEQ ID NO: 22677

SEQ ID NO: 38704 - protein, 84 aa, Homo sapiens
RFFPQASGLFGALVACLPNSAASPRQEHFLPRLLKLVRGFPTSQKSFIGPPLETSDRSHRRLASGICPHPRGQVRDQRPAKPSP

SEQ ID NO: 38705 - protein, 85 aa, Homo sapiens
QGRPRVAAASTNSRTARAERPQRASDAGRRVTQSGPLRAAPEAAVGGRGGSGGGDGFVGAARCSVSGGWQQGTPDTSPSPPNRAF

SEQ ID NO: 38706 - protein, 85 aa, Homo sapiens
QHRPFAAAVAAAAAVAAAAATAAAATAAAWPWLETSHYTQEQPLPQLSSSSFASSSSTPPLYYPLCHPPQLQGRHSKVGGRKDVH

SEQ ID NO: 38707 - protein, 79 aa, Homo sapiens
MESSSRNNTRPVRPPLHWKTAPGRFCRSVPLTEFRLSAWSVVLWSPRTQAACMCLRPHGPNTRTSSGTGRPARPPRSGQ

SEQ ID NO: 38708 - protein, 85 aa, Homo sapiens
LQPIGQRGRQRAQRLATAPARPPRRSGSECAEVSRCVVDSWCWLPLFRRPGTGGGERAELALPLPGRRRSRRGPRPPPPTALSAC

SEQ ID NO: 38709 - protein, 85 aa, Homo sapiens
EWRVPDGGGQRLSRSPGWLRSPAALPGHSPPRGPGGVRRPLPAPLGRPGAGPWLVSLPDAATAAPARLRRLSSEPASGPSLGSCP

SEQ ID NO: 38710 - protein, 86 aa, Homo sapiens
MNKTLIPWVQINMILLPPSPFRHGCGSGGRRGSKVLIPSSLCQALCVWGFDPWVQAGLGHAASLPVPALAPSQMPSRQHLGISQLG

SEQ ID NO: 38711 - protein, 86 aa, Homo sapiens
RETCFFHGHHDRLLLPFKSRVAGSGHKATSSPLLPRLGRGKVSLRRRNQPGNRKAGEGGGLHQQGNPGASLSYRRSCERGQREAGR

SEQ ID NO: 38712 - protein, 87 aa, Homo sapiens
MEPSHGRYWTTNVHNMKPKCGTHSSIIFLFQWVTRMELRCCLQEKLTTGFYFSNLIGGYAGTVSRLSIFNPVSKNFFTTITFRFLPL

SEQ ID NO: 38713 - protein, 87 aa, Homo sapiens [sequence omitted]

SEQ ID NO: 38714 - protein, 87 aa, Homo sapiens
GRDFRLPASGLAVSGEWDPIPWGYVGEVGGCSCRGFLLVSSRNGGGARCGWANPGSPRTLRSARQGARACQGRRAGVNVASVGLQPR

SEQ ID NO: 38715 - protein, 87 aa, Homo sapiens
ASLLWFLLWVLWDGAWLWPRGLSRRGAGRGNAATLSLVSRLRRPVSEVSGAVNKGSGLASGLRSHVWKRGASSICVYIIDYAREFSR

SEQ ID NO: 38716 - protein, 88 aa, Homo sapiens [sequence omitted]

SEQ ID NO: 38717 - protein, 88 aa, Homo sapiens
RRGGLRVGLDARAAAQRLNRCGPPRPPLPTLASAVSSLASPTFLLLCCLRFWSSAVLAARPEESPRPPRSRFPLARSRRDFGTVSPSG

SEQ ID NO: 38718 - protein, 88 aa, Homo sapiens
MCCSLSKSPKPSKAARSPLGRNSHWNSCSLTGEWNGLSQGSRNQPCRSQLWSHSQERLTAPWTITFASACSCAYCGNYSRSYGTRRGR

SEQ ID NO: 38719 - protein, 90 aa, Homo sapiens
GVSIRPLSLGRCWGRWQLQTRGLALLTAVCSTGVPRGTCSQQVAQAVTQLRRCEWRGHRGGQGRGRRGARGSSAGDNLRAFVDNCLYAKH

SEQ ID NO: 38720 - protein, 91 aa, Homo sapiens [sequence omitted]

SEQ ID NO: 38721 - protein, 92 aa, Homo sapiens
PFYFWGFVFVLNFPVTFSGLTSHVGGVYEWRRAWVLGTGGQGSFCPGVPGCSACSARPLLGATRPETQLGQLGGLCPPSPPVLWAAQLTLFP

SEQ ID NO: 38722 - protein, 96 aa, Homo sapiens
MASPRRESLGMVFSTVKTFEPPERLTPAPLRGHFIQKLNHSEFQHCRGSSGSVHRHRPSIVTNGAIEGPRPKLGPLHCRRRPLARPGSVGAARLED

SEQ ID NO: 38723 - protein, 99 aa, Homo sapiens
RARSSRTHLPAPGTLHRRGRSGPGEVAANSRARTAPGEPRDSGEGTRAEGASFLPPAPGSREPRLEAPGAPAGQSRAAAAAAASLFSPSRAPERRGDRP

SEQ ID NO: 38724 - protein, 102 aa, Homo sapiens
KFSSDSERSAGLEAFSPGTEAGYSLTWASKKNPKKVVDSASRDWLTGRYFLDSTKADEGEATAEAGNSGESAASQNLAVQGRDGEEKQSGAHPVQRFAPPAR

SEQ ID NO: 38725 - protein, 103 aa, Homo sapiens
GACVGLATRLANPPRPARPPRLRTPEVPTRTSDAPRPSATPPGADPLNSAGPGARGPHDPRAPARTPRAPAPARVPDAAPAPTHRAPQQGPEPPAAGRGGAPR

SEQ ID NO: 38726 - protein, 104 aa, Homo sapiens [sequence omitted]

SEQ ID NO: 38727 - protein, 105 aa, Homo sapiens
GPPSGLVVFLLPFLNLQSLRYFSSCDPVSLDPGEAAGGLVLLLSHPGGSSLAKSRFPGAARASLSPRRRPPGSRRGDRVASPAPRSGGGGGASGLHLRRELGEEV

SEQ ID NO: 38728 - protein, 105 aa, Homo sapiens
RAGGPLPPVLLAVDRCACQIRREAGIEGDSAAKGARPGQAGGRLPGAGTAATRPLGRQEDRPTDLRKGSESAAVKLAGAGGTKPISATERSGRRVPVSSGGAGSR

SEQ ID NO: 38729 - protein, 107 aa, Homo sapiens
DPVKVTGPCFFYFKSCSSLLNEKTYSDPLGSNQRHSELLIASSLELLRNQNFLHKCKKFYQGVPLPNSISQGCTRFQKRLLLIHQAFCDRLILRSLVFQRLCGHEAL

SEQ ID NO: 38730 - protein, 107 aa, Homo sapiens
MLPTRGKRRRGSVVPKALERPQRATAAGCFVQPEAQRTRRERALRGLAEGAPREPARRVSARPPALGLCAALGSGAEESAGTRAPRGAPRPPPARVESVGKAAARWR

SEQ ID NO: 38731 - protein, 107 aa, Homo sapiens
MPACAGCLAAGAGGRGGASVGEGGAGVAGLRRGRLRGASPDCRRTGAPGMRCRVSRRCGCCKAEWRFCRAASPWWLLASWLGSVKGVKPLGSRRGAGAGRDSCLSFV

SEQ ID NO: 38732 - protein, 108 aa, Homo sapiens
MRTGPAHAECHWEQGHTPLPGEDRTCRPLLAIPSAGHAIDFHETNTYLEIRFFLYLLKEQEFPSISWTKTEATFAASFPARCHSEIFVIPGRYEDCQGTQFHGRKVFF

SEQ ID NO: 38733 - protein, 7 aa, Homo sapiens
MEQVCRG

SEQ ID NO: 38734 - protein, 114 aa, Homo sapiens
MNDTPWHQLPFSDPSPARSRRRLRFRYLGWQRGWGEPQLQARLGCAAANELRTLGGSAPAPAPAGLSPEGCSFGGGAVAEVQLVGRETSPLGGCSRNLGEEGGKRRGERGRRCF

SEQ ID NO: 38735 - protein, 114 aa, Homo sapiens
GVNTESAQRGCSPGRRGHPTRPQGRAEGNCREARAASLPEVCELLEASRPLLSPAAALWRCFSIPAGDHRRVPLARFLVTGQGILLPDPRHCPREFALPTVLCQASVERSPPPA

SEQ ID NO: 38736 - protein, 115 aa, Homo sapiens
GGRLSRSRPLIVEAARSRSEGEWGAGERATAGRRERRAAQRSAGAGPRRNHSRRGAARAGRRRVPTPTRPDSARCSPVRGAAAAADGTAGTAGVLPPPPRSRRGRGLLRAGAPGP

SEQ ID NO: 38737 - protein, 115 aa, Homo sapiens
VRDWAWGGGARAGGPLPPVLLAVDRCACQIRREAGIEGDSAAKGARPGQAGGRLPGAGTAATRPLGRQEDRPTDLRKGSESAAVKLAGAGGTKPISATERSGRRVPVSSGGAGSR

SEQ ID NO: 38738 - protein, 115 aa, Homo sapiens
EGGARSLGCSPAGESWLSRGAGLLTSKRSRGDRGSCSLCGPLSSCPPRGPPAGAQREGAALASTPPPSPAWGKNVPPAVLRLRALRPVVRNLEEEETKAAVGTGELGTWVWANKR

SEQ ID NO: 38739 - protein, 117 aa, Homo sapiens
RRCAAAVGGSRRRTGNAAAAAILTEQGAGRGPEEVGCWGSHHRAAVVVVAVVSASRAAALGEAAQSCLLYGNHRAAAAATPSSQPLRDPAARAALAEGGAGGRGGGGGGGGGGGPVQ

SEQ ID NO: 38740 - protein, 118 aa, Homo sapiens
RPRASSEASPRVGPRAGEPERSLSVPESLERPDDPRVSEPRTPSPGAPERQAGSRRRRRQSGAPASAPVPPGRLQRREPKPPGGRGRAENDAEEAPTEAPRHRACCRVALRAPLADSL

SEQ ID NO: 38741 - protein, 119 aa, Homo sapiens
MAPLASFMALCSGFTVPSPAAAAMAPSGGGGGGSRGAGRATGGPERSRRWCWSRPSSGPQEGTRPHFRRRAPSARTAGPTGVSGGGGRVRVGCRDGAGPLRRLETGLARRAPHGVAMGV

SEQ ID NO: 38742 - protein, 126 aa, Homo sapiens
DVSLISTVWQFRSLARTEGSHLVPLCLRVCIVASICVCVSVLSLFGVFFFFFVFCHCLPGSCPRSPSSVSLSLPRALGVLWKAAQYWRGQNDLPALSPWALCRSYLSSTGFLEWRAAAANGRSDIV

SEQ ID NO: 38743 - protein, 126 aa, Homo sapiens
AALRLRFLYFCLFDVANKHLVPRLREGSGLSACRASGLGRFAGEEGRGRARANRCCFSPGWGPGTGSSWHPVHLWPAAVLAELFADRGPREPATGASHRGPRGRRAEEGAGAAAAVAAATWAGGGV

SEQ ID NO: 38744 - protein, 127 aa, Homo sapiens
RPQRVAEQGVDTEWGAEREGGGGGAKVLERKLQKGTGNLPGRRRRLRLLWAPGLRSSRGVRSCGLAPVWLPRRARTAEPRRSVARAVPSAAALGRCSPAIRSASAAAAPWREGGEGAGKKRDVHCGT

SEQ ID NO: 38745 - protein, 127 aa, Homo sapiens
YTKGKGTLLTGSTTSALWGITHSSAPEESVTSRRASPRLVAPRPASPRRLPSIRTSSKEELVPLPDPLPRASCVESLDWAELWRARRQTATLCCRGREEEGKARHTGVVQLRKDSVSCRGRRDLTAR

SEQ ID NO: 38746 - protein, 128 aa, Homo sapiens
MGSGWQRAPRPSRSRALSLPGEGADGARRRARWRGAPGAAAPSGHEDGRGLRQDAAAVREPGPGRRGGGGGGRRPPAPQPQRPGARARAAAGVAAAAAEGPARAAAERAHAAEEAERRWGPDSIKKNI

SEQ ID NO: 38747 - protein, 131 aa, Homo sapiens
QPPPPRVQGRGPESRARRRPRLPAPARPLPLSLSPRAGALGRRPRISQPSSPPPPSPCGRAPADAEGQPCASPGRIPGLTAGDRAPAGPRGAAGAARLCGEQPSGAPSSPAPARAGTVPEHAVAEFPHSSS

SEQ ID NO: 38748 - protein, 132 aa, Homo sapiens [sequence omitted]

SEQ ID NO: 38749 - protein, 133 aa, Homo sapiens
EPLGVSAVGRGIPGLAHSGVAERLAYRPSANQRGAAASPRLTPASWGRGEGAQVHRALSAHFRARSGRDVGRRADTPLFGCLLCLAGVLSELAPPHGPRHLRREACGPSARLHKRSGQCSVFTRPVSDRPPRG

SEQ ID NO: 38750 - protein, 133 aa, Homo sapiens
PTYGCRGWPRVGNLPDSPGPPPPPGLVFPSCGGWEVGPGAGVRRESAPATRSREVVATLVELRVGSGGGGRGGPSEDPARGANKRRRGGTRAAAGRGAGAGARSGASRPAVRTFWREGAGESAPEGSARWRGG

SEQ ID NO: 38751 - protein, 135 aa, Homo sapiens
MAPQLLWDWPVDETADIFLASPWSPWGRKGVQVSAGVLLKGCSGGVKSDSPCSPPTSQQMESQCLHLQRRRPNVECPLECTSSLVPSSWKLIELPDLSHKASEKEIQNLKFVLQNKNHPFKNAFAAVPSDDGFIA

SEQ ID NO: 38752 - protein, 52 aa, Homo sapiens
MRSREAGPKLRRIQEPANGSPGAVSETGGYREERLSDAEIMGKLLAWLAVGM

SEQ ID NO: 38753 - protein, 139 aa, Homo sapiens
MPRWLLLSLTSAMPRWLLLSLTFAGLFPLRRRQLLGSCGGREGGGPDQPAGSPAPLRPPLPRTLRLRKYRGNPLPPEVRGSLPEGAPWSRAPLGGHLEARCGPRTREERAAGAAATAGGGAGSPGAAEGRPVLHMLPLG

SEQ ID NO: 38754 - protein, 145 aa, Homo sapiens
MPSPGAPAPRAHGRGGAPDRFLWAVRAEVLRCQAAWQRPQFCLTLQGGRLRRAAVLPGRGSGHWSRPGLAPRPRWCRTAWPFVRFPGSTQMRAPTLHRAPEPWNPGWQGQTRVKGSYSPFLRTEGPPGPLSGEPLLCTGLVSGER

SEQ ID NO: 38755 - protein, 148 aa, Homo sapiens
AEGEVAAASPASAILLLWLLGTSWAKAPRRRDAPSSSVPRVTAGVGEDPSSCGAGAFQAGSHWRHPWDAEQPENPGVASAAARVCLPRPPGSAVHSRAALSVWRPRSRRAASEDAAGPEPRGKCWPSPLSAPRGVREALPRPQSRLPG

SEQ ID NO: 38756 - protein, 11 aa, Homo sapiens
MEYRTQSSRPE

SEQ ID NO: 38757 - protein, 13 aa, Homo sapiens
MRETAAAVAAARH

SEQ ID NO: 38758 - protein, 76 aa, Homo sapiens
MAVSCNPLATTARDGVEAGPCPRSSRQPRRWQALSPSRGVPGYRIAKPDLIKPRSQRTALQNRPYLDQVSQFLEPE

SEQ ID NO: 38759 - protein, 14 aa, Homo sapiens
MSVLGPGGARSPLD

SEQ ID NO: 38760 - protein, 17 aa, Homo sapiens
MESPSLNRFQPVPSLRH

SEQ ID NO: 38761 - protein, 17 aa, Homo sapiens
MPPLETDIEMETRYKKD

SEQ ID NO: 38762 - protein, 18 aa, Homo sapiens
MALGLLPERGRRRQRGSC

SEQ ID NO: 38763 - protein, 16 aa, Homo sapiens
MEVAAGTEWRLQQRLL

SEQ ID NO: 38764 - protein, 18 aa, Homo sapiens
MAAPSARGRDPLLLRLGL

SEQ ID NO: 38765 - protein, 19 aa, Homo sapiens
MAGAGAQLSVAAAAALPRS

SEQ ID NO: 38766 - protein, 20 aa, Homo sapiens
MKTNTEMVCLRNFKRCRPPD

SEQ ID NO: 38767 - protein, 20 aa, Homo sapiens
MEARPPPPPRGSEPRAGRRP

SEQ ID NO: 38768 - protein, 20 aa, Homo sapiens
MSPAPRCCLERGGTWREAAP

SEQ ID NO: 38769 - protein, 20 aa, Homo sapiens
MEGARFYNPPGTPKRRPRAT

SEQ ID NO: 38770 - protein, 24 aa, Homo sapiens
MNVSISSEMNQIMMHHYHRRNSCL

SEQ ID NO: 38771 - protein, 6 aa, Homo sapiens
METVAQ

SEQ ID NO: 38772 - protein, 24 aa, Homo sapiens
VLRVVVLFLVFSSRSPLPVWTSKV

SEQ ID NO: 38773 - protein, 25 aa, Homo sapiens
MATWSQPDSGFSGNPPGKCGGGGTL

SEQ ID NO: 38774 - protein, 25 aa, Homo sapiens
MDSSWEALLLCSSWTMFLINICLSA

SEQ ID NO: 38775 - protein, 25 aa, Homo sapiens
MRRNLQGITTDSESAVICMHNMECS

SEQ ID NO: 38776 - protein, 27 aa, Homo sapiens
MPPAARWPGPQCPKRALMVPSDRLALL

SEQ ID NO: 38777 - protein, 6 aa, Homo sapiens
MWNMLL

SEQ ID NO: 38778 - protein, 32 aa, Homo sapiens
MTMVTPGGEFVTSPARRDSMSMAMVAWWKGRN

SEQ ID NO: 38779 - protein, 33 aa, Homo sapiens
MLAAGDPRSPDRSRAGQPATMVALRPVQQLQGG

SEQ ID NO: 38780 - protein, 35 aa, Homo sapiens
MIRMLSRSFWAHDGRYIQKVPRRNFLLEKMKKQYL

SEQ ID NO: 38781 - protein, 35 aa, Homo sapiens
MLIRGCPISLRGATAGRAERIREEEVRGAVHHKRH

SEQ ID NO: 38782 - protein, 38 aa, Homo sapiens
MVGAHSPRRPVLRSTSFTSSSASSFSGAAGGAVWRPAS

SEQ ID NO: 38783 - protein, 39 aa, Homo sapiens
MKSTEEGSPAPCVPVQNWPICRPPENHMGLDLDILNRKG

SEQ ID NO: 38784 - protein, 41 aa, Homo sapiens [sequence omitted]

SEQ ID NO: 38785 - protein, 42 aa, Homo sapiens
MIPCSKRTFHLFNHSNFHSHLHDYRKHGVCRLVTHKKIAVRW

SEQ ID NO: 38786 - protein, 44 aa, Homo sapiens
MHSVFFLPFLFFFFPGSELLMQIGLYSLMMQPDSFQDYVARVEF

SEQ ID NO: 38787 - protein, 46 aa, Homo sapiens
PILDTVLAAESWGNLLLVWSLVTARLPRSLLVSSPGVPRGLEEAAA

SEQ ID NO: 38788 - protein, 49 aa, Homo sapiens
MSADRGAVPVTVASHPGLWRAGLAAPPRLAPFMATGGGGWRSWARRRPL

SEQ ID NO: 38789 - protein, 51 aa, Homo sapiens [sequence omitted]

SEQ ID NO: 38790 - protein, 52 aa, Homo sapiens
MGRWRVSSVESWPFASTGGKLAIATAGTGTQAAPRPFLIRPPDSWALALALM

SEQ ID NO: 38791 - protein, 52 aa, Homo sapiens
MAAETGYWRCLPESRTCAEEAVHLWPAVLRDPRWGNPGDGAWPCYMRGPRLE

SEQ ID NO: 38792 - protein, 53 aa, Homo sapiens
SVLILAVCARVGLHSAVLGLRAGVGARVCASPPHPPSPKNKRRTGRRAQKINK

SEQ ID NO: 38793 - protein, 55 aa, Homo sapiens
MFGLFPPKQPIFKTWTLGLAPGHLSLYQDSTSVLPTSSSDSWYPLGWRLLIFLPN

SEQ ID NO: 38794 - protein, 55 aa, Homo sapiens [sequence omitted]

SEQ ID NO: 38795 - protein, 10 aa, Homo sapiens
MPSLPRCDSP

SEQ ID NO: 38796 - protein, 64 aa, Homo sapiens
MTMWTLSFQGFLEPLQSLGARLLSGNCRIFLLTPACLAPAAPVESTDASSASSLGKSGVVSRRA

SEQ ID NO: 38797 - protein, 67 aa, Homo sapiens
MSRGTIPAMKRECQYNSHKGSSCGPQTKNHCITSADCIGEKGAGTEKPEINHLSFLEKRMLRLSRFG

SEQ ID NO: 38798 - protein, 83 aa, Homo sapiens
MRGRARGVVFPRTPGGLPRPVLCTSSPTKGETEAPRGVGRAGWTSGPAAGAVVRPLCRGGPLGFRVSSGKRLAGEPRPRPSLG

SEQ ID NO: 38799 - protein, 88 aa, Homo sapiens [sequence omitted]

SEQ ID NO: 38800 - protein, 6 aa, Homo sapiens
MKHRSR

SEQ ID NO: 38801 - protein, 14 aa, Homo sapiens
MAAGALCVVLLLGR

SEQ ID NO: 38802 - protein, 6 aa, Homo sapiens
MWMFWS

SEQ ID NO: 38803 - protein, 9 aa, Homo sapiens
IRPDGEKKA

SEQ ID NO: 38804 - protein, 85 aa, Homo sapiens
LEARVGNMSESELGRKWDRCLADAVVKIGTGFGLGIVFSLTFFKRRMWPLAFGSGMGLGMAYSNCQHDFQAPYLLHGKYVKEQEQ

SEQ ID NO: 38805 - skipped

SEQ ID NO: 38806 - protein, 179 aa, Homo sapiens
IMAQDQGEKENPMRELRIRKLCLNICVGESGDRLTRAAKVLEQLTGQTPVFSKARYTVRSFGIRRNEKIAVHCTVRGAKAEEILEKGLKVREYELRKNNFSDTGNFGFGIQEHIDLGIKYDPSIGIYGLDFYVVLGRPGFSIADKKRRTGCIGAKHRISKEEAMRWFQQKYDGIILPGK

SEQ ID NO: 38807 - protein, 183 aa, Homo sapiens
IFASTGACAVAHSPQPTAMGWDLTVKMLAGNEFQVSLSSSMSVSELKAQITQKIGVHAFQQRLAVHPSGVALQDRVPLASQGLGPGSTVLLVVDKCDEPLSILVRNNKGRSSTYEVRLTQTVAHLKQQVSGLEGVQDDLFWLTFEGKPLEDQLPLGEYGLKPLSTVFMNLRLRGGGTEPGGRS

SEQ ID NO: 38808 - protein, 2036 aa, Homo sapiens
LRPLLPLLVVAACVLPGAGGTCPERALERREEEANVVLTGTVEEILNVDPVQHTYSCKVRVWRYLKGKDLVARESLLDGGNKVVISGFGDPLICDNQVSTGDTRIFFVNPAPPYLWPAHKNELMLNSSLMRITLRNLEEVEFCVEDKPGTHFTPVPPTPPDACRGMLCGFGAVCEPNAEGPGRASCVCKKSPCPSVVAPVCGSDASTYSNECELQRAQCSQQRRIRLLSRGPCGSRDPCSNVTCSFGSTCARSADGLTASCLCPATCRGAPEGTVCGSDGADYPGECQLLRRACARQENVFKKFDGPCDPCQGALPDPSRSCRVNPRTRRPEMLLRPESCPARQAPVCGDDGVTYENDCVMGRSGAARGLLLQKVRSGQCQGRDQCPEPCRFNAVCLSRRGRPRCSCDRVTCDGAYRPVCAQDGRTYDSDCWRQQAECRQQRAIPSKHQGPCDQAPSPCLGVQCAFGATCAVKNGQAACECLQACSSLYDPVCGSDGVTYGSACELEATACTLGREIQVARKGPCDRCGQCRFGALCEAETGRCVCPSECVALAQPVCGSDGHTYPSECMLHVHACTHQISLHVASAGPCETCGDAVCAFGAVCSAGQCVCPRCEHPPPGPVCGSDGVTYGSACELREAACLQQTQIEEARAGPCEQAECGSGGSGSGEDGDCEQELCRQRGGIWDEDSEDGPCVCDFSCQSVPGSPVCGSDGVTYSTECELKKARCESQRGLYVAAQGACRGPTFAPLPPVAPLHCAQTPYGCCQDNITAARGVGLAGCPSACQCNPHGSYGGTCDPATGQCSCRPGVGGLRCDRCEPGFWNFRGIVTDGRSGCTPCSCDPQGAVRDDCEQMTGLCSCKPGVAGPKCGQCPDGRALGPAGCEADASAPATCAEMRCEFGARCVEESGSAHCVCPMLTCPEANATKVCGSDGVTYGNECQLKTIACRQGLQISIQSLGPCQEAVAPSTHPTSASVTVTTPGLLLSQALPAPPGALPLAPSSTAHSQTTPPPSSRPRTTASVPRTTVWPVLTVPPTAPSPAPSLVASAFGESGSTDGSSDEELSGDQEASGGGSGGLEPLEGSSVATPGPPVERASCYNSALGCCSDGKTPSLDAEGSNCPATKVFQGVLELEGVEGQELFYTPEMADPKSELFGETARSIESTLDDLFRNSDVKKDFRSVRLRDLGPGKSVRAIVDVHFDPTTAFRAPDVARALLRQIQVSRRRSLGVRRPLQEHVRFMDFDWFPAFITGATSGAIAAGATARATTASRLPSSAVTPRAPHPSHTSQPVAKTTAAPTTRRPPTTAPSRVPGRRPPAPQQPPKPCDSQPCFHGGTCQDWALGGGFTCSCPAGRGGAVCEKVLGAPVPAFEGRSFLAFPTLRAYHTLRLALEFRALEPQGLLLYNGNARGKDFLALALLDGRVQLRFDTGSGPAVLTSAVPVEPGQWHRLELSRHWRRGTLSVDGETPVLGESPSGTDGLNLDTDLFVGGVPEDQAAVALERTFVGAGLRGCIRLLDVNNQRLELGIGPGAATRGSGVGECGDHPCLPNPCHGGAPCQNLEAGRFHCQCPPGRVGPTCADEKSPCQPNPCHGAAPCRVLPEGGAQCECPLGREGTFCQTASGQDGSGPFLADFNGFSHLELRGLHTFARDLGEKMALEVVFLARGPSGLLLYNGQKTDGKGDFVSLALRDRRLEFRYDLGKGAAVIRSREPVTLGAWTRVSLERNGRKGALRVGDGPRVLGESPVPHTVLNLKEPLYVGGAPDFSKLARAAAVSSGFDGAIQLVSLGGRQLLTPEHVLRQVDVTSFAGHPCTRASGHPCLNGASCVPREAAYVCLCPGGFSGPHCEKGLVEKSAGDVDTLAFDGRTFVEYLNAVTESEKALQSNHFELSLRTEATQGLVLWSGKATERADYVALAIVDGHLQLSYNLGSQPVVLRSTVPVNTNRWLRVVAHREQREGSLQVGNEAPVTGSSPLGATQLDTDGALWLGGLPELPVGPALPKAYGTGFVGCLRDVVVGRHPLHLLEDAVTKPELRPCPTP

SEQ ID NO: 38809 - protein, 343 aa, Homo sapiens
VQSSGTWIGAGAMGGEQEEERFDGMLLAMAQQHEGGVQELVNTFFSFLRRKTDFFIGGEEGMAEKLITQTFSHHNQLAQKTRREKRARQEAERREKAERAARLAKEAKSETSGPQIKELTDEEAERLQLEIDQKKDAENHEAQLKNGSLDSPGKQDTEEDEEEDEKDKGKLKPNLGNGADLPNYRWTQTLSELDLAVPFCVNFRLKGKDMVVDIQRRHLRVGLKGQPAIIDGELYNEVKVEESSWLIEDGKVVTVHLEKINKMEWWSRLVSSDPEINTKKINPENSKLSDLDSETRSMVEKMMYDQRQKSMGLPTSDEQKKQEILKKFMDQHPEMDFSKAKFN

SEQ ID NO: 38810 - protein, 148 aa, Homo sapiens
IPVLTWFFPIIGHMGICTSTGVIRDFAGPYFVSEDNMAFGKPAKYWKLDPAQVYASGPNAWDTAVHDASEEYKHRMHNLCCDNCHSHVALALNLMRYNNSTNWNMVTLCFFCLLYGKYVSVGAFVKTWLPFILLLGIILTVSLVFNLR

SEQ ID NO: 38811 - protein, 450 aa, Homo sapiens
LDRTSSQMQRRDDPAARMSRSSGRSGSMDPSGAHPSVRQTPSRQPPLPHRSRGGGGGSRGGARASPATQPPPLLPPSATGPDATVGGPAPTPLLPPSATASVKMEPENKYLPELMAEKDSLDPSFTHAMQLLTAEIEKIQKGDSKKDDEENYLDLFSHKNMKLKERVLIPVKQYPKFNFVGKILGPQGNTIKRLQEETGAKISVLGKGSMRDKAKEEELRKGGDPKYAHLNMDLHVFIEVFGPPCEAYALMAHAMEEVKKFLVPDMMDDICQEQFLELSYLNGVPEPSRGRGVPVRGRGAAPPPPPVPRGRGVGPPRGALVRGTPVRGAITRGATVTRGVPPPPTVRGAPAPRARTAGIQRIPLPPPPAPETYEEYGYDDTYAEQSYEGYEGYYSQSQGDSEYYDYGHGEVQDSYEAYGQDDWNGTRPSLKAPPARPVKGAYREHPYGRY

SEQ ID NO: 38812 - protein, 438 aa, Homo sapiens
TLDPRIPPARLPAMADKEAAFDDAVEERVINEEYKIWKKNTPFLYDLVMTHALEWPSLTAQWLPDVTRPEGKDFSIHRLVLGTHTSDEQNHLVIASVQLPNDDAQFDASHYDSEKGEFGGFGSVSGKIEIEIKINHEGEVNRARYMPQNPCIIATKTPSSDVLVFDYTKHPSKPDPSGECNPDLRLRGHQKEGYGLSWNPNLSGHLLSASDDHTICLWDISAVPKEGKVVDAKTIFTGHTAVVEDVSWHLLHESLFGSVADDQKLMIWDTRSNNTSKPSHSVDAHTAEVNCLSFNPYSEFILATGSADKTVALWDLRNLKLKLHSFESHKDEIFQVQWSPHNETILASSGTDRRLNVWDLSKIGEEQSPEDAEDGPPELLFIHGGHTAKISDFSWNPNEPWVICSVSEDNIMQVWQMAENIYNDEDPEGSVDPEGQGS

SEQ ID NO: 38813 - protein, 476 aa, Homo sapiens
IMADMQNLVERLERAVGRLEAVSHTSDMHRGYADSPSKAGAAPYVQAFDSLLAGPVAEYLKISKEIGGDVQKHAEMVHTGLKLERALLVTASQCQQPAENKLSDLLAPISEQIKEVITFREKNRGSKLFNHLSAVSESIQALGWVAMAPKPGPYVKEMNDAAMFYTNRVLKEYKDVDKKHVDWVKAYLSIWTELQAYIKEFHTTGLAWSKTGPVAKELSGLPSGPSAGSCPPPPPPCPPPPPVSTISCSYESASRSSLFAQINQGESITHALKHVSDDMKTHKNPALKAQSGPVRSGPKPFSAPKPQTSPSPKRATKKEPAVLELEGKKWRVENQENVSNLVIEDTELKQVAYIYKCVNTTLQIKGKINSITVDNCKKLGLVFDDVVGIVEIINSKDVKVQVMGKVPTISINKTDGCHAYLSKNSLDCEIVSAKSSEMNVLIPTEGGDFNEFPVPEQFKTLWNGQKLVTTVTEIAG

SEQ ID NO: 38814 - protein, 122 aa, Homo sapiens
LKRRPEKSQGHEHRVAMPFLDIQKRFGLNIDRWLTIQSGEQPYKMAGRCHAFEKEWIECAHGIGYTRAEKECKIEYDDFVECLLRQKTMRRAGTIRKQRDKLIKEGKYTPPPHHIGKGEPRP

SEQ ID NO: 38815 - protein, 17 aa, Homo sapiens
LSTTTLSMMCLLYVCFM

SEQ ID NO: 38816 - protein, 224 aa, Homo sapiens
LGRVCSSGPAVPTPAAVAAMTGLALLYSGVFVAFWACALAVGVCYTIFDLGFRFDVAWFLTETSPFMWSNLGIGLAISLSVVGAAWGIYITGSSIIGGGVKAPRIKTKNLVSIIFCEAVAIYGIIMAIVISNMAEPFSATDPKAIGHRNYHAGYSMFGAGLTVGLSNLFCGVCVGIVGSGAALADAQNPSLFVKILIVEIFGSAIGLFGVIVAILQTSRVKMGD

SEQ ID NO: 38817 - protein, 30 aa, Homo sapiens
LTSAAALTCVLLLSMTGMTTSSSRSVLWKT

SEQ ID NO: 38818 - protein, 92 aa, Homo sapiens
RRGDNPFPKNADGTICYDSTHYKETWKALEALVAKGLVQALGLSNFNSRQIDDILSVASVRPAVLQVAGPAESDLHPQKYHSFSNPSEHQGV

SEQ ID NO: 38819 - protein, 13 aa, Homo sapiens
LPAGQSVLLQLPQ

SEQ ID NO: 38820 - protein, 36 aa, Homo sapiens
MAGVKALVALSFSGAIGLTFLMLGCALEDYGCTSLK

SEQ ID NO: 38821 - protein, 23 aa, Homo sapiens
ILWGKCLLLLLEMINKRRSIWGE

SEQ ID NO: 38822 - protein, 8 aa, Homo sapiens
LVFFIGTF

SEQ ID NO: 38823 - protein, 17 aa, Homo sapiens
LFRRMRVKLIIMLGNAW

SEQ ID NO: 38824 - protein, 135 aa, Homo sapiens
ISFIPHESQVYTLDVPDAFYYCYSPDPGNAKGKDAIMETMADQIVTVCATLDENPGVRYKSKPLDNASKLAQLVEKKLEDYYKIDEKSLIKGKTHSQLLIIDRGFDPVSTVLHELTFQAMAYDLLPIENDTYKQV

SEQ ID NO: 38825 - protein, 184 aa, Homo sapiens
MVRYSLDPENPTESCKSRGSNLRVHFKNTRETAQAIKGMHIRKATKYLKDVTLQKQCVPFRRYNGGVGRCAQAKQWGWTQGRWPKKSAEFLLHMLKNTESNAELKGLDVDSLVIEHIQVNKAPKMRRRTYRAHGRINPYMSSPCHIEMILTEKEQIVPKPEEEVAQKKRISQKKLKKQKLMARE

SEQ ID NO: 38826 - protein, 30 aa, Homo sapiens
LCVGCSTVLCQPTGGKARLTEGCSFRKKQH

SEQ ID NO: 38827 - protein, 575 aa, Homo sapiens
TQLDAGAGRRVGDRVSEGAARAGGRAPEGERGGGGGSAAGRAGRGMSMPDAMPLPGVGEELKQAKEIEDAEKYSFMATVTKAPKKQIQFADDMQEFTKFPTKTGRRSLSRSISQSSTDSYSSAASYTDSSDDEVSPREKQQTNSKGSSNFCVKNIKQAEFGRREIEIAEQDMSALISLRKRAQGEKPLAGAKIVGCTHITAQTAVLIETLCALGAQCRWSACNIYSTQNEVAAALAEAGVAVFAWKGESEDDFWWCIDRCVNMDGWQANMILDDGGDLTHWVYKKYPNVFKKIRGIVEESVTGVHRLYQLSKAGKLCVPAMNVNDSVTKQKFDNLYCCRESILDGLKRTTDVMFGGKQVVVCGYGEVGKGCCAALKALGAIVYITEIDPICALQACMDGFRVVKLNEVIRQVDVVITCTGNKNVVTREHLDRMKNSCIVCNMGHSNTEIDVTSLRTPELTWERVRSQVDHVIWPDGKRVVLLAEGRLLNLSCSTVPTFVLSITATTQALALIELYNAPEGRYKQDVYLLPKKMDEYVASLHLPSFDAHLTELTDDQAKYLGLNKNGPFKPNYYRY

SEQ ID NO: 38828 - protein, 379 aa, Homo sapiens
IAGVVVLLLLQGGSAYKLVCYFTNWSQDRQEPGKFTPENIDPFLCSHLIYSFASIENNKVIIKDKSEVMLYQTINSLKTKNPKLKILLSIGGYLFGSKGFHPMVDSSTSRLEFINSIILFLRNHNFDGLDVSWIYPDQKENTHFTVLIHELAEAFQKDFTKSTKERLLLTAGVSAGRQMIDNSYQVEKLAKDLDFINLLSFDFHGSWEKPLITGHNSPLSKGWQDRGPSSYYNVEYAVGYWIHKGMPSEKVVMGIPTYGHSFTLASAETTVGAPASGPGAAGPITESSGFLAYYEICQFLKGAKITRLQDQQVPYAVKGNQWVGYDDVKSMETKVQFLKNLNLGGAMIWSIDMDDFTGKSCNQGPYPLVQAVKRSLGSL

SEQ ID NO: 38829 - protein, 272 aa, Homo sapiens
IGVTGTLRLLPGLSLTMLSRVVLSAAATAAPSLKNAAFLGPGVLQATRTFHTGQPHLVPVPPLPEYGGKVRYGLIPEEFFQFLYPKTGVTGPYVLGTGLILYALSKEIYVISAETFTALSVLGVMVYGIKKYGPFVADFADKLNEQKLAQLEEAKQASIQHIQNAIDTEKSQQALVQKRHYLFDVQRNNIAMALEVTYRERLYRVYKEVKNRLDYHISVQNMMRRKEQEHMINWVEKHVVQSISTQQEKETIAKCIADLKLLAKKAQAQPVM

SEQ ID NO: 38830 - protein, 352 aa, Homo sapiens
KMSFPCKFVASFLLIFNVSSKGAVSKEITNALETWGALGQDINLDIPSFQMSDDIDDIKWEKTSDKKKIAQFRKEKETFKEKDTYKLFKNGTLKIKHLKTDDQDIYKVSIYDTKGKNVLEKIFDLKIQERVSKPKISWTCINTTLTCEVMNGTDPELNLYQDGKHLKLSQRVITHKWTTSLSAKFKCTAGNKVSKESSVEPVSCPEKGLDIYLIIGICGGGSLLMVFVALLVFYITKRKKQRSRRNDEELETRAHRVATEERGRKPHQIPASTPQNPATSQHPPPPPGHRSQAPSHRPPPPGHRVQHQPQKRPPAPSGTQVHQQKGPPLPRPRVQPKPPHGAAENSLSPSSN

SEQ ID NO: 38831 - protein, 39 aa, Homo sapiens
RKVARWCWKALWCVWTTVSICGMETSYPPGCRPSRMLST

SEQ ID NO: 38832 - protein, 136 aa, Homo sapiens; identical to SEQ ID NO: 33469

SEQ ID NO: 38833 - protein, 133 aa, Homo sapiens
LISVMSGRGKQGGKARAKAKSRSSRAGLQFPVGRVHRLLRKGNYAERVGAGAPVYMAAVLEYLTAEILELAGNAARDNKKTRIIPRHLQLAIRNDEELNKLLGKVTIAQGGVLPNIQAVLLPKKTESHKAKSK

SEQ ID NO: 38834 - protein, 549 aa, Homo sapiens [sequence omitted]

SEQ ID NO: 38835 - protein, 313 aa, Homo sapiens
ISDKDASIVGFFDDSFSEAHSEFLKAASNLRDNYRFAHTNVESLVNEYDDNGDGIILFRPSHLTNKLEDKTVAYTVQKMTSGKIKKFIQENIFGICPHMTEDNKDLIQGKDLLIAYYDVDYEKNAKGSNYWRNRVMMVAKKFLDAGHKLNFAVASRKTFSHELSDFGLESTAGEIPVVAIRTAKGEKFVMQEDFSRDGNALERFLQDYFDGNLKRYLKSEPIPESNDGPVKVVVAENFDEIVNNENKDVLIEFYAPWCGHCKNLEPKYKELGEKLSKDLNIVIAKMDATANDVPSPYEVRVFLPYTSLQPTRS

SEQ ID NO: 38836 - protein, 29 aa, Homo sapiens
MTRSVDNVQFLPFLTTEVNVLCSYRLQPC

SEQ ID NO: 38837 - protein, 268 aa, Homo sapiens
VAAPGGALASVSFDSRDSKMAAQSAPKVVLKSTTKMSLNERFTNMLKNKQPTPVNIRASMQQQQQLASARNRRLAQQMENRPSVQAALKLKQKSLKQRLGKSNIQARLGRPIGALARGAIGGRGLPIIQRGLPRGGLRGGRATRTLLRGGMSLRGQNLLRGGRAVAPRMGLRRGGVRGRGGPGRGGLGRGAMGRGGIGGRGRGMIGRGRGGFGGRGRGRGRGRGALARPVLTKEQLDNQLDAYMSKTKGHLDAELDAYMAQTDPETND

SEQ ID NO: 38838 - protein, 22 aa, Homo sapiens
MEEDATGRRHSLGTTDRLGAAA

SEQ ID NO: 38839 - protein, 333 aa, Homo sapiens
ITSANDMLFLLLPLLAVLPGDGNADGLKEPLSFHVTWIASFYNHSWKQNLVSGWLSDLQTHTWDSNSSTIVFLCPWSRGNFSNEEWKELETLFRIRTIRSFEGIRRYAHELQFEYPFEIQVTGGCELHSGKVSGSFLQLAYQGSDFVSFQNNSWLPYPVAGNMAKHFCKVLNQNQHENDITHNLLSDTCPRFILGLLDAGKAHLQRQVKPEAWLSHGPSPGPGHLQLVCHVSGFYPKPVWVMWMRGEQEQQGTQRGDILPSADGTWYLRATLEVAAGEAADLSCRVKHSSLEGQDIVLYWEHHSSVGFIILAVIVPLLLLIGLALWFRKRCFC

SEQ ID NO: 38840 - protein, 680 aa, Homo sapiens
TEFQGEGTCEMGEPAGVAGTMESPFSPGLFHRLDEDWDSALFAELGYFTDTDELQLEAANETYENNFDNLDFDLDLMPWESDIWDINNQICTVKDIKAEPQPLSPASSSYSVSSPRSVDSYSSTQHVPEELDLSSSSQMSPLSLYGENSNSLSSAEPLKEDKPVTGPRNKTENGLTPKKKIQVNSKPSIQPKPLLLPAAPKTQTNSSVPAKTIIIQTVPTLMPLAKQQPIISLQPAPTKGQTVLLSQPTVVQLQAPGVLPSAQPVLAVAGGVTQLPNHVVNVVPAPSANSPVNGKLSVTKPVLQSTMRNVGSDIAVLRRQQRMIKNRESACQSRKKKKEYMLGLEARLKAALSENEQLKKENGTLKRQLDEVVSENQRLKVPSPKRRVVCVMIVLAFIILNYGPMSMLEQDSRRMNPSVSPANQRRHLLGFSAKEAQDTSDGIIQKNSYRYDHSVSNDKALMVLTEEPLLYIPPPPCQPLINTTESLRLNHELRGWVHRHEVERTKSRRMTNNQQKTRILQGALEQGSNSQLMAVQYTETTSSISRNSGSELQVYYASPRSYQDFFEAIRRRGDTFYVVSFRRDHLLLPATTHNKTTRPKMSIVLPAININENVINGQDYEVMMQIDCQVMDTRILHIKSSSVPPYLRDQQRNQTNTFFGSPPAATEATHVVSTIPESLQ

SEQ ID NO: 38841 - protein, 405 aa, Homo sapiens
IIRAGVLPRNPSFNRASMLLLFLLFEGLCCPGENTAAPQALQSYHLAAEEQLSFRMLQTSSFANHSWAHSEGSGWLGDLQTHGWDTVLGTIRFLKPWSHGNFSKQELKNLQSLFQLYFHSFIQIVQASAGQFQLEYPFEIQILAGCRMNAPQIFLNMAYQGSDFLSFQGISWEPSPGAGIRAQNICKVLNRYLDIKEILQSLLGHTCPRFLAGLMEAGESELKRKVKPEAWLSCGPSPGPGRLQLVCHVSGFYPKPVWVMWMRGEQEQRGTQRGDVLPNADETWYLRATLDVAAGEAAGLSCRVKHSSLGGHDLIIHWGGYSIFLILICLTVIVTLVILVVVDSRLKKQSSNKNILSPHTPSPVFLMGANTQDTKNSRHQFCLAQVSWIKNRVLKKWKTRLNQLW

SEQ ID NO: 38842 - protein, 20 aa, Homo sapiens
LLYLIHKILVCIFLNTVHVP

SEQ ID NO: 38843 - protein, 246 aa, Homo sapiens
LFLLLRGCSSGLRPDPAPMASEELQKDLEEVKVLLEKATRKRVRDALTAEKSKIETEIKNKMQQKSQKKAELLDNEKPAAVVAPITTGYTVKISNYGWDQSDKFVKIYITLTGVHQVPTENVQVHFTERSFDLLVKNLNGKSYSMIVNNLLKPISVEGSSKKVKTDTVLILCRKKVENTRWDYLTQVEKECKEKEKPSYDTETDPSEGLMNVLKKIYEDGDDDMKRTINKAWVESREKQAKGDTEF

SEQ ID NO: 38844 - protein, 5 aa, Homo sapiens
LLAAL

SEQ ID NO: 38845 - protein, 545 aa, Homo sapiens
KMSLRNRLSKSRENPEEDEDQRNPAKESLETPSNGRIDIKQLIAKKIKLTAEAEELKPFFMKEVGSHFDDFVTNLIEKSASLDNGGCALTTFSVLEGEKNNHRAKDLRAPPEQGKIFIARRSLLDELLEVDHIRTIYHMFIALLILFILSTLVVDYIDEGRLVLEFSLLSYAFGKFPTVVWTWWIMFLSTFSVPYFLFQHWATGYSKSSHPLIRSLFHGFLFMIFQIGVLGFGPTYVVLAYTLPPASRFIIIFEQIRFVMKAHSFVRENVPRVLNSAKEKSSTVPIPTVNQYLYFLFAPTLIYRDSYPRNPTVRWGYVAMKFAQVFGCFFYVYYIFERLCAPLFRNIKQEPFSARVLVLCVFNSILPGVLILFLTFFAFLHCWLNAFAEMLRFGDRMFYKDWWNSTSYSNYYRTWNVVVHDWLYYYAYKDFLWFFSKRFKSAAMLAVFAVSAVVHEYALAVCLSFFYPVLFVLFMFFGMAFNFIVNDSRKKPIWNVLMWTSLFLGNGVLLCFYSQEWYARQHCPLKNPTFLDYVRPRSWTCRYVF

SEQ ID NO: 38846 - protein, 15 aa, Homo sapiens
RVMTCFLLALRIISI

SEQ ID NO: 38847 - skipped

SEQ ID NO: 38848 - protein, 306 aa, Homo sapiens
LLQTMDEQSQGMQGPPVPQFQPQKALRPDMGYNTLANFRIEKKIGRGQFSEVYRAACLLDGVPVALKKVQIFDLMDAKARADCIKEIDLLKQLNHPNVIKYYASFIEDNELNIVLELADAGDLSRMIKHFKKQKRLIPERTVWKYFVQLCSALEHMHSRRVMHRDIKPANVFITATGVVKLGDLGLGRFFSSKTTAAHSLVGTPYYMSPERIHENGYNFKSDIWSLGCLLYEMAALQSPFYGDKMNLYSLCKKIEQCDYPPLPSDHYSEELRQLVNMCINPDPEKRPDVTYVYDVAKRMHACTASS

SEQ ID NO: 38849 - protein, 128 aa, Homo sapiens
IKDKQVKYFIHYSGWNKNWDEWVPESRVLKYVDTNLQKQRELQKANQEQYAEGKMRGAAPGKKTSGLQQKNVEVKTKKNKQKTPGNGDGGSTSETPQPPWKKRARVDPTVENEETFMNRVEVKVKIPE

SEQ ID NO: 38850 - protein, 16 aa, Homo sapiens
LREALVTLLLQCLVSL

SEQ ID NO: 38851 - protein, 189 aa, Homo sapiens
VSFHLSTSMGNIFANLFKGLFGKKEMRILMVGLDAAGKTTILYKLKLGEIVTTIPTIGFNVETVEYKNISFTVWDVGGQDKIRPLWRHYFQNTQGLIFVVDSNDRERVNEAREELMRMLAEDELRDAVLLVFANKQDLPNAMNAAEITDKLGLHSLRHRNWYIQATCATSGDGLYEGLDWLSNQLRNQK

SEQ ID NO: 38852 - protein, 26 aa, Homo sapiens
IIPNVVKYSPNCKLLIVSNPVDIFDL

SEQ ID NO: 38853 - protein, 7 aa, Homo sapiens
KMRQRSK

SEQ ID NO: 38854 - protein, 127 aa, Homo sapiens
IMPDPSKSAPAPKKGSKKAVTKAQKKDGKKRKRGRKESYSIYVYKVLKQVHPDTGISSKAMGIMNSFVNDIFERIASEASRLAHYNKRSTITSREVQTAVRLLLPGELAKHAVSEGTKAVTKYTSSK

SEQ ID NO: 38855 - protein, 973 aa, Homo sapiens
LAMLRRPAPALAPAARLLLAGLLCGGGVWAARVNKHKPWLEPTYHGIVTENDNTVLLDPPLIALDKDAPLRFAGEICGFKIHGQNVPFDAVVVDKSTGEGVIRSKEKLDCELQKDYSFTIQAYDCGKGPDGTNVKKSHKATVHIQVNDVNEYAPVFKEKSYKATVIEGKQYDSILRVEAVDADCSPQFSQICSYEIITPDVPFTVDKDGYIKNTEKLNYGKEHQYKLTVTAYDCGKKRATEDVLVKISIKPTCTPGWQGWNNRIEYEPGTGALAVFPNIHLETCDEPVASVQATVELETSHIGKGCDRDTYSEKSLHRLCGAAAGTAELLPSPSGSLNWTMGLPTDNGHDSDQVFEFNGTQAVRIPDGVVSVSPKEPFTISVWMRHGPFGRKKETILCSSDKTDMNRHHYSLYVHGCRLIFLFRQDPSEEKKYRPAEFHWKLNQVCDEEWHHYVLNVEFPSVTLYVDGTSHEPFSVTEDYPLHPSKIETQLVVGACWQEFSGVENDNETEPVTVASAGGDLHMTQFFRGNLAGLTLRSGKLADKKVIDCLYTCKEGLDLQVLEDSGRGVQIQAHPSQLVLTLEGEDLGELDKAMQHISYLNSRQFPTPGIRRLKITSTIKCFNEATCISVPPVDGYVMVLQPEEPKISLSGVHHFARAASEFESSEGVFLFPELRIISTITREVEPEGDGAEDPTVQESLVSEEIVHDLDTCEVTVEGEELNHEQESLEVDMARLQQKGIEVSSSELGMTFTGVDTMASYEEVLHLLRYRNWHARSLLDRKFKLICSELNGRYISNEFKVEVNVIHTANPMEHANHMAAQPQFVHPEHRSFVDLSGHNLANPHPFAVVPSTATVVIVVCVSFLVFMIILGVFRIRAAHRRTMRDQDTGKENEMDWDDSALTITVNPMETYEDQHSSEEEEEEEEEEESEDGEEEDDITSAESESSEEEEGEQGDPQNATRQQQLEWDDSTLSY

SEQ ID NO: 38856 - protein, 34 aa, Homo sapiens
MNNFIFLKFMTLGTSRTGGLCNLRPVGTVQRSEY

SEQ ID NO: 38857 - protein, 102 aa, Homo sapiens
TMLFVGLMRFATVVLGLVSLKNVAVSFAETVKSSAPIFTVIMSRMILGEYTGRPSDREEREELQLQPGRGAAASDRRSPVPPSERHGVRPHGENLPGDFQAQ

SEQ ID NO: 38858 - protein, 5 aa, Homo sapiens
MAGGV

SEQ ID NO: 38859 - protein, 326 aa, Homo sapiens
KNQIRDARKACADATLSQITNNIDPVGRIQMRTRRTLRGHLAKIYAMHWGTDSRLLVSASQDGKLIIWDSYTTNKVHAIPLRSSWVMTCAYAPSGNYVACGGLDNICSIYNLKTREGNVRVSRELAGHTGYLSCCRFLDDNQIVTSSGDTTCALWDIETGQQTTTFTGHTGDVMSLSLAPDTRLFVSGACDASAKLWDVREGMCRQTFTGHESDINAICFFPNGNAFATGSDDATCRLFDLRADQELMTYSHDNIICGITSVSFSKSGRLLLAGYDDFNCNVWDALKADRAGVLAGHDNRVSCLGVTDDGMAVATGSWDSFLKIWN

SEQ ID NO: 38860 - protein, 49 aa, Homo sapiens
VSRFFGNVELMQDLPPASSSCPSMSRREFRKMHFRAKDDDDDDDDDAEM

SEQ ID NO: 38861 - protein, 16 aa, Homo sapiens
MIIGPPRTNYEKRKNI

SEQ ID NO: 38862 - protein, 564 aa, Homo sapiens
VYLVSGLEPSSGPEKKKPSDPSFSCFSSFFLSGFSSLQPAATMPRKKAAAAAWEEPSSGNGTARAGPRKRGGPAGRKRERPERCSSSSGGGSSGDEDGLELDGAPGGGKRAARPATAGKAGGAAVVITEPEHTKERVKLEGSKCKGQLLIFGATNWDLIGRKEVPKQQAAYRNLGQNLWGPHRYGCLAGVRVRTVVSGSCAAHSLLITTEGKLWSWGRNEKGQLGHGDTKRVEAPRLIEGLSHEVIVSAACGRNHTLALTETGSVFAFGENKMGQLGLGNQTDAVPSPAQIMYNGQPITKMACGAEFSMIMDCKGNLYSFGCPEYGQLGHNSDGKFIARAQRIEYDCELVPRRVAIFIEKTKDGQILPVPNVVVRDVACGANHTLVLDSQKRVFSWGFGGYGRLGHAEQKDEMVPRLVKLFDFPGRGASQIYAGYTCSFAVSEVGGLFFWGATNTSRESTMYPKAVQDLCGWRIRSLACGKSSIIVAADESTISWGPSPTFGELGYGDHKPKSSTAAQEVKTLDGIFSEQVAMGYSHSLVIARDESETEKEKIKKLPEYNPRTL

SEQ ID NO: 38863 - protein, 651 aa, Homo sapiens
LILTGPAAGPRSALQHNKMANQVNGNAVQLKEEEEPMDTSSVTHTEHYKTLIEAGLPQKVAERLDEIFQTGLVAYVDLDERAIDALREFNEEGALSVLQQFKESDLSHVQNKSAFLCGVMKTYRQREKQGSKVQESTKGPDEAKIKALLERTGYTLDVTTGQRKYGGPPPDSVYSGVQPGIGTEVFVGKIPRDLYEDELVPLFEKAGPIWDLRLMMDPLSGQNRGYAFITFCGKEAAQEAVKLCDSYEIRPGKHLGVCISVANNRLFVGSIPKNKTKENILEEFSKVTEGLVDVILYHQPDDKKKNRGFCFLEYEDHKSAAQARRRLMSGKVKVWGNVVTVEWADPVEEPDPEVMAKVKVLFVRNLATTVTEEILEKSFSEFGKLERVKKLKDYAFVHFEDRGAAVKAMDEMNGKEIEGEEIEIVLAKPPDKKRKERQAARQASRSTAYEDYYYHPPPRMPPPIRGRGRGGGRGGYGYPPDYYGYEDYYDDYYGYDYHDYRGGYEDPYYGYDDGYAVRGRGGGRGGRGAPPPPRGRGAPPPRGRAGYSQRGAPLGPPRGSRGGRGGPAQQQRGRGSRGSRGNRGGNVGGKRKADGYNQPDSKRRQTNNQQNWGSQPIAQQPLQQGGDYSGNYGYNNDNQEFYQDTYGQQWK

SEQ ID NO: 38864 - protein, 538 aa, Homo sapiens
LSGGSRGSGAMGDAPSPEEKLHLITRNLQEVLGEEKLKEILKERELKIYWGTATTGKPHVAYFVPMSKIADFLKAGCEVTILFADLHAYLDNMKAPWELLELRVSYYENVIKAMLESIGVPLEKLKFIKGTDYQLSKEYTLDVYRLSSVVTQHDSKKAGAEVVKQVEHPLLSGLLYPGLQALDEEYLKVDAQFGGIDQRKIFTFAEKYLPALGYSKRVHLMNPMVPGLTGSKMSSSEEESKIDLLDRKEDVKKKLKKAFCEPGNVENNGVLSFIKHVLFPLKSEFVILRDEKWGGNKTYTAYVDLEKDFAAEVVHPGDLKNSVEVALNKLLDPIREKFNTPALKKLASAAYPDPSKQKPMAKGPAKNSEPEEVIPSRLDIRVGKIITVEKHPDADSLYVEKIDVGEAEPRTVVSGLVQFVPKEELQDRLVVVLCNLKPQKMRGVESQGMLLCASIEGINRQVEPLDPPAGSAPGEHVFVKGYEKGQPDEELKPKKKVFEKLQADFKISEECIAQWKQTNFMTKLGSISCKSLKGGNIS

SEQ ID NO: 38865 - protein, 350 aa, Homo sapiens
KGPELPLVPVKRQRHELLLGAGSGPGAGQQQATPGALLQAGPPRCSSLQAPIMLLSGHEGEVYCCKFHPNGSTLASAGFDRLILLWNVYGDCDNYATLKGHSGAVMELHYNTDGSMLFSASTDKTVAVWDSETGERVKRLKGHTSFVNSCYPARRGPQLVCTGSDDGTVKLWDIRKKAAIQTFQNTYQVLAVTFNDTSDQIISGGIDNDIKVWDLRQNKLTYTMRGHADSVTGLSLSSEGSYLLSNAMDNTVRVWDVRPFAPKERCVKIFQGNVHNFEKNLLRCSWSPDGSKIAAGSADRFVYVWDTTSRRILYKLPGHAGSINEVAFHPDEPIIISASSDKRLYMGEIQ

SEQ ID NO: 38866 - protein, 5 aa, Homo sapiens
MAAPM

SEQ ID NO: 38867 - protein, 270 aa, Homo sapiens
MRAAVAASVGLSEGPAGSRSGRLFRPPSPAPAAPGARLLRLPGSGAVQAASPERAGWTEALRAAVAELRAGAVVAVPTDTLYGLACAASCSAALRAVYRLKGRSEAKPLAVCLGRVADVYRYCRVRVPEGLLKDLLPGPVTLVMERSEELNKDLNPFTPLVGIRIPDHAFMQDLAQMFEGPLALTSANLSSQASSLNVEEFQDLWPQLSLVIDGGQIGDGQSPECRLGSTVVDLSVPGKFGIIRPGCALESTTAILQQKYGLLPSHASYL

SEQ ID NO: 38868 - protein, 151 aa, Homo sapiens
LLSVLRVLLGGFFALVGLAKLSEEISAPVSERMNALFVQFAEVFPLKVFGYQPDPLNYQIAVGFLELLAGLLLVMGPPMLQEISNLFLILLMMGAIFTLAALKESLSTCIPAIVCLGFLLLLNVGQLLAQTKKVVRPTRKKTLSTFKESWK

SEQ ID NO: 38869 - protein, 213 aa, Homo sapiens
LCRTCSPWPSATMEYLIGIQGPDYVLVASDRVAASNIVQMKDDHDKMFKMSEKILLLCVGEAGDTVQFAEYIQKNVQLYKMRNGYELSPTAAANFTRRNLADCLRSRTPYHVNLLLAGYDEHEGPALYYMDYLAALAKAPFAAHGYGAFLTLSILDRYYTPTISRERAVELLRKCLEELQKRFILNLPTFSVRIIDKNGIHDLDNISFPKQGS

SEQ ID NO: 38870 - protein, 30 aa, Homo sapiens
KSKLKKTETQEKNPLPSKETIEQEKQAGES

SEQ ID NO: 38871 - protein, 88 aa, Homo sapiens
VDVSMNTHLKAVKMTPKNREPVQLETLSIRGNNIRYFILLDSLPLDTLLVDVEPKVKSKKREAVAGRGRGRGRGRGRGRGRGRGGPRR

SEQ ID NO: 38872 - protein, 259 aa, Homo sapiens
MLAPLQTGAARFSSYLLSRARKVLGSHLFSPCGVPEFCSISTRKLAAHGFGASMAAMVSFPPQRYHYFLVLDFEATCDKPQIHPQEIIEFPILKLNGRTMEIESTFHMYVQPVVHPQLTPFCTELTGIIQAMVDGQPSLQQVLERVDEWMAKEGLLDPNVKSIFVTCGDWDLKVMLPGQCQYLGLPVADYFKQWINLKKAYSFAMGCWPKNGLLDMNKGLSLQHIGRPHSGIDDCKNIANIMKTLAYRGFIFKQTSKPF

SEQ ID NO: 38873 - protein, 39 aa, Homo sapiens
MSKKIKVDEFVTHNLSFEEINKAFELMHSGKSIRTVVKI

SEQ ID NO: 38874 - protein, 194 aa, Homo sapiens
VDRLLGLRPCVRSAPWPRAPTAMETRPRLGATCLLGFSFLLLVISSDGHNGLGKGFGDHIHWRTLEDGKKEAAASGLPLMVIIHKSWCGACKALKPKFAESTEISELSHNFVMVNLEDEEEPKDEDFSPDGGYIPRILFLDPSGKVHPEIINENGNPSYKYFYVSAEQVVQGMKEAQERLTGDAFRKKHLEDEL

SEQ ID NO: 38875 - protein, 324 aa, Homo sapiens
KMAAPKGSLWVRTQLGLPPLLLLTMALAGGSGTASAEAFDSVLGDTASCHRACQLTYPLHTYPKEEELYACQRGCRLFSICQFVDDGIDLNRTKLECESACTEAYSQSDEQYACHLGCQNQLPFAELRQEQLMSLMPKMHLLFPLTLVRSFWSDMMDSAQSFITSSWTFYLQADDGKIVIFQSKPEIQYAPHLEQEPTNLRESSLSKMSYLQMRNSQAHRNFLEDGESDGFLRCLSLNSGWILTTTLVLSVMVLLWICCATVATAVEQYVPSEKLSIYGDLEFMNEQKLNRYPASSLVVVRSKTEDHEEAGPLPTKVNLAHSEI

SEQ ID NO: 38876 - protein, 175 aa, Homo sapiens
ILTTSHAFPYIKTRVNVTHKEEIILTPIEVAIEDMQKKTQELAFATHQDPADPKMLQMVLQGSVGTTVNQGPLEVAQVFLSEIPSDPKLFRHHNKLRLCFKDFTKRCEDALRKNKSLIGPDQKEYQRELERNYHRLKEALQPLINRKIPQLYKAVLPVTCHRDSFSRMSLRKMDL

SEQ ID NO: 38877 - protein, 200 aa, Homo sapiens
KMSSGNAKIGHPAPNFKATAVMPDGQFKDISLSDYKGKYVVFFFYPLDFTFVCPTEIIAFSDRAEEFKKLNCQVIGASVDSHFCHLAWVNTPKKQGGLGPMNIPLVSDPKRTIAQDYGVLKADEGISFRGLFIIDDKGILRQITVNDLPVGRSVDETLRLVQAFQFTDKHGEVCPAGWKPGSDTIKPDVQKSKEYFSKQK

SEQ ID NO: 38878 - protein, 115 aa, Homo sapiens
MTKKRRNNGRAKKGRGHVQPIRCTNCARCVPKDKAIKTFVIRNIVKAAAVRDISEASVFDAYVLPKLYVKLHYCVSCAIHSKVVRNRSREARKDRTPPSRFRPAGAAPRPPPKPM

SEQ ID NO: 38879 - protein, 28 aa, Homo sapiens
KSGRSYHEEFNPPKEPMKDDITGEPLIR

SEQ ID NO: 38880 - protein, 16 aa, Homo sapiens
LLSTFQQMWISKQEYN

SEQ ID NO: 38881 - protein, 90 aa, Homo sapiens
LAPPTHGPRPTDPRIGPAVACTMSGSSSVAAMKKVVQQLRLEAGLNRVKVSQAAADLKQFCLQNAQHDPLLTGVSSSTNPFRPQKVCSFL

SEQ ID NO: 38882 - protein, 114 aa, Homo sapiens
LPFPVLLLAALPPVLLPGAAGFTPSLDSDFTFTLPAGQKECFYQPMPLKASLEIEYQVLDGAGLDIDFHLASPEGKTLVFEQRKSDGVHTCIRSKNGPGTAVHAYNPSTFRGQV

SEQ ID NO: 38883 - protein, 484 aa, Homo sapiens
LKDRVAAEAKDRELMEFAAENEGKSGGGLHSVAEGVRLSPEPGREGVRDLAGAEEFGGGEEGTGLTGIKEIGDGEEGSGQRPEEIPMDLTVVKQEIIDWPGTEGRLAGQWVEQEVEDRPEVKDENAGVLEVKQETDSSLVVKEAKVGEPEVKEEKVKEEVMDWSEVKEEKDNLEIKQEEKFVGQCIKEELMHGECVKEEKDFLKKEIVDDTKVKEEPPINHPVGCKRKLAMSRCETCGTEEAKYRCPRCMRYSCSLPCVKKHKAELTCNGVRDKTAYISIQQFTEMNLLSDYRFLEDVARTADHISRDAFLKRPISNKYMYFMKNRARRQGINLKLLPNGFTKRKENSTFFDKKKQQFCWHVKLQFPQSQAEYIEKRVPDDKTINEILKPYIDPEKSDPVIRQRLKAYIRSQTGVQILMKIEYMQQNLVRYYELDPYKSLLDNLRNKVIIEYPTLHVVLKGSNNDMKVLHQVKSESTKNVGNEN

SEQ ID NO: 38884 - protein, 53 aa, Homo sapiens
IATVSIAAAVAPLTLFLYRGDGGLSSRRRADAAAGAFQLMWRSRCEATYKSIY

SEQ ID NO: 38885 - protein, 68 aa, Homo sapiens [sequence omitted]

SEQ ID NO: 38886 - protein, 318 aa, Homo sapiens
VKMASTSRLDALPRVTCPNHPDAILVEDYRAGDMICPECGLVVGDRVIDVGSEWRTFSNDKATKDPSRVGDSQNPLLSDGDLSTMIGKGTGAASFDEFGNSKYQNRRTMSSSDRAMMNAFKEITTMADRINLPRNIVDRTNNLFKQVYEQKSLKGRANDAIASACLYIACRQEGVPRTFKEICAVSRISKKEIGRCFKLILKALETSVDLITTGDFMSRFCSNLCLPKQVQMAATHIARKAVELDLVPGRSPISVAAAAIYMASQASAEKRTQKEIGDIAGVADVTIRQSYRLIYPRAPDLFPTDFKFDTPVDKLPQL

SEQ ID NO: 38887 - protein, 248 aa, Homo sapiens
MEGVEEKKKEVPAVPETLKKKRRNFAELKIKRLRKKFAQKMLRKARRKLIYEKAKHYHKEYRQMYRTEIRMARMARKAGNFYVPAEPKLAFVIRIRGINGVSPKVRKVLQLLRLRQIFNGTFVKLNKASINMLRIVEPYIAWRYPNLKSVNELIYKRGYGKINKKRIALTDNALIARSLGKYGIICMEDLIHEIYTVGKRFKEANNFLWPFKLSSPRGGMKKKTTHFVEGGDAGNREDQINRLIRRMN

SEQ ID NO: 38888 - protein, 203 aa, Homo sapiens
LGTSAGWSPTMAAIRKKLVIVGDGACGKTCLLIVFSKDQFPEVYVPTVFENYIADIEVDGKQVELALWDTAGQEDYDRLRPLSYPDTDVILMCFSIDSPDSLENIPEKWTPEVKHFCPNVPIILVGNKKDLRQDEHTRRELAKMKQEPVRSEEGRDMANRISAFGYLECSAKTKEGVREVFEMATRAGLQVRKNKRRRGCPIL

SEQ ID NO: 38889 - protein, 81 aa, Homo sapiens
LKQVHPDTGISSKTMGIMNSFVNDIFERIAGEASRLAHYNKRSTITSREIQTAVRLLLPGELAKHAVSEGTKAVTKYTSSK

SEQ ID NO: 38890 - protein, 82 aa, Homo sapiens
KSTELLIRKLPFQRLVREIAQDFKTDLRFQSSAVTALALQEASEAYLVGLFEDTNLCAIHAKRVTIMPKDIQLVSRIRGERA

SEQ ID NO: 38891 - protein, 129 aa, Homo sapiens
KNENESEKRELVFKEDGQEYAQVIKMLGNGRLEAMCFDGVKRLCHIRGKLRKKVWINTSDIILVGLRDYQDNKADVILKYNADEARSLQAYGELPEHAKINETDTFGPGDDDEIQFDDIGDDDEDIDDI

SEQ ID NO: 38892 - protein, 34 aa, Homo sapiens
LFMAVPGSPTFFPAVVLNLSKAEAVELEVLAGVK

SEQ ID NO: 38893 - protein, 42 aa, Homo sapiens
MLAGAGRPGLPQGRHLCWLLCAFTLKLCQAEAPVQEEKLSGG

SEQ ID NO: 38894 - protein, 334 aa, Homo sapiens
LRVTGATRSIMGPWGEPELLVWRPEAVASEPPVPVGLEVKLGALVLLLVLTLLCSLVPICVLRRPGANHEGSASRQKALSLVSCFAGGVFLATCLLDLLPDYLAAIDEALAALHVTLQFPLQEFILAMGFFLVLVMEQITLAYKEQSGPSPLEETRALLGTVNGGPQHWHDGPGVPQASGAPATPSALRACVLVFSLALHSVFEGLAVGLQRDRARAMELCLALLLHKGILAVSLSLRLLQSHLRAQVVAGCGILFSCMTPLGIGLGAALAESAGPLHQLAQSVLEGMAAGTFLYITFLEILPQELASSEQRILKVILLLAGFALLTGLLFIQI

SEQ ID NO: 38895 - protein, 12 aa, Homo sapiens
MFSGRVWLGLPP

SEQ ID NO: 38896 - protein, 231 aa, Homo sapiens
VFVLLFIFVKRQIMRFAMKSRRGPHVPVGHNAPKDLKEEIDIRLSRVQDIKYEPQLLADDDARLLQLETQGNQSCYNYLYRMKALDAIRTSEIPFHSEGRHPRSLMGKNFRSYLLDLRNTSTPFKGVRKALIDTLLDGYETARYGTGVFGQNEYLRYQEALSELATAVKARIGSSQRHHQSAAKDLTQSPEVSPTTIQVTYLPSSQKSKRAKHFLELKSFKDNYNTLESTL

SEQ ID NO: 38897 - protein, 21 aa, Homo sapiens
MSVLSSGSLVHSRNSMLRSMA

SEQ ID NO: 38898 - protein, 186 aa, Homo sapiens [sequence omitted]

SEQ ID NO: 38899 - protein, 290 aa, Homo sapiens
VAAPELGPGATIEAGAARGPERSGAATAARANLGSRFPARRGARGARSPAMSRSNRQKEYKCGDLVFAKMKGYPHWPARIDEMPEAAVKSTANKYQVFFFGTHETAFLGPKDLFPYEESKEKFGKPNKRKGFSEGLWEIENNPTVKASGYQSSQKKSCVEEPEPEPEAAEGDGDKKGNAEGSSDEEGKLVIDEPAKEKNEKGALKRRAGDLLEDSPKRPKEAENPEGEEKEAATLEVERPLPMEVEKNSTPSEPGSGRGPPQEEEEEEDEEEEATKEDAEAPGIRDHESL

SEQ ID NO: 38900 - protein, 28 aa, Homo sapiens
LGFCLVLSLQKVLPVPPALGTRLCIASP

SEQ ID NO: 38901 - protein, 18 aa, Homo sapiens
MAAHKSGPAHVSAERTQQ

SEQ ID NO: 38902 - protein, 53 aa, Homo sapiens
TRVVVAGKVTSSPSLSARDENTATLPPGCQRSLGGDVGRRCPRPAGHLPPAPR

SEQ ID NO: 38903 - protein, 247 aa, Homo sapiens
LEGSMCSRGWDSCLALELLLLPLSLLVTSIQGHLVHMTVVSGSNVTLNISESLPENYKQLTWFYTFDQKIVEWDSRKSKYFESKFKGRVRLDPQSGALYISKVQKEDNSTYIMRVLKKTGNEQEWKIKLQVLDPVPKPVIKIEKIEDMDDNCYLKLSCVIPGESVNYTWYGDKRPFPKELQNSVLETTLMPHNYSRCYTCQVSNSVSSKNGTVCLSPPCTLARSFGVEWIASWLVVTVPTILGLLLT

SEQ ID NO: 38904 - protein, 300 aa, Homo sapiens
KMAAAEEGCSVGAEADRELEELLESALDDFDKAKPSPAPPSTTTAPDASGPQKRSPGDTAKDALFASQEKFFQELFDSELASQATAEFEKAMKELAEEEPHLVEQFQKLSEAAGRVGSDMTSQQEFTSCLKETLSGLAKNATDLQNSSMSEEELTKAMEGLGMDEGDGEGNILPIMQSIMQNLLSKDVLYPSLKEITEKYPEWLQSHRESLPPEQFEKYQEQHSVMCKICEQFEAETPTDSETTQKARFEMVLDLMQQLQDLGHPPKELAGEMPPGLNFDLDALNLSGPPGASGEQCLIM

SEQ ID NO: 38905 - protein, 50 aa, Homo sapiens
MVLGADAVWLWIAPYGQLCPQGRMRIATEVLKSKPNSSHWHTGIRQKAGS

SEQ ID NO: 38906 - protein, 12 aa, Homo sapiens
KVHVLLMLTLID

SEQ ID NO: 38907 - protein, 11 aa, Homo sapiens
MTHKKNITNLD

SEQ ID NO: 38908 - protein, 155 aa, Homo sapiens
KMAENSGRAGKSSGSGAGKGAVSAEQVIAGFNRLRQEQRGLASKAAELEMELNEHSLVIDTLKEVDETRKCYRMVGGVLVERTVKEVLPALENNKEQIQKIIETLTQQLQAKGKELNEFREKHNIRLMGEDEKPAAKENSEGAGAKASSAGVLVS

SEQ ID NO: 38909 - protein, 13 aa, Homo sapiens
MAAAMPARLLGWR

SEQ ID NO: 38910 - protein, 50 aa, Homo sapiens
LDSKANNLSSLSKKYRQDAKYLNMRSTYAKLAAVAVFFIMLIVYVRFWWL

SEQ ID NO: 38911 - protein, 356 aa, Homo sapiens
MTGNAGEWCLMESDPGVFTELIKGFGCRGAQVEEIWSLEPENFEKLKPVHGLIFLFKWQPGEEPAGSVVQDSRLDTIFFAKQVINNACATQAIVSVLLNCTHQDVHLGETLSEFKEFSQSFDAAMKGLALSNSDVIRQVHNSFARQQMFEFDTKTSAKEEDAFHFVSYVPVNGRLYELDGLREGPIDLGACNQDDWISAVRPVIEKRIQKDGFSPCCPGWSQTPELKPSACLDLPKWYSEGEIRFNLMAIVSDRKMIYEQKIAELQRQLAEEEPMDTDQGNSMLSAIQSEVAKNQMLIEEEVQKLKRYKIENIRRKHNYLPFIMELLKTLAEHQQLIPLVEKAKEKQNAKKAQETK

SEQ ID NO: 38912 - protein, 39 aa, Homo sapiens
KNLPFSVENKWSLLAKMCLYFGSAFAIPFLVVRHQLLKT

SEQ ID NO: 38913 - protein, 44 aa, Homo sapiens
RDISEASVFDAYVLPKLFVKLHYCVSCAIHSKVVRNRSHEAHKD

SEQ ID NO: 38914 - protein, 41 aa, Homo sapiens
KKSAPSILSNGRIGQVGKFKNGTLILSPVDIKKINSSRVAK

SEQ ID NO: 38915 - protein, 1528 aa, Homo sapiens
LARARRTDRWTSGLVEMATLSLTVNSGDPPLGALLAVEHVKDDVSISVEEGKENILHVSENVIFTDVNSILRYLARVATTAGLYGSNLMEHTEIDHWLEFSATKLSSCDSFTSTINELNHCLSLRTYLVGNSLSLADLCVWATLKGNAAWQEQLKQKKAPVHVKRWFGFLEAQQAFQSVGTKWDVSTTKARVAPEKKQDVGKFVELPGAEMGKVTVRFPPEASGYLHIGHAKAALLNQHYQVNFKGKLIMRFDDTNPEKEKEDFEKVILEDVAMLHIKPDQFTYTSDHFETIMKYAEKLIQEGKAYVDDTPAEQMKAEREQRIDSKHRKNPIEKNLQMWEEMKKGSQFGQSCCLRAKIDMSSNNGCMRDPTLYRCKIQPHPRTGNKYNVYPTYDFACPIVDSIEGVTHALRTTEYHDRDEQFYWIIEALGIRKPYIWEYSRLNLNNTVLSKRKLTWFVNEGLVDGWDDPRFPTVRGVLRRGMTVEGLKQFIAAQGSSRSVVNMEWDKIWAFNKKVIDPVAPRYVALLKKEVIPVNVPEAQEEMKEVAKHPKNPEVGLKPVWYSPKVFIEGADAETFSEGEMVTFINWGNLNITKIHKNADGKIISLDAKLNLENKDYKKTTKVTWLAETTHALPIPVICVTYEHLITKPVLGKDEDFKQYVNKNSKHEELMLGDPCLKDLKKGDIIQLQRRGFFICDQPYEPVSPYSCKEAPCVLIYIPDGHTKEMPTSGSKEKTKVEATKNETSAPFKERPTPSLNNNCTTSEDSLVLYNRVAVQGDVVRELKAKKAPKEDVDAAVKQLLSLKAEYKEKTGQEYKPGNPPAEIGQNISSNSSASILESKSLYDEVAAQGEVVRKLKAEKSPKAKINEAVECLLSLKAQYKEKTGKEYIPGQPPLSQSSDSSPTRNSEPAGLETPEAKVLFDKVASQGEVVRKLKTEKAPKDQVDIAVQELLQLKAQYKSLIGVEYKPVSATGAEDKDKKKKEKENKSEKQNKPQKQNDGQRKDPSKNQGGGLSSSGAGEGQGPKKQTRLGLEAKKEENLADWYSQVITKSEMIEYHDISGCYILRPWAYAIWEAIKDFFDAEIKKLGVENCYFPMFVSQSALEKEKTHVADFAPEVAWVTRSGKTELAEPIAIRPTSETVMYPAYAKWVQSHRDLPIKLNQWCNVVRWEFKHPQPFLRTREFLWQEGHSAFATMEEAAEEVLQILDLYAQVYEELLAIPVVKGRKTEKEKFAGGDYTTTIEAFISASGRAIQGGTSHHLGQNFSKMFEIVFEDPKIPGEKQFAYQNSWGLTTRTIGVMTMVHGDNMGLVLPPRVACVQVVIIPCGITNALSEEDKEALIAKCNDYRRRLLSVNIRVRADLRDNYSPGWKFNHWELKGVPIRLEVGPRDMKSCQFVAVRRDTGEKLTVAENEAETKLQAILEDIQVTLFTRASEDLKTHMVVANTMEDFQKILDSGKIVQIPFCGEIDCEDWIKKTTARDQDLEPGAPSMGAKSLCIPFKPLCELQPGAKCVCGKNPAKYYTLFGRSY

SEQ ID NO: 38916 - protein, 263 aa, Homo sapiens
LGPLAPPPPPPLPPGPAQASVALPPPPGPPPPPPLPSTGPPPPPPPPPLPNQVPPPPPPPPAPPLPASGFFLASMSEDNRPLTGLAAAIAGAKLRKVSRMEDTSFPSGGNAIGVNSASSKTDTGRGNGPLPLGGSGLMEEMSALLARRRRIAEKGSTIETEQKEDKGEDSEPVTSKASSTSTPEPTRKPWERTNTMNGSKSPVISRPKSTPLSQPSANGVQTEGLDYDRLKQDILDEMRKELTKLKEELIDAIRQELSKSNTA

SEQ ID NO: 38917 - protein, 66 aa, Homo sapiens
MSNVQLNSNFLALARELDIMEPKVPDDIYKTHLENNRFGGSGSQVDSARMNLASSFVSGFVNAAFV

SEQ ID NO: 38918 - skipped

SEQ ID NO: 38919 - protein, 29 aa, Homo sapiens
LAAGFLLSFWAAMSAGPAQQLRAHGGPRC

SEQ ID NO: 38920 - protein, 32 aa, Homo sapiens
TPGPVGLVLKTWMAGILASGLARTLESLSPVA

SEQ ID NO: 38921 - protein, 85 aa, Homo sapiens
LLLMWKDFCFLVHIDLPLFFPRDQPTLTFQSVYHFTNSGQLYSQAQKNYPYSPRWDGNEMAKRAKAYFKTFVPQFQEAAFANGKL

SEQ ID NO: 38922 - protein, 340 aa, Homo sapiens
LFPLLGRRVCADKMADGELNVDSLITRLLEVRGCRPGKIVQMTEAEVRGLCIKSREIFLSQPILLELEAPLKICGDIHGQYTDLLRLFEYGGFPPEANYLFLGDYVDRGKQSLETICLLLAYKIKYPENFFLLRGNHECASINRIYGFYDECKRRFNIKLWKTFTDCFNCLPIAAIVDEKIFCCHGGLSPDLQSMEQIRRIMRPTDVPDTGLLCDLLWSDPDKDVQGWGENDRGVSFTFGADVVSKFLNRHDLDLICRAHQVVEDGYEFFAKRQLVTLFSAPNYCGEFDNAGGMMSVDETLMCSFQILKPSEKKAKYQYGGLNSGRPVTPPRTANPPKKR

SEQ ID NO: 38923 - protein, 647 aa, Homo sapiens
LASTDGHLRVWETANNRLHQEYVPSAHLSGTCTCLAWAPARLQAKESPQRKKRKSEAVGMSNQTDLLALGTAVGSILLYSTVKGELHSKLISGGHDNRVNCIQWHQDSGCLYSCSDDKHIVEWNVQTCKVKCKWKGDNSSVSSLCISPDGKMLLSAGRTIKLWVLETKEVYRHFTGHATPVSSLMFTTIRPPNESQPFDGITGLYFLSGAVHDRLLNVWQVRSENKEKSAVMSFTVTDEPVYIDLTLSENKEEPVKLAVVCRDGQVHLFEHILNGYCKKPLTSNCTIQIATPGKGKKSTPKPIPILAAGFCSDKMSLLLVYGSWFQPTIERVALNSREPHMCLVRDISNCWAPKVETAITKVRTPVMNSEAKVLVPGIPGHHAAIKPAPPQTEQVESKRKSGGNEVSIEERLGAMDIDTHKKGKEDLQTNSFPVLLTQGLESNDFEMLNKVLQTRNVNLIKKTVLRMPLHTIIPLLQELTKRLQGHPNSAVLMVQWLKCVLTVHASYLSTLPDLVPQLGTLYQLMESRVKTFQKLSHLHGKLILLITQVTASEKTKGATSPGQKAKLVYEEESSEEESDDEIADKDSEDNWDEDEEESESEKDEDVEEEDEDAEGKDEENGEDRDTASEKELNGDSDLDPENESEEE

SEQ ID NO: 38924 - protein, 485 aa, Homo sapiens
MSFIVFSTRGTTLMKLTEDREQIRQGLEELQKVLPGGDTYMHEGFERASEQIYYENRQGYRTASVIIALTDGELHEDLFFYSEREANRSRDLGAIVYCVGVKDFNETQLARIADSKDHVFPVNDGFQALQGIIHSILKKSCIEILAAEPSTICAGESFQVVVRGNGFRHARNVDRVLCSFKINDSVTLNEKPFSVEDTYLLCPAPILKEVGMKAALQVSMNDGLSFISSSVIITTTHCSDGSILAIALLILFLLLALALLWWFWPLCCTVIIKEVPPPPAEESEEEDDDGLPKKKWPTVDASYYGGRGVGGIKRMEVRWGEKGSTEEGAKLEKAKNARVKMPEQEYEFPEPRNLNNNMRRPSSPRKWYSPIKGKLDALWVLLRKGYDRVSVMRPQPGDTGRCINFTRVKNNQPAKYPLNNAYHTSSPPPAPIYTPPPPAPHCPPPPPSAPTPPIPSPPSTLPPPPQAPPPNRAPPPSRPPPRPSV

SEQ ID NO: 38925 - protein, 4 aa, Homo sapiens
MPVW

SEQ ID NO: 38926 - protein, 46 aa, Homo sapiens
KKMADKPDMGEIASFDKAKLKKTETQEKNTLPTKETIEQEKRSEIS

SEQ ID NO: 38927 - protein, 413 aa, Homo sapiens
LPPRRCSFVRPLPHTDTNMNGQLNGFHEAFIEEGTFLFTSESVGEGHPDKICDQISDAVLDAHLQQDPDAKVACETVAKTGMILLAGEITSRAAVDYQKVVREAVKHIGYDDSSKGFDYKTCNVLVALEQQSPDIAQGVHLDRNEEDIGAGDQGLMFGYATDETEECMPLTIVLAHKLNAKLAELRRNGTLPWLRPDSKTQVTVQYMQDRGAVLPIRVHTIVISVQHDEEVCLDEMRDALKEKVIKAVVPAKYLDEDTIYHLQPSGRFVIGGPQGDAGLTGRKIIVDTYGGWGAHGGGAFSGKDYTKVDRSAAYAARWVAKSLVKGGLCRRVLVQVSYAIGVSHPLSISIFHYGTSQKSERELLEIVKKNFDLRPGVIVRDLDLKKPIYQRTAAYGHFGRDSFPWEVPKKLKY

SEQ ID NO: 38928 - protein, 91 aa, Homo sapiens
LDMMYREPARWSYTFQTFSFLSRLKVQLEPFPEKLLQARKPVQIFERSVYSDSDIEWHIYQDWHSFLLWEFASRITLHGFIYLQASPQAPL

SEQ ID NO: 38929 - protein, 172 aa, Homo sapiens
VPPLKRAITTLMAGILRLVVQWPPGRLQTVTKGVESLICTDWIRHKFTRSRIPEKVFQASPEDHEKYGGDPQNPHKLHIVTRIKSTRRRPYWEKDIIKMLGLEKAHTPQVHKNIPSVNAKLKVVKHLIRIKPLKLPQGLPAEENMSNTCLKSTGELVVQWHLKPVEQKAHES

SEQ ID NO: 38930 - protein, 22 aa, Homo sapiens
LKYLTKKYLKKNNLHDWFVHSC

SEQ ID NO: 38931 - protein, 674 aa, Homo sapiens
LLGRMSHLPMKLLRKKIEKRNLKLRQRNLKFQGASNLTLSETQNGDVSEETMGSRKVKKSKQKPMNVGLSETQNGGMSQEAVGNIKVTKSPQKSTVLTNGEAAMQSSNSESKKKKKKKRKMVNDAEPDTKKAKTENKGKSEEESAETTKETENNVEKPDNDEDESEVPSLPLGLTGAFEDTSFASLCNLVNENTLKAIKEMGFTNMTEIQHKSIRPLLEGRDLLAAAKTGSGKTLAFLIPAVELIVKLRFMPRNGTGVLILSPTRELAMQTFGVLKELMTHHVHTYGLIMGGSNRSAEAQKLGNGINIIVATPGRLLDHMQNTPGFMYKNLQCLVIDEADRILDVGFEEELKQIIKLLPTRRQTMLFSATQTRKVEDLARISLKKEPLYVGVDDDKANATVDGLEQGYVVCPSEKRFLLLFTFLKKNRKKKLMVFFSSCMSVKYHYELLNYIDLPVLAIHGKQKQNKRTTTFFQFCNADSGTLLCTDVAARGLDIPEVDWIVQYDPPDDPKEYIHRVGRTARGLNGRGHALLILRPEELGFLRYLKQSKVPLSEFDFSWSKISDIQSQLEKLIEKNYFLHKSAQEAYKSYIRAYDSHSLKQIFNVNNLNLPQVALSFGFKVPPFVDLNVNSNEGKQKKRGGGGGFGYQKTKKVEKSKIFKHISKKSSDSRQFSH

SEQ ID NO: 38932 - skipped

SEQ ID NO: 38933 - protein, 69 aa, Homo sapiens
VDGQIALVSRRQSLAPSSTEQTAAAAAAGEEEDGGTAAGLCGGLWHGVYKTRICWKYRTTVYHPFLYCY

SEQ ID NO: 38934 - protein, 420 aa, Homo sapiens
RKMAGRLPACVVDCGTGYTKLGYAGNTEPQFIIPSCIAIKESAKVGDQAQRRVMKGVDDLDFFIGDEAIEKPTYATKWPIRHGIVEDWDLMERFMEQVIFKYLRAEPEDHYFLLTEPPLNTPENREYTAEIMFESFNVPGLYIAVQAVLALAASWTSRQVGERTLTGTVIDSGDGVTHVIPVAEGYVIGSCIKHIPIAGRDITYFIQQLLRDREVGIPPEQSLETAKAVKERYSYVCPDLVKEFNKYDTDGSKWIKQYTGINAISKKEFSIDVGYERFLGPEIFFHPEFANPDFTQPISEVVDEVIQNCPIDVRRPLYKNIVLSGGSTMFRDFGRRLQRDLKRTVDARLKLSEELSGGRLKPKPIDVQVITHHMQRYAVWFGGSMLASTPEFYQVCHTKKDYEEIGPSICRHNPVFGVMS

SEQ ID NO: 38935 - protein, 31 aa, Homo sapiens
MVLLMVTLLSVTAEEKWTATGSGSQGTGPVI

SEQ ID NO: 38936 - protein, 250 aa, Homo sapiens
VASWCSPRWFAGEEMAFVKSGWLLRQSTILKRWKKNWFDLWSDGHLIYYDDQTRQNIEDKVHMPMDCINIRTGQECRDTQPPDGKSKDCMLQIVCRDGKTISLCAESTDDCLAWKFTLQDSRTNTAYVGSAVMTDETSVVSSPPPYTAYAAPAPEQAYGYGPYGGAYPPGTQVVYAANGQAYAVPYQYPYAETILMTRHCTAVSRGLYGQQPANQVIIRERYRDNDSDLALGMLAGAATGMALGSLFWVF

SEQ ID NO: 38937 - protein, 244 aa, Homo sapiens
VASWCSPRWFAGEEMAFVKSGWLLRQSTILKRWKKNWFDLWSDGHLIYYDDQTRQNIEDKVHMPMDCINIRTGQECRDTQPPDGKSKDCMLQIVCRDGKTISLCAESTDDCLAWKFTLQDSRTNTAYVGSAVMTDETSVVSSPPPYTAYAAPAPEVGRTLSLQQAYGYGPYGGAYPPGTQVVYAANGQAYAVPYQYPYAGLYGQQPANQVIIRERYRDNDSDLALGMLAGAATGMALGSLFWVF

SEQ ID NO: 38938 - protein, 404 aa, Homo sapiens
LRGGELGGLRVPQDRSGQSKMAGILAWFWNERFWLPHNVTWADLKNTEEATFPQAEDLYLAFPLAFCIFMVRLIFERFVAKPCAIALNIQANGPQIAPPNAILEKVFTAITKHPDEKRLEGLSKQLDWDVRSIQRWFRQRRNQEKPSTLTRFCESMWRFSFYLYVFTYGVRFLKKTPWLWNTRHCWYNYPYQPLTTDLHYYYILELSFYWSLMFSQFTDIKRKDFGIMFLHHLVSIFLITFSYVNNMARVGTLVLCLHDSADALLEAAKMANYAKFQKMCDLLFVMFAVVFITTRLGIFPLWVLNTTLFESWEIVGPYPSWWVFNLLLLLVQGLNCFWSYLIVKIACKAVSRGKVSKDDRSDIESSSDEEDSEPPGKNPHTATTTNGTSGTNGYLLTGSCSMDD

SEQ ID NO: 38939 - protein, 422 aa, Homo sapiens
VARLLWAGTLKIAAMAENGDNEKMAALEAKICHQIEYYFGDFNLPRDKFLKEQIKLDEGWVPLEIMIKFNRLNRLTTDFNVIVEALSKSKAELMEISEDKTKIRRSPSKPLPEVTDEYKNDVKNRSVYIKGFPTDATLDDIKEWLEDKGQVLNIQMRRTLHKAFKGSIFVVFDSIESAKKFVETPGQKYKETDLLILFKDDYFAKKNEERKQNKVEAKLRAKQEQEAKQKLEEDAEMKSLEEKIGCLLKFSGDLDDQTCREDLHILFSNHGEIKWIDFVRGAKEGIILFKEKAKEALGKAKDANNGNLQLRNKEVTWEVLEGEVEKEALKKIIEDQQESLNKWKSKGRRFKGKGKGNKAAQPGSGKGKVQFQGKKTKFASDDEHDEHDENGATGPVKRAREETDKEEPASKQQKTENGAGDQ

SEQ ID NO: 38940 - protein, 136 aa, Homo sapiens; identical to SEQ ID NO: 1518

SEQ ID NO: 38941 - protein, 82 aa, Homo sapiens
IPTDNSTPHKEDLSSKIKEQKIVVDELSNLKKNRKVYRQQQNSNIFFLADRTEMLSESKNILDELKKEYQEIENLDKTKIKK

SEQ ID NO: 38942 - protein, 31 aa, Homo sapiens
MESEGGADDSAEEGDLLDDDDNEDGGMTSWS

SEQ ID NO: 38943 - protein, 67 aa, Homo sapiens
LRVSLRRYTRAEYESEAEGVMGGEIQPVSVKVGDKVLLPEYGGTKVVLDDKDYFLFRDGDILGKYVD

SEQ ID NO: 38944 - protein, 7 aa, Homo sapiens
LPIPLKF

SEQ ID NO: 38945 - protein, 8 aa, Homo sapiens
IEHSKLLE

SEQ ID NO: 38946 - protein, 36 aa, Homo sapiens
LMLLEQNLITVDMQKHSLTFWWLVECWPQVVHWQMT

SEQ ID NO: 38947 - protein, 221 aa, Homo sapiens
KMLRLLLALNLFPSIQVTGNKILVKQSPMLVAYDNAVNLSCKYSYNLFSREFRASLHKGLDSAVEVCVVYGNYSQQLQVYSKTGFNCDGKLGNESVTFYLQNLYVNQTDIYFCKIEVMYPPPYLDNEKSNGTIIHVKGKHLCPSPLFPGPSKPFWVLVVVGGVLACYSLLVTVAFIIFWVRSKRSRLLHSDYMNMTPRRPGPTRKHYQPYAPPRDFAAYRS

SEQ ID NO: 38948 - protein, 694 aa, Homo sapiens [sequence omitted]

SEQ ID NO: 38949 - protein, 84 aa, Homo sapiens
IGQVIMSIRTKLQNKEHVIEALRRAKFKLPGHQKIHISKKWGFTKFNADEFEDMVAEKWLIPDGCGVKYIPNRGPLDKWRALHS

SEQ ID NO: 38950 - protein, 69 aa, Homo sapiens [sequence omitted]

SEQ ID NO: 38951 - protein, 122 aa, Homo sapiens
IPCIGSPACPTMSDAAVDTSSEITTKDLKEKKEVVEEAENGRDAPANGNAENEENGEQEADNEVDEEEEEGGEEEEEEEEGDGEEEDGDEDEEAESATGKRAAEDDEDDDVDTKKQKTDEDD

SEQ ID NO: 38952 - skipped

SEQ ID NO: 38953 - protein, 25 aa, Homo sapiens
KKLWVFFFFFLSGGMGTPKLIWQQR

SEQ ID NO: 38954 - protein, 20 aa, Homo sapiens
LLMQVRVMTCFLLALRIISI

SEQ ID NO: 38955 - protein, 39 aa, Homo sapiens
LAEYKIHNADVTLRSDATADDLIDVVEGNRVYIPCIYVK

SEQ ID NO: 38956 - protein, 23 aa, Homo sapiens
LRLRLRLRRLRFPMGLACGAWAL

SEQ ID NO: 38957 - protein, 462 aa, Homo sapiens
IMNNFGNEEFDCHFLDEGFTAKDILDQKINEVSSSDDKDAFYVADLGDILKKHLRWLKALPRVTPFYAVKCNDSKAIVKTLAATGTGFDCASKTEIQLVQSLGVPPERIIYANPCKQVSQIKYAANNGVQMMTFDSEVELMKVARAHPKAKLVLRIATDDSKAVCRLSVKFGATLRTSRLLLERAKELNIDVVGVSFHVGSGCTDPETFVQAISDARCVFDMGAEVGFSMYLLDIGGGFPGSEDVKLKFEEITGVINPALDKYFPSDSGVRIIAEPGRYYVASAFTLAVNIIAKKIVLKEQTGSDDEDESSEQTFMYYVNDGVYGSFNCILYDHAHVKPLLQKRPKPDEKYYSSSIWGPTCDGLDRIVERCDLPEMHVGDWMLFENMGAYTVAAASTFNGFQRPTIYYVMSGPAWQLMQQFQNPDFPPEVEEQDASTLPVSCAWESGMKRHRAACASASINV

SEQ ID NO: 38958 - protein, 15 aa, Homo sapiens
KGMLPDPKNTHILIS

SEQ ID NO: 38959 - protein, 147 aa, Homo sapiens
LMTMRSLLRTPFLCGLLWAFCAPGARAEEPAASFSQPGSMGLDKNTVHDQEHIMEHLEGVINKPEAEMSPQELQLHYFKMHDYDGNNLLDGLELSTAITHVHKEEGSEQAPLMSEDELINIIDGVLRDDDKNNDGYIDYAEFAKSLQ

SEQ ID NO: 38960 - protein, 18 aa, Homo sapiens
VDNSFEFEKRRNEPIKYQ

SEQ ID NO: 38961 - protein, 12 aa, Homo sapiens
MLGARRQRTAES

SEQ ID NO: 38962 - protein, 239 aa, Homo sapiens
IMSRYGRYGGETKVYVGNLGTGAGKGELERAFSYYGPLRTVWIARNPPGFAFVEFEDPRDAEDAVRGLDGKVICGSRVRVELSTGMPRRSRFDRPPARRPFDPNDRCYECGEKGHYAYDCHRYSRRRRSRSRSRSHSRSRGRRYSRSRSRSRGRRSRSASPRRSRSISLRRSRSASLRRSRSGSIKGSRYFQSPSRSRSRSRSISRPRSSRSKSRSPSPKRSRSPSGSPRRSASPERMD

SEQ ID NO: 38963 - protein, 5 aa, Homo sapiens
KMADL

SEQ ID NO: 38964 - protein, 7 aa, Homo sapiens
MTLEKLF

SEQ ID NO: 38965 - protein, 25 aa, Homo sapiens
IRMKTGNKIRYNSKRRHWRRTKLGL

SEQ ID NO: 38966 - protein, 411 aa, Homo sapiens
LTPPSQLSGAAMAWRRREASVGARGVLALALLALALCVPGARGRALEWFSAVVNIEYVDPQTNLTVWSVSESGRFGDSSPKEGAHGLVGVPWAPGGDLEGCAPDTRFFVPEPGGRGAAPWVALVARGGCTFKDKVLVAARRNASAVVLYNEERYGNITLPMSHAGTGNIVVIMISYPKGREILELVQKGIPVTMTIGVGTRHVQEFISGQSVVFVAIAFITMMIISLAWLIFYYIQRFLYTGSQIGSQSHRKETKKVIGQLLLHTVKHGEKGIDVDAENCAVCIENFKVKDIIRILPCKHIFHRICIDPWLLDHRTCPMCKLDVIKALGYWGEPGDVQEMPAPESPPGRDPAANLSLALPDDDGSDDSSPPSASPAESEPQCDPSFKGDAGENTALLEAGRSDSRHGGPIS

SEQ ID NO: 38967 - protein, 5 aa, Homo sapiens
MDASI

SEQ ID NO: 38968 - protein, 18 aa, Homo sapiens
VDDCQDVASECEVKCMPT

SEQ ID NO: 38969 - protein, 17 aa, Homo sapiens
ILMAGRVRFWDSWRQWW

SEQ ID NO: 38970 - protein, 14 aa, Homo sapiens
LSSYPKQILRRKML

SEQ ID NO: 38971 - protein, 27 aa, Homo sapiens
VKDHYSNGFCTVYAKNYRWATDYYCMY

SEQ ID NO: 38972 - protein, 36 aa, Homo sapiens
RLIFAGKQLEDGRTLSDYNIQKESTLHLVLHLRGGC

SEQ ID NO: 38973 - protein, 331 aa, Homo sapiens
LLFSGKGRRAGPWGAALGGRTRGIMEADKDDTQQILKEHSPDEFIKDEQNKGLIDEITKKNIQLKKEIQKLETELQEATKEFQIKEDIPETKMKFLSVETPENDSQLSNISCSFQVSSKVPYEIQKGQALITFEKEEVAQNVVSMSKHHVQIKDVNLEVTAKPVPLNSGVRFQVYVEVSKMKINVTEIPDTLREDQMRDKLELSFSKSRNGGGEVDRVDYDRQSGSAVITFVEIGVADKILKKKEYPLYINQTCHRVTVSPYTEIHLKKYQIFSGTSKRTVLLTGMEGIQMDEEIVEDLINIHFQRAKNGGGEVDVVKCSLGQPHIAYFEE

SEQ ID NO: 38974 - protein, 486 aa, Homo sapiens
RDAYELQEVIGSGATAVVQAALCKPRQERVAIKRINLEKCQTSMDELLKEIQAMSQCSHPNVVTYYTSFVVKDELWLVMKLLSGGSMLDIIKYIVNRGEHKNGVLEEAIIATILKEVLEGLDYLHRNGQIHRDLKAGNILLGEDGSVQIADFGVSAFLATGGDVTRNKVRKTFVGTPCWMAPEVMEQVRGYDFKADMWSFGITAIELATGAAPYHKYPPMKVLMLTLQNDPPTLETGVEDKEMMKKYGKSFRKLLSLCLQKDPSKRPTAAELLKCKFFQKAKNREYLIEKLLTRTPDIAQRAKKVRRVPGSSGHLHKTEDGDWEWSDDEMDEKSEEGKAAFSQEKSRRVKEENPEIAVSASTIPEQIQSLSVHDSQGPPNANEDYREASSCAVNLVLRLRNSRKELNDIRFEFTPGRDTADGVSQELFSAGLVDGHDVVIVAANLQKIVDDPKALKTLTFKLASGCDGSEIPDEVKLIGFAQLSVS

SEQ ID NO: 38975 - protein, 16 aa, Homo sapiens
MLAFILITDVILCILL

SEQ ID NO: 38976 - protein, 16 aa, Homo sapiens
LGVLLTLLWCRRFKIS

SEQ ID NO: 38977 - protein, 55 aa, Homo sapiens
LDVMSIAIPLGVTTSDTSYSDMAAGSEKEVEAPYLSRRSGTTPGCESPAKETQGA

SEQ ID NO: 38978 - protein, 17 aa, Homo sapiens
LAREVLRMRGTISREHP

SEQ ID NO: 38979 - protein, 44 aa, Homo sapiens
LGARSMTSSGVCHGSGAAQGPVAAAHRPVDAYRQHDPTARSEVG

SEQ ID NO: 38980 - protein, 751 aa, Homo sapiens
ILFLAWLAGFSSRLFAVIRFESIIHEFDPWFNYRSTHHLASHGFYEFLNWFDERAWYPLGRIVGGTVYPGLMITAGLIHWILNTLNITVHIRDVCVFLAPTFSGLTSISTFLLTRELWNQGAGLLAACFIAIVPGYISRSVAGSFDNEGIAIFALQFTYYLWVKSVKTGSVFWTMCCCLSYFYMVSAWGGYVFIINLIPLHVFVLLLMQRYSKRVYIAYSTFYIVGLILSMQIPFVGFQPIRTSEHMAAAGVFALLQAYAFLQYLRDRLTKQEFQTLFFLGVSLAAGAVFLSVIYLTYTGYIAPWSGRFYSLWDTGYAKIHIPIIASVSEHQPTTWVSFFFDLHILVCTFPAGLWFCIKNINDERVFVALYAISAVYFAGVMVRLMLTLTPVVCMLSAIAFSNVFEHYLGDDMKRENPPVEDSSDEDDKRNQGNLYDKAGKVRKHATEQEKTEEGLGPNIKSIVTMLMLMLLMMFAVHCTWVTSNAYSSPSVVLASYNHDGTRNILDDFREAYFWLRQNTDEHARVMSWWDYGYQIAGMANRTTLVDNNTWNNSHIALVGKAMSSNETAAYKIMRTLDVDYVLVIFGGVIGYSGDDINKFLWMVRIAEGEHPKDIRESDYFTPQGEFRVDKAGSPTLLNCLMYKMSYYRFGEMQLDFRTPPGFDRTRNAEIGNKDIKFKHLEEAFTSEHWLVRIYKVKAPDNRETLDHKPRVTNIFPKQKYLSKKTTKRKRGYIKNKLVFKKGKKISKKTV

SEQ ID NO: 38981 - protein, 883 aa, Homo sapiens
LSAVCLARTAAEALIMATFISVQLKKTSEVDLAKPLVKFIQQTYPSGGEEQAQYCRAAEELSKLRRAAVGRPLDKHEGALETLLRYYDQICSIEPKFPFSENQICLTFTWKDAFDKGSLFGGSVKLALASLGYEKSCVLFNCAALASQIAAEQNLDNDEGLKIAAKHYQFASGAFLHIKETVLSALSREPTVDISPDTVGTLSLIMLAQAQEVFFLKATRDKMKDAIIAKLANQAADYFGDAFKQCQYKDTLPKEVFPVLAAKHCIMQANAEYHQSILAKQQKKFGEEIARLQHAAELIKTVASRYDEYVNVKDFSDKINRALAAAKKDNDFIYHDRVPDLKDLDPIGKATLVKSTPVNVPISQKFTDLFEKMVPVSVQQSLAAYNQRKADLVNRSIAQMREATTLANGVLASLNLPAAIEDVSGDTVPQSILTKSRSVIEQGGIQTVDQLIKELPELLQRNREILDESLRLLDEEEATDNDLRAKFKERWQRTPSNELYKPLRAEGTNFRTVLDKAVQADGQVKECYQSHRDTIVLLCKPEPELNAAIPSANPAKTMQGSEVVNVLKSLLSNLDEVKKEREGLENDLKSVNFDMTSKFLTALAQDGVINEEALSVTELDRVYGGLTTKVQESLKKQEGLLKNIQVSHQEFSKMKQSNNEANLREEVLKNLATAYDNFVELVANLKEGTKFYNELTEILVRFQNKCSDIVFARKTERDELLKDLQQSIAREPSAPSIPTPAYQSSPAGGHAPTPPTPAPRTMPPTKPQPPARPPPPVLPANRAPSATAPSPVGAGTAAPAPSQTPGSAPPPQAQGPPYPTYPGYPGYCQMPMPMGYNPYAYGQYNMPYPPVYHQSPGQAPYPGPQQPSYPFPQPPQQSYYPQQ

SEQ ID NO: 38982 - protein, 13 aa, Homo sapiens
MVSHCFNFLLLQL

SEQ ID NO: 38983 - protein, 8 aa, Homo sapiens
MIMTKRNL

SEQ ID NO: 38984 - protein, 84 aa, Homo sapiens
MPLAKDLLHPSPEEEKRKHKKKGLVQSPNSYFMDVKCPGCYKITTVFSHAQTVVLCVGCSTVLCQPTGGKARLTEGCSFRRKQH

SEQ ID NO: 38985 - protein, 395 aa, Homo sapiens
LPTRVLPAEGWWWERSGSGGAEPGRGPCGGRAAAGPADGGMGCTVSAEDKAAAERSKMIDKNLREDGEKAAREVKLLLLGAGESGKSTIVKQMKIIHEDGYSEEECRQYRAVVYSNTIQSIMAIVKAMGNLQIDFADPSRADDARQLFALSCTAEEQGVLPDDLSGVIRRLWADHGVQACFGRSREYQLNDSAAYYLNDLERIAQSDYIPTQQDVLRTRVKTTGIVETHFTFKDLHFKMFDVGGQRSERKKWIHCFEGVTAIIFCVALSAYDLVLAEDEEMNRMHESMKLFDSICNNKWFTDTSIILFLNKKDLFEEKITHSPLTICFPEYTGANKYDEAASYIQSKFEDLNKRKDTKEIYTHFTCATDTKNVQFVFDAVTDVIIKNNLKDCGLF

SEQ ID NO: 38986 - protein, 185 aa, Homo sapiens
MRRMRRMWATQGLAVALALSVLPGSRALRPGDCEVCISYLGRFYQDLKDRDVTFSPATIENELIKFCREARGKENRLCYYIGATDDAATKIINEVSKPLAHHIPVEKICEKLKKKDSQICELKYDKQIDLSTVDLKKLRVKELKKILDDWGETCKGCAEKSDYIRKINELMPKYAPKAASARTDL

SEQ ID NO: 38987 - protein, 485 aa, Homo sapiens
LYYREEAVAEDVLNVDAWQDGAVLQIGDVKYKVERNPPAFTELQLPRYIMAGFPVCPKLSLEFGDPASSLFRWYKEAKPGAAEPEVGVPSSLSPSSPSSSWTETDVEERVYTPSNADIGLRLKLHCTPGDGQRFGHSRELESVCVVEAGPGTCTFDHRHLYTKKVTEDALIRTVSYNILADTYAQTEFSRTVLYPYCAPYALELDYRQNLIQKELTGYNADVICLQEVDRAVFSDSLVPALEAFGLEGVFRIKQHEGLATFYRKSKFSLLSQHDISFYEALESDPLHKELLEKLVLYPSAQEKVLQRSSVLQVSVLQSTKDSSKRICVANTHLYWHPKGGYIRLIQMAVALAHIRHVSCDLYPGIPVIFCGDFNSTPSTGMYHFVINGSIPEDHEDWASNGEEERCNMSLTHFFKLKSACGEPAYTNYVGGFHGCLDYIFIDLNALEVEQVIPLPSHEEVTTHQALPSVSHPSDHIALVCDLKWK

SEQ ID NO: 38988 - protein, 332 aa, Homo sapiens
KEPEQLRKLFIGGLSFETTDDSLREHFEKWGTLTDCVVMRDPQTKRSRGFGFVTYSCVEEVDAAMCARPHKVDGRVVEPKRAVSREDSVKPGAHLTVKKIFVGGIKEDTEEYNLRDYFEKYGKIETIEVMEDRQSGKKRGFAFVTFDDHDTVDKIVVQKYHTINGHNCEVKKTLSKQEMQSAGSRRGRGGGSGNFMGRGGNFGGGGGGGSRGSYGGGDGGYNGFGGDGGNYGGGPGYSSRGGYGDGGPGYGNQGGGYGGGGGYDGYNEGGNFGGGNYGGGGNYNDFGNYSGQQQSNYGPMKGGSFGGRSSGGPYGGGYGSGGGSGGYGSRRF

SEQ ID NO: 38989 - protein, 897 aa, Homo sapiens
VAPLLRAAPVEHCVAALRPTDSTMLKKFDKKDEESGGGSNPFQHLEKSAVLQEARVFNETPINPRKCAHILTKILYLINQGEHLGTTEATEAFFAMTKLFQSNDPTLRRMCYLTIKEMSCIAEDVIIVTSSLTKDMTGKEDNYRGPAVRALCQITDSTMLQAIERYMKQAIVDKVPSVSSSALVSSLHLLKCSFDVVKRWVNEAQEAASSDNIMVQYHALGLLYHVRKNDRLAVNKMISKVTRHGLKSPFAYCMMIRVASKQLEEEDGSRDSPLFDFIESCLRNKHEMVVYEAASAIVNLPGCSAKELAPAVSVLQLFCSSPKAALRYAAVRTLNKVAMKHPSAVTACNLDLENLVTDSNRSIATLAITTLLKTGSESSIDRLMKQISSFMSEISDEFKVVVVQAISALCQKYPRKHAVLMNFLFTMLREEGGFEYKRAIVDCIISIIEENSESKETGLSHLCEFIEDCEFTVLATRILHLLGQEGPKTTNPSKYIRFIYNRVVLEHEEVRAGAVSALAKFGAQNEEMLPSILVLLKRCVMDDDNEVRDRATFYLNVLEQKQKALNAGYILNGLTVSIPGLERALQQYTLEPSEKPFDLKSVPLATAPMAEQRTESTPITAVKQPEKVAATRQEIFQEQLAAVPEFRGLGPLFKSSPEPVALTESETEYVIRCTKHTFTNHMVFQFDCTNTLNDQTLENVTVQMEPTEAYEVLCYVPARSLPYNQPGTCYTLVALPKEDPTAVACTFSCMMKFTVKDCDPTTGETDDEGYEDEYVLEDLEVTVADHIQKVMKLNFEAAWDEVGDEFEKEETFTLSTIKTLEEAVGNIVKFLGMHPCERSDKVPDNKNTHTLLLAGVFRGGHDILVRSRLLLLDTVTMQVTARSLEELPVDIILASVG

SEQ ID NO: 38990 - protein, 25 aa, Homo sapiens
IKAVDKKAAGAGKVTKSAQKAQKAK

SEQ ID NO: 38991 - protein, 48 aa, Homo sapiens
MRLLLLLLVAASAMVRSEASANLGGVPSKRLKMQYATGPLLKFQICVS

SEQ ID NO: 38992 - protein, 17 aa, Homo sapiens
IMTPTMPWALGRQWGRL

SEQ ID NO: 38993 - protein, 741 aa, Homo sapiens
LAAGSSPLPAAPRPGLLLNLSPRRRPFRHPPAPSRTVAVTAAAPALAPMALCNGDSKLENAGGDLKDGHHHYEGAVVILDAGAQYGKVIDRRVRELFVQSEIFPLETPAFAIKEQGFRAIIISGGPNSVYAEDAPWFDPAIFTIGKPVLGICYGMQMMNKVFGGTVHKKSVREDGVFNISVDNTCSLFRGLQKEEVVLLTHGDSVDKVADGFKVVARSGNIVAGIANESKKLYGAQFHPEVGLTENGKVILKNFLYDIAGCSGTFTVQNRELECIREIKERVGTSKVLVLLSGGVDSTVCTALLNRALNQEQVIAVHIDNGFMRKRESQSVEEALKKLGIQVKVINAAHSFYNGTTTLPISDEDRTPRKRISKTLNMTTSPEEKRKIIGDTFVKIANEVIGEMNLKPEEVFLAQGTLRPDLIESASLVASGKAELIKTHHNDTELIRKLREEGKVIEPLKDFHKDEVRILGRELGLPEELVSRHPFPGPGLAIRVICAEEPYICKDFPETNNILKIVADFSASVKKPHTLLQRVKACTTEEDQEKLMQITSLHSLNAFLLPIKTVGVQGDCRSYSYVCGISSKDEPDWESLIFLARLIPRMCHNVNRVVYIFGPPVKEPPTDVTPTFLTTGVLSTLRQADFEAHNILRESGYAGKISQMPVILTPLHFDRDPLQKQPSCQRSVVIRTFITSDFMTGIPATPGNEIPVEVVLKMVTEIKKIPGISRIMYDLTSKPPGTTEWE

SEQ ID NO: 38994 - protein, 35 aa, Homo sapiens
LELREKQAEKEEKQKTKKIETSAEKLRKLLKEEKR

SEQ ID NO: 38995 - protein, 18 aa, Homo sapiens
MLKSHIKKIPNSHFSTII

SEQ ID NO: 38996 - protein, 42 aa, Homo sapiens
KPLPDHVSIVEPKDEILPTTPISEQKGGKPEPSAMPQPVPTA

SEQ ID NO: 38997 - protein, 9 aa, Homo sapiens
VKNSKNKIL

SEQ ID NO: 38998 - protein, 58 aa, Homo sapiens
IKVKFGESIEDLHTCRLLIKQDIPAGLYVDPYELASLRERNITEEKTSWRRLWLPSDN

SEQ ID NO: 38999 - protein, 16 aa, Homo sapiens
MSTLPWSSNSSIRCVT

SEQ ID NO: 39000 - protein, 32 aa, Homo sapiens
VPGVHPRAEMSFDHPEKNGPWPADPINLPSHG

SEQ ID NO: 39001 - protein, 408 aa, Homo sapiens
IMSGGSADYNREHGGPEGMDPDGVIESNWNEIVDNFDDMNLKESLLRGIYAYGFEKPSAIQQRAIIPCIKGYDVIAQAQSGTGKTATFAISILQQLEIEFKETQALVLAPTRELAQQIQKVILALGDYMGATCHACIGGTNVRNEMQKLQAEAPHIVVGTPGRVFDMLNRRYLSPKWIKMFVLDEADEMLSRGFKDQIYEIFQKLNTSIQVVLLSATMPTDVLEVTKKFMRDPIRILVKKEELTLEGIKQFYINVEREEWKLDTLCDLYETLTITQAVIFLNTRRKVDWLTEKMHARDFTVSALHGDMDQKERDVIMREFRSGSSRVLITTDLLARGIDVQQVSLVINYDLPTNRENYIHRIGRGGRFGRKGVAINFVTEEDKRILRDIETFYNTTVEEMPMNVADLI

SEQ ID NO: 39002 - protein, 280 aa, Homo sapiens
VPRRREARPFQTGNQLSVKMAGPELLLDSNIRLWVVLPIVIITFFVGMIRHYVSILLQSDKKLTQEQVSDSQVLIRSRVLRENGKYIPKQSFLTRKYYFNNPEDGFFKKTKRKVVPPSPMTDPTMLTDMMKGNVTNVLPMILIGGWINMTFSGFVTTKVPFPLTLRFKPMLQQGIELLTLDASWVSSASWYFLNVFGLRSIYSLILGQDNAADQSRMMQEQMTGAAMAMPADTNKAFKTEWEALELTDHQWALDDVEEELMAKDLHFEGMFKKELQTSIF

SEQ ID NO: 39003 - protein, 323 aa, Homo sapiens
IMVSVINTVDTSHEDMIHDAQMDYYGTRLATCSSDRSVKIFDVRNGGQILIADLRGHEGPVWQVAWAHPMYGNILASCSYDRKVIIWREENGTWEKSHEHAGHDSSVNSVCWAPHDYGLILACGSSDGAISLLTYTGEGQWEVKKINNAHTIGCNAVSWAPAVVPGSLIDHPSGQKPNYIKRFASGGCDNLIKLWKEEEDGQWKEEQKLEAHSDWVRDVAWAPSIGLPTSTIASCSQDGRVFIWTCDDASSNTWSPKLLHKFNDVVWHVSWSITANILAVSGGDNKVTLWKESVDGQWVCISDVNKGQGSVSASVTEGQQNEQ

SEQ ID NO: 39004 - protein, 10 aa, Homo sapiens
MSALPACSGL

SEQ ID NO: 39005 - protein, 38 aa, Homo sapiens
TSRAPAESEEMGLPPRRARSSSLRCGSGGVFEETGSPW

SEQ ID NO: 39006 - protein, 28 aa, Homo sapiens
MKLLNLYIKRAQTGSGGADPTTDVSGQS

SEQ ID NO: 39007 - protein, 25 aa, Homo sapiens
IEQLDVTTSEYEKEKLNDWQNFQMG

SEQ ID NO: 39008 - protein, 28 aa, Homo sapiens
MTSLVDHVRDLFCLRGTGKGWTAPLSLY

SEQ ID NO: 39009 - protein, 453 aa, Homo sapiens
TDKQQTEDVLAAGLRCLPHLPAICARRMSPAFRAMDVEPRAKGVLLEPFVHQVGGHSCVLRFNETTLCKPLVPREHQFYETLPAEMRKFTPQYKGVVSVRFEEDEDRNLCLIAYPLKGDHGIVDIVDNSDCEPKSKLLRWTTNKKHHVLETEKTPKDWVRQHRKEEKMKSHKLEEEFEWLKKSEVLYYTVEKKGNISSQLKHYNPWSMKCHQQQLQRMKENAKHRNQYKFILLENLTSRYEVPCVLDLKMGTRQHGDDASEEKAANQIRKCQQSTSAVIGVRVCGMQVYQAGSGQLMFMNKYHGRKLSVQGFKEALFQFFHNGRYLRRELLGPVLKKLTELKAVLERQESYRFYSSSLLVIYDGKERPEVVLDSDAEDLEDLSEESADESAGAYAYKPIGASSVDVRMIDFAHTTCRLYGEDTVVHEGQDAGYIFGLQSLIDIVTEISEESGE

SEQ ID NO: 39010 - protein, 136 aa, Homo sapiens
IMAALRPLVKPKIVKKRTKKFIRHQSDRYVKIKRNWRKPRGIDNRVRRRFKGQILMPNIGYGSNKKTKHMLPSGFRKFLVHNVKELEVLLMCNKSYCAEIAHNVSSKNRKAIVERAAQLAIRVTNPNARLRSEENE

SEQ ID NO: 39011 - protein, 1880 aa, Homo sapiens
LLLLTLSVLLAAGPSAAAAKLNIPKVLLPFTRATRVNFTLEASEGCYRWLSTRPEVASIEPLGLDEQQCSQKAVVQARLTQPARLTSIIFAEDITTGQVLRCDAIVDLIHDIQIVSTTRELYLEDSPLELKIQALDSEGNTFSTLAGLVFEWTIVKDSEADRFSDSHNALRILTFLESTYIPPSYISEMEKAAKQGDTILVSGMKTGSSKLKARIQEAVYKNVRPAEVRLLILENILLNPAYDVYLMVGTSIHYKVQKIRQGKITELSMPSDQYELQLQNSIPGPEGDPARPVAVLAQDTSMVTALQLGQSSLVLGHRSIRMQGASRLPNSTIYVVEPGYLGFTVHPGDRWVLETGRLYEITIEVFDKFSNKVYVSDNIRIETVLPAEFFEVLSSSQNGSYHRIRALKRGQTAIDAALTSVVDQDGGVHILQVPVWNQQEVEIHIPITLYPSILTFPWQPKTGAYQYTIRAHGGSGNFSWSSSSHLVATVTVKGVMTTGSDIGFSVIQAHDVQNPLHFGEMKVYVIEPHSMEFAPCQVEARVGQALELPLRISGLMPGGASEVVTLSDCSHFDLAVEVENQGVFQPLPGRLPPGSEHCSGIRVKAEAQGSTTLLVSYRHGHVHLSAKITIAAYLPLKAVDPSSVALVTLGSSKEMLFEGGPRPWILEPSKFFQNVTAEDTDSIGLALFAPHSSRNYQQHWILVTCQALGEQVIALSVGNKPSLTNPFPAVEPAVVKFVCAPPSRLTLAPVYTSPQLDMSCPLLQQNKQVVPVSSHRNPRLDLAAYDQEGRRFDNFSSLSIQWESTRPVLASIEPELPMQLVSQDDESGQKKLHGLQAILVHEASGTTAITATATGYQESHLSSARTKQPHDPLVPLSASIELILVEDVRVSPEEVTIYNHPGIQAELRIREGSGYFFLNTSTADVVKVAYQEARGVAMVHPLLPGSSTIMIHDLCLVFPAPAKAVVYVSDIQELYIRVVDKVEIGKTVKAYVRVLDLHKKPFLAKYFPFMDLKLRAASPIITLVALDEALDNYTITFLIRGVAIGQTSLTASVTNKAGQRINSAPQQIEVFPPFRLMPRKVTLLIGATMQVTSEGGPQPQSNILFSISNESVALVSAAGLVQGLAIGNGTVSGLVQAVDAETGKVVIISQDLVQVEVLLLRAVRIRAPIMRMRTGTQMPIYVTGITNHQNPFSFGNAVPGLTFHWSVTKRDVLDLRGRHHEASIRLPSQYNFAMNVLGRVKGRTGLRVVVKAVDPTSGQLYGLARELSDEIQVQVFEKLQLLNPEIEAEQILMSPNSYIKLQTNRDGAASLSYRVLDGPEKVPVVHVDEKGFLASGSMIGTSTIEVIAQEPFGANQTIIVAVKVSPVSYLRVSMSPVLHTQNKEALVAVPLGMTVTFTVHFHDNSGDVFHAHSSVLNFATNRDDFVQIGKGPTNNTCVVRTVSVGLTLLRVWDAEHPGLSDFMPLPVLQAISPELSGAMVVGDVLCLATVLTSLEGLSGTWSSSANSILHIDPKTGVAVARAVGSVTVYYEVAGHLRTYKEVVVSVPQRIMARHLHPIQTSFQEATASKVIVAVGDRSSNLRGECTPTQREVIQALHPETLISCQSQFKPAVFDFPSQDVFTVEPQFDTALGQYFCSITMHRLTDKQRKHLSMKKTALVVSASLSSSHFSTEQVGAEVPFSPGLFADQAEILLSNHYTSSEIRVFGAPEVLENLEVKSGSPAVLAFAKEKSFGWPSFITYTVGVLDPAAGSQGPLSTTLTFSSPVTNQAIAIPVTVAFVVDRRGPGPYGASLFQHFLDSYQVMFFTLFALLAGTAVMIIAYHTVCTPRDLAVPAALTPRASPGHSPHYFAASSPTSPNALPPARKASPPSGLWSPAYASH

SEQ ID NO: 39012 - protein, 17 aa, Homo sapiens
LDSDSLPEQWLPSGRNW

SEQ ID NO: 39013 - protein, 320 aa, Homo sapiens
LPSPAAAMKLTDSVLRSFRVAKVFRENSDKINCFDFSPNGETVISSSDDDSIVLYDCQEGKPKRTLYSKKYGVDLIRYTHAANTVVYSSNKIDDTIRYLSLHDNKYIRYFPGHSKRVVALSMSPVDDTFISGSLDKTIRLWDLRSPNCQGLMHLQGKPVCSFDPEGLIFAAGVNSEMVKLYDLRSFDKGPFATFKMQYDRTCEWTGLKFSNDGKLILISTNGSFIRLIDAFKGVVMHTFGGYANSKAVTLEASFTPDSQFIMIGSEDGKIHVWNGESGIKVAVLDGKHTGPITCLQFNPKFMTFASACSNMAFWLPTIDD

SEQ ID NO: 39014 - protein, 91 aa, Homo sapiens
MVYISNGQVLDSRSQSPWRLSLITDFFWGIAEFVVLFFKTLLQQDVKKRRSYGNSSDSRYDDGRGPPGNPPRRMGRINHLRGPSPPPMAGG

SEQ ID NO: 39015 - protein, 34 aa, Homo sapiens
TAASILRKGMTSWHHRENRVQAQKLFPHHHLLKN

SEQ ID NO: 39016 - protein, 1186 aa, Homo sapiens
LTSQSGNLASESLHLPSSSSEFDERIAAFQTKSGTASEMGTERAMGLSEEWTVHSQEATTSAWSPSFLPALEMGELTTPSRKRNSSGPDLSWLHFYRTAASSPLLDLSSSSESTEKLNNSTGLQSSSVSQTKTMHVATVFTDGGPRTLRSLTVSLGPVSKTEGFPKDSRIATTSSSVLLSPSAVESRRNSRVTGNPGDEEFIEPSTENEFGLTSLRWQNDSPTFGEHQLASSSEVQNGSPMSQTETVSRSVAPMRGGEITAHWLLTNSTTSADVTGSSASYPEGVNASVLTQFSDSTVQSGGSHTALGDRSYSESSSTSSSESLNSSAPRGERSIAGISYGQVRGTAIEQRTSSDHTDHTYLSSTFTKGERALLSITDNSSSSDIVESSTSYIKISNSSHSEYSSFFHAQTERSNISSYDGEYAQPSTESPVLHTSNLPSYTPTINMPNTSVVLDTDAEFVSDSSSSSSSSSSSSSSGPPLPLPSVSQSHHLFSSILPSTRASVHLLKSTSDASTPWSSSPSPLPVSLTTSTSAPLSVSQTTLPQSSSTPVLPRARETPVTSFQTSTMTSFMTMLHSSQTADLKSQSTPHQEKVITESKSPSLVSLPTESTKAVTTNSPLPPSLTESSTEQTLPATSTNLAQMSPTFTTTILKTSQPLMTTPGTLSSTASLVTGPIAVQTTAGKQLSLTHPEILVPQISTEGGISTERNRVIVDATTGLIPLTSVPTSAKEMTTKLGVTAEYSPASRSLGTSPSPQTTVVSTAEDLAPKSATFAVQSSTQSPTTVSSSASVNSCAVNPCLHNGECVADNTSRGYHCRCPPSWQGDDCSVDVNECLSNPCPSTAMCNNTQGSFICKCPVGYQLEKGICNLVRTFVTEFKLKRTFLNTTVEKHSDLQEVENEITKTLNMCFSALPSYIRSTVHASRESNAVVISLQTTFSLASNVTLFDLADRMQKCVNSCKSSAEVCQLLGSQRRIFRAGSLCKRKSPECDKDTSICTDLDGVALCQCKSGYFQFNKMDHSCRACEDGYRLENETCMSCPFGLGGLNCGNPYQLITVVIAAAGGGLLLILGIALIVTCCRKNKNDISKLIFKSGDFQMSPYAEYPKNPRSQEWGREAIEMHENGSTKNLLQMTDVYYSPTSVRNPELERNGLYPAYTGLPGSRHSCIFPGQYNPSFISDESRRRDYF

SEQ ID NO: 39017 - protein, 465 aa, Homo sapiens
LVLAPGVCKMKIEEVKSTTKTQRIASHSHVKGLGLDESGLAKQAASGLVGQENAREACGVIVELIKSKKMAGRAVLLAGPPGTGKTALALAIAQELGSKVPFCPMVGSEVYSTEIKKTEVLMENFRRAIGLRIKETKEVYEGEVTELTPCETENPMGGYGKTISHVIIGLKTAKGTKQLKLDPSIFESLQKERVEAGDVIYIEANSGAVKRQGRCDTYATEFDLEAEEYVPLPKGDVHKKKEIIQDVTLHDLDVANARPQGGQDILSMMGQLMKPKKTEITDKLRGEINKVVNKYIDQGIAELVPGVLFVDEVHMLDIECFTYLHRALESSIAPIVIFASNRGNCVIRGTEDITSPHGIPLDLLDRVMIIRTMLYTPQEMKQIIKIRAQTEGINISEEALNHLGEIGTKTTLRYSVQLLTPANLLAKINGKDSIEKEHVEEISELFYDAKSSAKILADQQDKYMK

SEQ ID NO: 39018 - protein, 315 aa, Homo sapiens
IWLFVRGLHGKSGTWWDEHLSEENVPFIKQLVSDEDKAQLASKLCPLKDEPWPIHPWEPGSFRVGLIALKLGMMPLWTKDGQKHVVTLLQVQDCHVLKYTSKENCNGKMATLSVGGKTVSRFRKATSILEFYRELGLPPKQTVKIFNITDNAAIKPGTPLYAAHFRPGQYVDVTAKTIGKGFQGVMKRWGFKGQPATHGQTKTHRRPGAVATGDIGRVWPGTKMPGKMGNIYRTEYGLKVWRINTKHNIIYVNGSVPGHKNCLVKVKDSKLPAYKDLGKNLPFPTYFPDGDEEELPEDLYDENVCQPGAPSITFA

SEQ ID NO: 39019 - protein, 31 aa, Homo sapiens
MERVVHGGMSIFLKKMSHSLSSWSLMKIKPN

SEQ ID NO: 39020 - protein, 305 aa, Homo sapiens
TSPAPAAGSDSVSDPQLGPLVRPRLRAPQPSLRPGPAPTPALPPGPRPGRGRSRLEPPRAPSPPAPPRPLAFLFPARPPGFRAPPATNPLATMSVELEEALPVTTAEGMAKKVTKAGGSAALSPSKKRKNSKKKNQPGKYSQLVVETIRRLGERNGSSLAKIYTEAKKVPWFDQQNGRTYLKYSIKALVQNDTLLQVKGTGANGSFKLNRKKLEGGGERRGAPAAATAPAPTAHKAKKAAPGAAGSRRADKKPARGQKPEQRSHKKGAGAKKDKGGKAKKTAAAGGKKVKKAAKPSVPKVPKGRK

SEQ ID NO: 39021 - protein, 8 aa, Homo sapiens
KTVQEKEN

SEQ ID NO: 39022 - protein, 55 aa, Homo sapiens
IGPPRTIYENRIYSLKIECGPKYPEAPPFLRFVTKINMNGVNSSNGVVDPRAYQC

SEQ ID NO: 39023 - protein, 150 aa, Homo sapiens
KEAPAPPKAEAKAKALKAKKAVLKGVHSHKKKKIRTSPTFRRPKTLRLRRQPKYPRKSAPRRNKLDHYAIIKFPLTTESAMKKIEDNNTLVFIVDVKANKHQIKQAVKKLYDIDVAKVNILIRPDGEKKAYVRLAPDYDALDVANKIGII

SEQ ID NO: 39024 - protein, 55 aa, Homo sapiens
LFLAMSSHKTFTIKRFLAKKQKQNRPIPQWIQMKPGSKIRYNSKRRHWRRTKLGL

SEQ ID NO: 39025 - protein, 23 aa, Homo sapiens
MACARPMISVYSEKGESSGKNVT

SEQ ID NO: 39026 - protein, 113 aa, Homo sapiens
KKNPLKNLRIMLKLNPYAKTMRRNTILRQARNHKLRVDKAAAAAAALPAKSDEKAAVAGKKPVVGKKGKKAAVGVKKQKKPLVGKKAAATKKPAPEKKPAEKKPTTEEKKPAA

SEQ ID NO: 39027 - protein, 24 aa, Homo sapiens
MAKSKNHTTHNQSQKWHRNGIKKA

SEQ ID NO: 39028 - protein, 15 aa, Homo sapiens
LSRSARRRPRAMGLG

SEQ ID NO: 39029 - protein, 765 aa, Homo sapiens
VWQFRMMDQARSAFSNLFGGEPLSYTRFSLARQVDGDNSHVEMKLAVDEEENADNNTKANVTKPKRCSGSICYGTIAVIVFFLIGFMIGYLGYCKGVEPKTECERLAGTESPVREEPGEDFPAARRLYWDDLKRKLSEKLDSTDFTGTIKLLNENSYVPREAGSQKDENLALYVENQFREFKLSKVWRDQHFVKIQVKDSAQNSVIIVDKNGRLVYLVENPGGYVAYSKAATVTGKLVHANFGTKKDFEDLYTPVNGSIVIVRAGKITFAEKVANAESLNAIGVLIYMDQTKFPIVNAELSFFGHAHLGTGDPYTPGFPSFNHTQFPPSRSSGLPNIPVQTISRAAAEKLFGNMEGDCPSDWKTDSTCRMVTSESKNVKLTVSNVLKEIKILNIFGVIKGFVEPDHYVVVGAQRDAWGPGAAKSGVGTALLLKLAQMFSDMVLKDGFQPSRSIIFASWSAGDFGSVGATEWLEGYLSSLHLKAFTYINLDKAVLGTSNFKVSASPLLYTLIEKTMQNVKHPVTGQFLYQDSNWASKVEKLTLDNAAFPFLAYSGIPAVSFCFCEDTDYPYLGTTMDTYKELIERIPELNKVARAAAEVAGQFVIKLTHDVELNLDYERYNSQLLSFVRDLNQYRADIKEMGLSLQWLYSARGDFFRATSRLTTDFGNAEKTDRFVMKKLNDRVMRVEYHFLSPYVSPKESPFRHVFWGSGSHTLPALLENLKLRKQNNGAFNETLFRNQLALATWTIQGAANALSGDVWDIDNEF

SEQ ID NO: 39030 - protein, 21 aa, Homo sapiens
KKFYEAFSKNLKLGIHKDSTN

SEQ ID NO: 39031 - protein, 161 aa, Homo sapiens
ILVLILVVVLAVVVPRWRQQWSGPGTTKRFPETVLARCVKYTEIHPEMRHVDCQSVWDAFKGAFISKHPCNITEEDYQPLMKLGTQTVPCNKILLWSRIKDLAHQFTQVQRDMFTLEDTLLGYLADDLTWCGEFNTSSEALGPVGLPRDVEGEQSDFCWRP

SEQ ID NO: 39032 - protein, 5 aa, Homo sapiens
MRTNL

SEQ ID NO: 39033 - protein, 427 aa, Homo sapiens
RIMATAEVLNIGKKLYEGKTKEVYELLDSPGKVLLQSKDQITAGNAARKNHLEGKAAISNKITSCIFQLLQEAGIKTAFTRKCGETAFIAPQCEMIPIEWVCRRIATGSFLKRNPGVKEGYKFYPPKVELFFKDDANNDPQWSEEQLIAAKFCFAGLLIGQTEVDIMSHATQAIFEILEKSWLPQNCTLVDMKIEFGVDVTTKEIVLADVIDNDSWRLWPSGDRSQQKDKQSYRDLKEVTPEGLQMVKKNFEWVAERVELLLKSESQCRVVVLMGSTSDLGHCEKIKKACGNFGIPCELRVTSAHKGPDETLRIKAEYEGDGIPTVFVAVAGRSNGLGPVMSGNTAYPVISCPPLTPDWGVQDVWSSLRLPSGLGCSTVLSPEGSAQFAAQIFGLSNHLVWSKLRASILNTWISLKQADKKIRECNL

SEQ ID NO: 39034 - protein, 9 aa, Homo sapiens
MRVGLLLSL

SEQ ID NO: 39035 - protein, 69 aa, Homo sapiens
IDISNVKIPKHLTDAYFKKKQLRKPRHQEGEIFDTEKGKYEITEQRKIDQKAVDSQILSKIKAIPQLQG

SEQ ID NO: 39036 - protein, 7 aa, Homo sapiens
IKQLEQR

SEQ ID NO: 39037 - protein, 19 aa, Homo sapiens
VDSQILPKIKAIPQLQGYL

SEQ ID NO: 39038 - protein, 29 aa, Homo sapiens
MVVLSVPAEVTVILLDIEGHFISLHRRKC

SEQ ID NO: 39039 - protein, 62 aa, Homo sapiens
LVREIAQDFKTDLHFQSAAIGALQEASEAYLVGLFEDTNLCAIHAKRVTIMPKDIQLACHIR

SEQ ID NO: 39040 - protein, 9 aa, Homo sapiens
MKLPGYLMG

SEQ ID NO: 39041 - protein, 36 aa, Homo sapiens
VEMSDSESEASEKKCIHTSSTISRRTDIIRRSILAS

SEQ ID NO: 39042 - protein, 182 aa, Homo sapiens
IAMNTVLSRANSLFAFSLSVMAALTFGCFITTAFKDRSVPVRLHVSRIMLKNVEDFTGPRERSDLGFITFDITADLENIFDWNVKQLFLYLSAEYSTKNNALNQVVLWDKIVLRGDNPKLLLKDMKTKYFFFDDGNGLKGNRNVTLTLSWNVVPNAGILPLVTGSGHVSVPFPDTYEITKSY

SEQ ID NO: 39043 - protein, 16 aa, Homo sapiens
KKLLADQAEASWSMTK

SEQ ID NO: 39044 - protein, 30 aa, Homo sapiens
MAEYSYVKSTKLVLKGTKTKRRDRKYQGVS

SEQ ID NO: 39045 - protein, 16 aa, Homo sapiens
MGSSHLLNKGLPLVRL

SEQ ID NO: 39046 - protein, 298 aa, Homo sapiens
LPCSTLRSLPAPPPPQPRPCAARPARAAMACRPRSPPRHQSRCDGDASPPSPARWSLGRKRRADGRRWRPEDAEEAEHRGAERRPESFTTPEGPKPRSRCSDWASAVEEDEMRTRVNKEMARYKRKLLINDFGRERKSSSGSSDSKESMSTVPADFETDESVLMRRQKQINYGKNTIAYDRYIKEVPRHLRQPGIHPKTPNKFKKYSRRSWDQQIKLWKVALHFWDPPAEEGCDLQEIHPVDLESAESSSEPQTSSQDDFDVYSGTPTKVRHMDSQVEDEFDLEACLTEPLRDFSAMS

SEQ ID NO: 39047 - protein, 35 aa, Homo sapiens
LAGAQACFTTWSGLFLLPFFLLQKLSYPAQTLKAE

SEQ ID NO: 39048 - protein, 172 aa, Homo sapiens
LISYTTNKFPSEYVPTVFDNYAVTVMIGGEPYTLGLFDTAGQEDYDRLRPLSYPQTDVFLVCFSVVSPSSFENVKEKWVPEITHHCPKTPFLLVGTQIDLRDDPSTIEKPAKNKQKPITPETAEKLARDLKAVKYVECSALTKKGLKNVFDEAILAALEPPEPKKSRRCVLL

SEQ ID NO: 39049 - protein, 804 aa, Homo sapiens
ITARSKSARMSKRHRLDLGEDYPSGKKRAGTDGKDRDRDRDREDRSKDRDRERDRGDREREREKEKEKELRASTNAMLISAGLPPLKASHSAHSTHSAHSTHSTHSAHSTHAGHAGHTSLPQCINPFTNLPHTPRYYDILKKRLQLPVWEYKDRFTDILVRHQSFVLVGETGSGKTTQIPQWCVEYMRSLPGPKRGVACTQPRRVAAMSVAQRVADEMDVMLGQEVGYSIRFEDCSSAKTILKYMTDGMLLREAMNDPLLERYGVIILDEAHERTLATDILMGVLKEVVRQRSDLKVIVMSATLDAGKFQIYFDNCPLLTIPGRTHPVEIFYTPEPERDYLEAAIRTVIQIHMCEEEEGDLLLFLTGQEEIDEACKRIKREVDDLGPEVGDIKIIPLYSTLPPQQQQRIFEPPPPKKQNGAIGRKVVVSTNIAETSLTIDGVVFVIDPGFAKQKVYNPRIRVESLLVTAISKASAQQRAGRAGRTRPGKCFRLYTEKAYKTEMQDNTYPEILRSNLGSVVLQLKKLGIDDLVHFDFMDPPAPETLMRALELLNYLAALNDDGDLTELGSMMAEFPLDPQLAKMVIASCDYNCSNEVLSITAMLSVPQCFVRPTEAKKAADEAKMRFAHIDGDHLTLLNVYHAFKQNHESVQWCYDNFINYRSLMSADNVRQQLSRIMDRFNLPRRSTDFTSRDYYINIRKALVTGYFMQVAHLERTGHYLTVKDNQVVQLHPSTVLDHKPEWVLYNEFVLTTKNYIRTCTDIKPEWLVKIAPQYYDMSNFPQCEAKRQLDRIIAKLQSKEYSQY

SEQ ID NO: 39050 - protein, 28 aa, Homo sapiens
IKKSVAYKTKKPPSLMYNVRKKKGKINV

SEQ ID NO: 39051 - protein, 173 aa, Homo sapiens
LISYTTNAFPGEYIPTVFDNYSANVMVDGKPVNLGLWDTAGQEDYDRLRPLSYPQTDVFLICFSLVSPASFENVRAKWYPEVRHHCPNTPIILVGTKLDLRDDKDPIEKLKEKKLTPITYPQGLAMAKEIGAVKYLERSALTQRGIKTVFDEAIRAVLCPPPVKKRKRKCLLL

SEQ ID NO: 39052 - protein, 166 aa, Homo sapiens
INNWKESKHKVIMASASARGNQDKDAHFPPPSKQSLLFCPKSKLHIHRAEISKIMRECQEESFWKRALPFSLVSMLVTQGLVYQGYLAANSRFGSLPKVALAGLLGFGLGKVSYIGVCQSKFHFFEDQLRGAGFGPQHNRHCLLTCEECKIKHGLSEKGDSQPSAS

SEQ ID NO: 39053 - protein, 106 aa, Homo sapiens
IDWICRRELPFTKSAHLTNPWNEHKPVKIGRDGQEIELECGTQLCLLFPPDESIDLYQVIHKMRHKRRMHSQPRSRGRPSRREPVRDVGRLETFFGLIIGTCIRIT

SEQ ID NO: 39054 - protein, 376 aa, Homo sapiens
VNMANEVIKCKAAVAWEAGKPLSIEEIEVAPPKAHEVRIKIIATAVCHTDAYTLSGADPEGCFPVILGHEGAGIVESVGEGVTKLKAGDTVIPLYIPQCGECKFCLNPKTNLCQKIRVTQGKGLMPDGTSRFTCKGKTILHYMGTSTFSEYTVVADISVAKIDPLAPLDKVCLLGCGISTGYGAAVNTAKLEPGSVCAVFGLGGVGLAVIMGCKVAGASRIIGVDINKDKFARAKEFGATECINPQDFSKPIQEVLIEMTDGGVDYSFECIGNVKVMRAALEACHKGWGVSVVVGVAASGEEIATRPFQLVTGRTWKGTAFGGWKSVESVPKLVSEYMSKKIKVDEFVTHNLSFDEINKAFELMHSGKSIRTVVKI

SEQ ID NO: 39055 - protein, 23 aa, Homo sapiens
VRRRSRWWDLTVGPISLFSALLA

SEQ ID NO: 39056 - protein, 430 aa, Homo sapiens
VASLLAGRAAMEVPPRLSHVPPPLFPSAPATLASRSLSHWRPRPPRQLAPLLPSLAPSSARQGARRAQRHVTAQQPSRLAGGAAIKGGRRRRPDLFRRHFKSSSIQRSAAAAAATRTARQHPPADSSVTMEDMNEYSNIEEFAEGSKINASKNQQDDGKMFIGGLSWDTSKKDLTEYLSRFGEVVDCTIKTDPVTGRSRGFGFVLFKDAASVDKVLELKEHKLDGKLIDPKRAKALKGKEPPKKVFVGGLSPDTSEEQIKEYFGAFGEIENIELPMDTKTNERRGFCFITYTDEEPVKKLLESRYHQIGSGKCEIKVAQPKEVYRQQQQQQKGGRGAAAGGRGGTRGRGRGQGQNWNQGFNNYYDQGYGNYNSAYGGDQNYSGYGGYDYTGYNYGNYGYGQGYADYSGQQSTYGKASRGGGNHQNNYQPY

SEQ ID NO: 39057 - protein, 44 aa, Homo sapiens [sequence omitted]

SEQ ID NO: 39058 - protein, 7 aa, Homo sapiens
KMRQRSK

SEQ ID NO: 39059 - protein, 4 aa, Homo sapiens
IFGF

SEQ ID NO: 39060 - protein, 74 aa, Homo sapiens
LLRSCRSEMEVDAPGVDGRDGLRERRGFSEGGRQNFDVRPQSGANGLPKHSYWLDLWLFILFDVVVFLFVYFLP

SEQ ID NO: 39061 - protein, 115 aa, Homo sapiens [sequence omitted]

SEQ ID NO: 39062 - protein, 220 aa, Homo sapiens
LSAEWKRVLLFVSLAMALQLSREQGITLRGSAEIVAEFFSFGINSILYQRGIYPSETFTRVQKYGLTLLVTTDLELIKYLNNVVEQLKDWLYKCSVQKLVVVISNIESGEVLERWQFDIECDKTAKDDSAPREKSQKAIQDEIRSVIRQITATVTFLPLLEVSCSFDLLIYTDKDLVVPEKWEESGPQFITNSEEVRLRSFTTTIHKVNSMVAYKIPVND

SEQ ID NO: 39063 - protein, 136 aa, Homo sapiens [sequence omitted]

SEQ ID NO: 39064 - protein, 96 aa, Homo sapiens
LTELAGGGVQSGEPASQAEKLEPGTKRGRTECVCRLELRAEAFGPEAPAVTPRDSAVPSTAESPRLPAKTLFLANFSFSSPPPRPPSSAPPPSLAD

SEQ ID NO: 39065 - protein, 438 aa, Homo sapiens
LLHEPFQLSFPPPPLSYPSVFPAVARVLPQRSGDYRAAGMPQLSGGGGGGGGDPELCATDEMIPFKDEGDPQKEKIFAEISHPEEEGDLADIKSSLVNESEIIPASNGHEVARQAQTSQEPYHDKAREHPDDGKHPDGGLYNKGPSYSSYSGYIMMPNMNNDPYMSNGSLSPPIPRTSNKVPVVQPSHAVHPLTPLITYSDEHFSPGSHPSHIPSDVNSKQGMSRHPPAPDIPTFYPLSPGGVGQITPPLGWQGQPVYPITGGFRQPYPSSLSVDTSMSRFSHHMIPGPPGPHTTGIPHPAIVTPQVKQEHPHTDSDLMHVKPQHEQRKEQEPKRPHIKKPLNAFMLYMKEMRANVVAECTLKESAAINQILGRRWHALSREEQAKYYELARKERQLHMQLYPGWSARDNYGKKKKRKREKLQESASGTGPRMTAAYI

SEQ ID NO: 39066 - protein, 425 aa, Homo sapiens
LLHEPFQLSFPPPPLSYPSVFPAVARVLPQRSGDYRAAGMPQLSGGGGGGGGDPELCATDEMIPFKDEGDPQKEKIFAEISHPEEEGDLADIKSSLVNESEIIPASNGHEVARQAQTSQEPYHDKAREHPDDGKHPDGGLYNKGPSYSSYSGYIMMPNMNNDPYMSNGSLSPPIPRTSNKVPVVQPSHAVHPLTPLITYSDEHFSPGSHPSHIPSDVNSKQGMSRHPPAPDIPTFYPLSPGGVGQITPPLGWFSHHMIPGPPGPHTTGIPHPAIVTPQVKQEHPHTDSDLMHVKPQHEQRKEQEPKRPHIKKPLNAFMLYMKEMRANVVAECTLKESAAINQILGRRWHALSREEQAKYYELARKERQLHMQLYPGWSARDNYGKKKKRKREKLQESASGGKRSSFPTCKAKAATPGPLLEMEAC

SEQ ID NO: 39067 - protein, 5 aa, Homo sapiens
MLAFL

SEQ ID NO: 39068 - protein, 12 aa, Homo sapiens
MNSVRIPPAFSP

SEQ ID NO: 39069 - protein, 26 aa, Homo sapiens
RMLAIKRCKHFELGGDRKRKGQVIQF

SEQ ID NO: 39070 - protein, 942 aa, Homo sapiens
LPGPGSLLLSPPSFPARPREPRGCVTAAPPDKMDTAEEDICRVCRSEGTPEKPLYHPCVCTGSIKFIHQECLVQWLKHSRKEYCELCKHRFAFTPIYSPDMPSRLPIQDIFAGLVTSIGTAIRYWFHYTLVAFAWLGVVPLTACRIYKCLFTGSVSSLLTLPLDMLSTENLLADCLQGCFVVTCTLCAFISLVWLREQIVHGGAPIWLEHAAPPFNAAGHHQNEAPAGGNGAENVAADQPANPPAENAVVGENPDAQDDQAEEEEEDNEEEDDAGVEDAADANNGAQDDMNWNALEWDRAAEELTWERMLGLDGSLVFLEHVFWVVSLNTLFILVFAFCPYHIGHFSLVGLGFEEHVQASHFEGLITTIVGYILLAITLIICHGLATLVKFHRSRRLLGVCYIVVKVSLLVVVEIGVFPLICGWWLDICSLEMFDATLKDRELSFQSAPGTTMFLHWLVGMVYVFYFASFILLLREVLRPGVLWFLRNLNDPDFNPVQEMIHLPIYRHLRRFILSVIVFGSIVLLMLWLPIRIIKSVLPNFLPYNVMLYSDAPVSELSLELLLLQVVLPALLEQGHTRQWLKGLVRAWTVTAGYLLDLHSYLLGDQEENENSANQQVNNNQHARNNNAIPVVGEGLHAAHQAILQQGGPVGFQPYRRPLNFPLRIFLLIVFMCITLLIASLICLTLPVFAGRWLMSFWTGTAKIHELYTAACGLYVCWLTIRAVTVMVAWMPQGRRVIFQKVKEWSLMIMKTLIVAVLLAGVVPLLLGLLFELVIVAPLRVPLDQTPLFYPWQDWALGVLHAKIIAAITLMGPQWWLKTVIEQVYANGIRNIDLHYIVRKLAAPVISVLLLSLCVPYVIASGVVPLLGVTAEMQNLVHRRIYPFLLMVVVLMAILSFQVRQFKRLYEHIKNDKYLVGQRLVNYERKSGKQGSSPPPPQSSQE

SEQ ID NO: 39071 - protein, 134 aa, Homo sapiens
LLEPSEAMPKSKELVSSSSSGSDSDSEVDKKLKRKKQVAPEKPVKKQKTGETSRALSSSKQSSSSRDDNMFQIGKMRYVSVRDFKGKVLIDIREYWMDPEGEMKPGRKGISLNPEQWSQLKEQISDIDDAVRKL

SEQ ID NO: 39072 - protein, 1103 aa, Homo sapiens
ICLQGNWGVRKLGTHINMANLLKTVVTGCSCPLLSNLGSCKGLRVKKDFLRTFYTHQELWCKAPVKPGIPYKQLTVGVPKEIFQNEKRVALSPAGVQNLVKQGFNVVVESGAGEASKFSDDHYRVAGAQIQGAKEVLASDLVVKVRAPMVNPTLGVHEADLLKTSGTLISFIYPAQNPELLNKLSQRKTTVLAMDQVPRVTIAQGYDALSSMANIAGYKAVVLAANHFGRFFTGQITAAGKVPPAKILIVGGGVAGLASAGAAKSMGAIVRGFDTRAAALEQFKSLGAEPLEVDLKESGEGQGGYAKEMSKEFIEAEMKLFAQQCKEVDILISTALIPGKKAPVLFNKEMIESMKEGSVVVDLAAEAGGNFETTKPGELYIHKGITHIGYTDLPSRMATQASTLYSNNITKLLKAISPDKDNFYFDVKDDFDFGTMGHVIRGTVVMKDGKVIFPAPTPKNIPQGAPVKQKTVAELEAEKAATITPFRKTMSTASAYTAGLTGILGLGIAAPNLAFSQMVTTFGLAGIVGYHTVWGVTPALHSPLMSVTNAISGLTAVGGLALMGGHLYPSTTSQGLAALAAFISSVNIAGGFLVTQRMLDMFKRPTDPPEYNYLYLLPAGTFVGGYLAALYSGYNIEQIMYLGSGLCCVGALAGLSTQGTARLGNALGMIGVAGGLAATLGVLKPGPELLAQMSGAMALGGTIGLTIAKRIQISDLPQLVAAFHSLVGLAAVLTCIAEYIIEYPHFATDAAANLTKIVAYLGTYIGGVTFSGSLIAYGKLQGLLKSAPLLLPGRHLLNAGLLAASVGGIIPFMVDPSFTTGITCLGSVSALSAVMGVTLTAAIGGADMPVVITVLNSYSGWALCAEGFLLNNNLLTIVGALIGSSGAILSYIMCVAMNRSLANVILGGYGTTSTAGGKPMEISGTHTEINLDNAIDMIREANSIIITPGYGLCAAKAQYPIADLVKMLTEQGKKVRFGIHPVAGRMPGQLNVLLAEAGVPYDIVLEMDEINHDFPDTDLVLVIGANDTVNSAAQEDPNSIIAGMPVLEVWKSKQVIVMKRSLGVGYAAVDNPIFYKPNTAMLLGDAKKTCDALQAKVRESYQK

SEQ ID NO: 39073 - protein, 20 aa, Homo sapiens
RKKRMRRLKRKRRKMRQRSK

SEQ ID NO: 39074 - protein, 5 aa, Homo sapiens
MTEYC

SEQ ID NO: 39075 - protein, 4 aa, Homo sapiens
KLLT

SEQ ID NO: 39076 - protein, 4 aa, Homo sapiens
KLGL

SEQ ID NO: 39077 - protein, 16 aa, Homo sapiens
MVPLGASVAGLAAPGW

SEQ ID NO: 39078 - protein, 126 aa, Homo sapiens
KTYNSHLAESTSPVQSMLDAYFPELIANFAASLCSDVILYPLETVLHRLHIQGTRTIIDNTDLGYEVLPINTQYEGMRDCINTIRQEEGVFGFYKGFGAVIIQYTLHAAVLQITKIIYSTLLQNNI

SEQ ID NO: 39079 - protein, 17 aa, Homo sapiens
MISKNKRVFANSHHNIK

SEQ ID NO: 39080 - protein, 28 aa, Homo sapiens
MSLIPKTWPFRHKRRSWVKWCPNPSPPP

SEQ ID NO: 39081 - protein, 16 aa, Homo sapiens
MASRETRKWTPWLLES

SEQ ID NO: 39082 - protein, 26 aa, Homo sapiens
LGPNDQYKFYSVNVDYSKLKKEGSDF

SEQ ID NO: 39083 - protein, 5 aa, Homo sapiens
LLSTR

SEQ ID NO: 39084 - protein, 160 aa, Homo sapiens
LTAGQLRSMSTPARRRLMRDFKRLQEDPPVGVSGAPSENNIMQWNAVIFGPEGTPFEDGTFKLVIEFSEEYPNKPPTVRFLSKMFHPNVYADGSICLDILQNRWSPTYDVSSILTSIQSLLDEPNPNSPANSQAAQLYQENKREYEKRVSAIVEQSWNDS

SEQ ID NO: 39085 - protein, 444 aa, Homo sapiens [sequence omitted]

SEQ ID NO: 39086 - protein, 32 aa, Homo sapiens
KVQITLTSHDCGELTKKDVKLAKFIEKAAASV

SEQ ID NO: 39087 - protein, 47 aa, Homo sapiens
KEYRQMYRTEIRMARMARKAGNFYVPAEPKLAFVIRIRGINGVSPKV

SEQ ID NO: 39088 - protein, 9 aa, Homo sapiens
INRLIRRMN

SEQ ID NO: 39089 - protein, 337 aa, Homo sapiens
TAGMVGREKELSIHFVPGSCRLVEEEVNIPNRRVLVTGATGLLGRAVHKEFQQNNWHAVGCGFRRARPKFEQVNLLDSNAVHHIIHDFQPHVIVHCAAERRPDVVENQPDAASQLNVDASGNLAKEAAAVGAFLIYISSDYVFDGTNPPYREEDIPAPLNLYGKTKLDGEKAVLENNLGAAVLRIPILYGEVEKLEESAVTVMFDKVQFSNKSANMDHWQQRFPTHVKDVATVCRQLAEKRMLDPSIKGTFHWSGNEQMTKYEMACAIADAFNLPSSHLRPITDSPVLGAQRPRNAQLDCSKLETLGIGQRTPFRIGIKESLWPFLIDKRWRQTVFH

SEQ ID NO: 39090 - protein, 202 aa, Homo sapiens
KNKPYPKSRFCRGVPDAKIRIFDLGRKKAKVDEFPLCGHMVSDEYEQLSSEALEAARICANKYMVKSCGKDGFHIRVRLHSFHVIRINKMLSCAGADRLQTGMRGAFGKPQGTLARVHTGQVIMSIRTKLQNKEHVIEALGRAKFKFPGRQKIHISKKWGFTKFNADEFEDMVAEKRLIPDGCGVKYIPNRGPLDKWRALHS

SEQ ID NO: 39091 - protein, 226 aa, Homo sapiens
IWDVRTTKCIATVNTKGENINICWSPDGQTIAVGNKDDVVTFIDAKTHRSKAEEQFKFEVNEISWNNDNNMFFLTNGNGCINILSYPELKPVQSINAHPSNCICIKFDPMGKYFATGSADALVSLWDVDELVCVRCFSRLDWPVRTLSFSHDGKMLASASEDHFIDIAEVETGDKLWEVQCESPTFTVAWHPKRPLLAFACDDKDGKYDSSREAGTVKLFGLPNDS

SEQ ID NO: 39092 - protein, 374 aa, Homo sapiens
LGRGLSSASLSAAEPAAPSPAGGDERAPRRHRRRGAAAPRPSMSEAGEEQPMETTGATENGHEAVPEGESPAGAGTGAAAGAGGATAAPPSGNQNGAEGDQINASKNEEDAGKMFVGGLSWDTSKKDLKDYFTKFGEVVDCTIKMDPNTGRSRGFGFILFKDAASVEKVLDQKEHRLDGRVIDPKKAMAMKKDPVKKIFVGGLNPEATEEKIREYFGEFGEIEAIELPMDPKLNKRRGFVFITFKEEEPVKKVLEKKFHTVSGSKCEIKVAQPKEVYQQQQYGSGGRGNRNRGNRGSGGGGGGGGQSQSWNQGYGNYWNQGYGYQQGYGPGYGGYDYSPYGYYGYGPGYDYSQGSTNYGKSQRRGGHQNNYKPY

SEQ ID NO: 39093 - protein, 23 aa, Homo sapiens
VIPSCAVVLWSSVLLSPSAFSPT

SEQ ID NO: 39094 - protein, 320 aa, Homo sapiens
LRGCSLEQRSFISVRLLSYLSACRHPMEDSMDMDMSPLRPQNYLFGCELKADKDYHFKVDNDENEHQLSLRTVSLGAGAKDELHIVEAEAMNYEGSPIKVTLATLKMSVQPTVSLGGFEITPPVVLRLKCGSGPVHISGQHLVAVEEDAESEDEEEEDVKLLSISGKRSAPGGGSKVPQKKVKLAADEDDDDDDEEDDDEDDDDDDFDDEEAEEKAPVKKSIRDTPAKNAQKSNQNGKDSKPSSTPRSKGQESFKKQEKTPKTPKGPSSVEDIKAKMQASIEKGGSLPKVEAKFINYVKNCFRMTDQEAIQDLWQWRKSL

SEQ ID NO: 39095 - protein, 593 aa, Homo sapiens
IMEGKWLLCMLLVLGTAIVEAHDGHDDDVIDIEDDLDDVIEEVEDSKPDTTAPPSSPKVTYKAPVPTGEVYFADSFDRGTLSGWILSKAKKDDTDDEIAKYDGKWEVEEMKESKLPGDKGLVLMSRAKHHAISAKLNKPFLFDTKPLIVQYEVNFQNGIECGGAYVKLLSKTPELNLDQFHDKTPYTIMFGPDKCGEDYKLHFIFRHKNPKTGIYEEKHAKRPDADLKTYFTDKKTHLYTLILNPDNSFEILVDQSVVNSGNLLNDMTPPVNPSREIEDPEDRKPEDWDERPKIPDPEAVKPDDWDEDAPAKIPDEEATKPEGWLDDEPEYVPDPDAEKPEDWDEDMDGEWEAPQIANPRCESAPGCGVWQRPVIDNPNYKGKWKPPMIDNPSYQGIWKPRKIPNPDFFEDLEPFRMTPFSAIGLELWSMTSDIFFDNFIICADRRIVDDWANDGWGLKKAADGAAEPGVVGQMIEAAEERPWLWVVYILTVALPVFLVILFCCSGKKQTSGMEYKKTDAPQPDVKEEEEEKEEEKDKGDEEEEGEEKLEEKQKSDAEEDGGTVSQEEEDRKPKAEEDEILNRSPRNRKPRRE

SEQ ID NO: 39096 - protein, 184 aa, Homo sapiens [sequence omitted]

SEQ ID NO: 39097 - protein, 701 aa, Homo sapiens [sequence omitted]

SEQ ID NO: 39098 - protein, 22 aa, Homo sapiens
LTCFLMTAPGPAADGRRPGVRI

SEQ ID NO: 39099 - protein, 935 aa, Homo sapiens
IPTPSLTNFVIWKYPRKMLTLQTWLVQALFIFLTTESTGELLDPCGYISPESPVVQLHSNFTAVCVLKEKCMDYFHVNANYIVWKTNHFTIPKEQYTIINRTASSVTFTDIASLNIQLTCNILTFGQLEQNVYGITIISGLPPEKPKNLSCIVNEGKKMRCEWDGGRETHLETNFTLKSEWATHKFADCKAKRDTPTSCTVDYSTVYFVNIEVWVEAENALGKVTSDHINFDPVYKVKPNPPHNLSVINSEELSSILKLTWTNPSIKSVIILKYNIQYRTKDASTWSQIPPEDTASTRSSFTVQDLKPFTEYVFRIRCMKEDGKGYWSDWSEEASGITYEDRPSKAPSFWYKIDPSHTQGYRTVQLVWKTLPPFEANGKILDYEVTLTRWKSHLQNYTVNATKLTVNLTNDRYLATLTVRNLVGKSDAAVLTIPACDFQATHPVMDLKAFPKDNMLWVEWTTPRESVKKYILEWCVLSDKAPCITDWQQEDGTVHRTYLRGNLAESKCYLITVTPVYADGPGSPESIKAYLKQAPPSKGPTVRTKKVGKNEAVLEWDQLPVDVQNGFIRNYTIFYRTIIGNETAVNVDSSHTEYTLSSLTSDTLYMVRMAAYTDEGGKDGPEFTFTTPKFAQGEIEAIVVPVCLAFLLTTLLGVLFCFNKRDLIKKHIWPNVPDPSKSHIAQWSPHTPPRHNFNSKDQMYSDGNFTDVSVVEIEANDKKPFPEDLKSLDLFKKEKINTEGHSSGIGGSSCMSSSRPSISSSDENESSQNTSSTVQYSTVVHSGYRHQVPSVQVFSRSESTQPLLDSEERPEDLQLVDHVDGGDGILPRQQYFKQNCSQHESSPDISHFERSKQVSSVNEEDFVRLKQQISDHISQSCGSGQMKMFQEVSAADAFGPGTEGQVERFETVGMEAATDEGMPKSYLPQTVRQGGYMPQ

SEQ ID NO: 39100 - protein, 95 aa, Homo sapiens
KDDEVQVVRGHYKGQQIGKVVQVYRKKYVIYIERVQREKANGTTVHVGIHPSKVVITRLKLDKDCEKILERKAKSCQVGKEKGKYKEETIEKMQE

SEQ ID NO: 39101 - protein, 557 aa, Homo sapiens
VAHSLSSAAARSRLCPKEETVTDLETAVLYPSHSSFTMPGSLPLNAEACWPKDVGIVALEIYFPSQYVDQAELEKYDGVDAGKYTIGLGQAKMGFCTDREDINSLCMTVVQNLMERNNLSYDCIGRLEVGTETIIDKSKSVKTNLMQLFEESGNTDIEGIDTTNACYGGTAAVFNAVNWIESSSWDGRYALVVAGDIAVYATGNARPTGGVGAVALLIGPNAPLIFERGLRGTHMQHAYDFYKPDMLSEYPIVDGKLSIQCYLSALDRCYSVYCKKIHAQWQKEGNDKDFTLNDFGFMIFHSPYCKLVQKSLARMLLNDFLNDQNRDKNSIYSGLEAFGDVKLEDTYFDRDVEKAFMKASSELFSQKTKASLLVSNQNGNMYTSSVYGSLASVLAQYSPQQLAGKRIGVFSYGSGLAATLYSLKVTQDATPGSALDKITASLCDLKSRLDSRTGVAPDVFAENMKLREDTHHLVNYIPQGSIDSLFEGTWYLVRVDEKHRRTYARRPTPNDDTLDEGVGLVHSNIATEHIPSPAKKVPRLPATAAEPEAAVISNGEH

SEQ ID NO: 39102 - protein, 4 aa, Homo sapiens
MRPE

SEQ ID NO: 39103 - protein, 9 aa, Homo sapiens
LMTLFQFFL

SEQ ID NO: 39104 - protein, 19 aa, Homo sapiens
ITAFEDYVQSMDVAAFNKI

SEQ ID NO: 39105 - protein, 184 aa, Homo sapiens
MREYKLVVLGSRGVGKSALTVQFVQGIFVEKYDPTIEDSYREQVEVDAQQCMLEILDTAGTEQFTAMRDLYMKNGQGFALVYSITAQSTFNDLQDLREQILRVKDTDDVPMILVGNKCDLEDERVVGKEQGQNLARQWNNCAFLESSAKSKINVNEIFYDLVRQINRKTPVPGKARKKSSCQLL

SEQ ID NO: 39106 - protein, 31 aa, Homo sapiens
LAPLFMVLLWVKPITKDYIMNPPLGKESIPL

SEQ ID NO: 39107 - protein, 11 aa, Homo sapiens
KEYRQMYRTEI

SEQ ID NO: 39108 - protein, 15 aa, Homo sapiens
IKLPQASKSTSESFI

SEQ ID NO: 39109 - protein, 77 aa, Homo sapiens
LIPDSIGKDIEKACQPIYPLHDVFVRKVKMLKKPKFELGKLMELHGEGSSSGRATGDETSAKVERADGYEPPVQESV

SEQ ID NO: 39110 - protein, 325 aa, Homo sapiens
TAATAKPRSSQGGGKARALEMENSQLCKLFIGGLNVQTSESGLRGHFEAFGTLTDCVVVVNPQTKRSRCFGFVTYSNVEEADAAMAASPHAVDGNTVELKRAVSREDSARPGAHAKVKKLFVGGLKGDVAEGDLIEHFSQFGTVEKAEIIADKQSGKKRGFGFVYFQNHDAADKAAVVKFHPIQGHRVEVKKAVPKEDIYSGGGGGGSRSSRGGRGGRGRGGGRDQNGLSKGGGGGYNSYGGYGGGGGGGYNAYGGGGGGSSYGGSDYGNGFGGFGSYSQHQSSYGPMKSGGGGGGGGSSWGGRSNSGPYRGGYGGGGGYGGSSF

SEQ ID NO: 39111 - protein, 64 aa, Homo sapiens
LEKTIEKDYIDYIQTSCWKEKQQKSELTNLAGLYRDERLKQKAESLKLENCEKLSKLIGLRRGG

SEQ ID NO: 39112 - protein, 284 aa, Homo sapiens
KMAVPPTYADLGKSARDVFTKGYGFGLIKLDLKTKSENGLEFTSSGSANTETTKVTGSLETKYRWTEYGLTFTEKWNTDNTLGTEITVEDQLARGLKLTFDSSFSPNTGKKNAKIKTGYKREHINLGCDMDFDIAGPSIRGALVLGYEGWLAGYQMNFETAKSRVTQSNFAVGYKTDEFQLHTNVNDGTEFGGSIYQKVNKKLETAVNLAWTAGNSNTRFGIAAKYQIDPDACFSAKVNNSSLIGLGYTQTLKPGIKLTLSALLDGKNVNAGGHKLGLGLEFQA

SEQ ID NO: 39113 - protein, 72 aa, Homo sapiens
LRHLPDYRDPPDGSGRLDQLLSLSMVWANHLFLGCSYNKDLLDKVMEMADGIEVEDLPQFTTRSELMKKHQS

SEQ ID NO: 39114 - protein, 7 aa, Homo sapiens
KMASSAE

SEQ ID NO: 39115 - protein, 1194 aa, Homo sapiens [sequence omitted]

SEQ ID NO: 39116 - protein, 9 aa, Homo sapiens
ISIHSKLVF

SEQ ID NO: 39117 - protein, 1276 aa, Homo sapiens
VNRDMEPPGGSLGPGRGTRDKKKGRSPDELPSAGGDGGKSKKFTLKRLMADELERFTSMRIKKEKEKPNSAHRNSSASYGDDPTAQSLQDVSDEQVLVLFEQMLLDMNLNEEKQQPLREKDIIIKREMVSQYLYTSKAGMSQKESSKSAMMYIQELRSGLRDMPLLSCLESLRVSLNNNPVSWVQTFGAEGLASLLDILKRLHDEKEETAGSYDSRNKHEIIRCLKAFMNNKFGIKTMLETEEGILLLVRAMDPAVPNMMIDAAKLLSALCILPQPEDMNERVLEAMTERAEMDEVERFQPLLDGLKSGTTIALKVGCLQLINALITPAEELDFRVHIRSELMRLGLHQVLQDLREIENEDMRVQLNVFDEQGEEDSYDLKGRLDDIRMEMDDFNEVFQILLNTVKDSKAEPHFLSILQHLLLVRNDYEARPQYYKLIEECISQIVLHKNGADPDFKCRHLQIEIEGLIDQMIDKTKVEKSEAKAAELEKKLDSELTARHELQVEMKKMESDFEQKLQDLQGEKDALHSEKQQIATEKQDLEAEVSQLTGEVAKLTKELEDAKKEMASLSAAAITVPPSVPSRAPVPPAPPLPGDSGTIIPPPPAPGDSTTPPPPPPPPPPPPPLPGGVCISSPPSLPGGTAISPPPPLSGDATIPPPPPLPEGVGIPSPSSLPGGTAIPPPPPLPGSARIPPPPPPLPGSAGIPPPPPPLPGEAGMPPPPPPLPGGPGIPPPPPFPGGPGIPPPPPGMGMPPPPPFGFGVPAAPVLPFGLTPKKLYKPEVQLRRPNWSKLVAEDLSQDCFWTKVKEDRFENNELFAKLTLTFSAQTKTSKAKKDQEGGEEKKSVQKKKVKELKVLDSKTAQNLSIFLGSFRMPYQEIKNVILEVNEAVLTESMIQNLIKQMPEPEQLKMLSELKDEYDDLAESEQFGVVMGTVPRLRPRLNAILFKLQFSEQVENIKPEIVSVTAACEELRKSESFSNLLEITLLVGNYMNAGSRNAGAFGFNISFLCKLRDTKSTDQKMTLLHFLAELCENDYPDVLKFPDELAHVEKASRVSAENLQKNLDQMKKQISDVERDVQNFPAATDEKDKFVEKMTSFVKDAQEQYNKLRMMHSNMETLYKELGEYFLFDPKKLSVEEFFMDLHNFRNMFLQAVKENQKRRETEEKMRRAKLAKEKAEKERLEKQQKREQLIDMNAEGDETGVMDSLLEALQSGAAFRRKRGPRQANRKAGCAVTSLLASELTKDDAMAAVPAKVSKNSETFPTILEEAKELVGRAS

SEQ ID NO: 39118 - protein, 9 aa, Homo sapiens
INRLIRRMN

SEQ ID NO: 39119 - protein, 330 aa, Homo sapiens
ILVAAATHALAAAMTEQMTLRGTLKGHNGWVTQIATTPQFPDMILSASRDKTIIMWKLTRDETNYGIPQRALRGHSHFVSDVVISSDGQFALSGSWDGTLRLWDLTTGTTTRRFVGHTKDVLSVAFSSDNRQIVSGSRDKTIKLWNTLGVCKYTVQDESHSEWVSCVRFSPNSSNPIIVSCGWDKLVKVWNLANCKLKTNHIGHTGYLNTVTVSPDGSLCASGGKDGQAMLWDLNEGKHLYTLDGGDIINALCFSPNRYWLCAATGPSIKIWDLEGKIIVDELKQEVISTSSKAEPPQCTSLAWSADGQTLFAGYTDNLVRVWQVTIGTR

SEQ ID NO: 39120 - protein, 450 aa, Homo sapiens
TMMLGTEGGEGFVVKVRGLPWSCSADEVQRFFSDCKIQNGAQGIRFIYTREGRPSGEAFVELESEDEVKLALKKDRETMGHRYVEVFKSNNVEMDWVLKHTGPNSPDTANDGFVRLRGLPFGCSKEEIVQFFSGLEIVPNGITLPVDFQGRSTGEAFVQFASQEIAEKALKKHKERIGHRYIEIFKSSRAEVRTHYDPPRKLMAMQRPGPYDRPGAGRGYNSIGRGAGFERMRRGAYGGGYGGYDDYNGYNDGYGFGSDRFGRDLNYCFSGMSDHRYGDGGSTFQSTTGHCVHMRGLPYRATENDIYNFFSPLNPVRVHIEIGPDGRVTGEADVEFATHEDAVAAMSKDKANMQHRYVELFLNSTAGASGGAYEHRYVELFLNSTAGASGGAYGSQMMGGMGLSNQSSYGGPASQQLSGGYGGGYGGQSSMSGYDQVLQENSSDFQSNIA

SEQ ID NO: 39121 - protein, 132 aa, Homo sapiens
ITSAANMPEPAKSAPAPKKGSKKAVTKAQKKDGKKRKRSRKESYSVYVYKVLKQVHPDTGISSKAMGIMNSFVNDIFERIAGEASRLAHYNKRSTITSREIQTAVRLLLPGELAKHAVSEGTKAVTKYTSSK

SEQ ID NO: 39122 - protein, 104 aa, Homo sapiens
IMSGRGKGGKGLGKGGAKRHRKVLRDNIQGITKPAIRRLARRGGVKRISGLIYEETRGVLKVFLENVIRDAVTYTEHAKRKTVTAMDVVYALKRQGRTLYGFGG

SEQ ID NO: 39123 - protein, 9 aa, Homo sapiens
RPLVLVIFV

SEQ ID NO: 39124 - protein, 7 aa, Homo sapiens
LVLVIFV

SEQ ID NO: 39125 - protein, 132 aa, Homo sapiens
IAMSGRGKQGGKARAKAKSRSSRAGLQFPVGRVHRLLRKGNYAERVGAGAPVYLAAVLEYLTAEILELAGNAARDNKKTRIIPRHLQLAIRNDEELNKLLGRVTIAQGGVLPNIQAVLLPKKTESHHKAKGK

SEQ ID NO: 39126 - protein, 21 aa, Homo sapiens
VGYVDDTQFVRFDSDAATPRM

SEQ ID NO: 39127 - protein, 366 aa, Homo sapiens
RMAVMAPRTLLLLLSGALALTQTWAGSHSMRYFFTSVSRPGRGEPRFIAVGYVDDTQFVRFDSDAASQRMEPRAPWIEQEGPEYWDQETRNVKAQSQTDRVDLGTLRGYYNQSEAGSHTIQIMYGCDVGSDGRFLRGYRQDAYDGKDYIALNEDLRSWTAADMAAQITKRKWEAAHEAEQLRAYLDGTCVEWLRRYLENGKETLQRTDPPKTHMTHHPISDHEATLRCWALGFYPAEITLTWQRDGEDQTQDTELVETRPAGDGTFQKWAAVVVPSGEEQRYTCHVQHEGLPKPLTLRWELSSQPTIPIVGIIAGLVLLGAVITGAVVAAVMWRRKSSDRKGGSYTQAASSDSAQGSDVSLTACKV

SEQ ID NO: 39128 - protein, 217 aa, Homo sapiens
VKMSSSEEVSWISWFCGLRGNEFFCEVDEDYIQDKFNLTGLNEQVPHYRQALDMILDLEPDEELEDNPNQSDLIEQAAEMLYGLIHARYILTNRGIAQMLEKYQQGDFGYCPRVYCENQPMLPIGLSDIPGEAMVKLYCPKCMDVYTPKSSRHHHTDGAYFGTGFPHMLFMVHPEYRPKRPANQFVPRLYGFKIHPMAYQLQLQAASNFKSPVKTIR

SEQ ID NO: 39129 - protein, 259 aa, Homo sapiens
KMAASVLNTVLRRLPMLSLFRGSHRVQVPLQTLCTKAPSEEDSLSSVPISPYKDEPWKYLESEEYQERYGSRPVWADYRRNHKGGVPPQRTRKTCIRRNKVVGNPCPICRDHKLHVDFRNVKLLEQFVCAHTGIIFYAPYTGVCVKQHKRLTQAIQKARDHGLLIYHIPQVEPRDLDFSTSHGAVSATPPAPTLVSGDPWYPWYNWKQPPERELSRLRRLYQGHLQEESGPPPESMPKMPPRTPAEASSTGQTGPQSAL

SEQ ID NO: 39130 - protein, 484 aa, Homo sapiens
LLLIIALMLWRLHWRRLLSKAERRVLEEELTVHLSVPGDTILINNRPGPREPPPYQEPRPRGNPPHSAPCVPNGSALLLSNPAYRLLLATYARPPRGPGPPTPAWAKPTNTQAYSGDYMEPEKPGAPLLPPPPQNSVPHYAEADIVTLQGVTGGNTYAVPALPPGAVGDGPPRVDFPRSRLRFKEKLGEGQFGEVHLCEVDSPQDLVSLDFPLNVRKGHPLLVAVKILRPDATKNARNDFLKEVKIMSRLKDPNIIRLLGVCVQDDPLCMITDYMENGDLNQFLSAHQLEDKAAEGAPGDGQAAQGPTISYPMLLHVAAQIASGMRYLATLNFVHRDLATRNCLVGENFTIKIADFGMSRNLYAGDYYRVQGRAVLPIRWMAWECILMGKFTTASDVWAFGVTLWEVLMLCRAQPFGQLTDEQVIENAGEFFRDQGRQVYLSRPPACPQGLYELMLRCWSRESEQRPPFSQLHRFLAEDALNTV

SEQ ID NO: 39131 - protein, 56 aa, Homo sapiens
IALIALFSEMLYRFPNMVVAQVTRESVQQAIASGITAQQIIHFLRTRAHPVMLKQV

SEQ ID NO: 39132 - protein, 52 aa, Homo sapiens [sequence omitted]

SEQ ID NO: 39133 - protein, 98 aa, Homo sapiens
LLGRSRPQLGRPMSSGAHGEEGSARMWKTLTFFVALPGVAVSMLNVYLKSHHGEHERPEFIAYPHLRIRTKPFPWGDGNHTLFHNPHVNPLPTGYEDE

SEQ ID NO: 39134 - protein, 130 aa, Homo sapiens
IFGGYNARLNRHFHDLWKFNPVSFTWKKIEPKGKGPCPRRRQCCCIVGDKIVLFGGTSPSPEEGLGDEFDLIDHSDLHILDFSPSLKTLCKLAVIQYNLDQSCLPHDIRWELNAMTTNSNISRPIVSSHG

SEQ ID NO: 39135 - protein, 24 aa, Homo sapiens
IEKKLNDNSRSEAPNWATQDSGFY

SEQ ID NO: 39136 - protein, 79 aa, Homo sapiens [sequence omitted]

SEQ ID NO: 39137 - protein, 43 aa, Homo sapiens
LKRNLDKSKVLVCICGPVPFTEQGVRLLHDLNFSKNEIHSFTA

SEQ ID NO: 39138 - protein, 19 aa, Homo sapiens
KDGKTLNDELEIIKGIKFD

SEQ ID NO: 39139 - protein, 45 aa, Homo sapiens
MATSSMSKGCFVFKPNSKKRKISLPIAFMFQGIGQRDKRTPQGSN

SEQ ID NO: 39140 - protein, 22 aa, Homo sapiens
MDGMTELGCDSIEKLKAQIPKM

SEQ ID NO: 39141 - protein, 5 aa, Homo sapiens
MAAPM

SEQ ID NO: 39142 - protein, 24 aa, Homo sapiens
KVKLAVLKYYKVDENGKISCLRRE

SEQ ID NO: 39143 - protein, 6 aa, Homo sapiens
IINAKQ

SEQ ID NO: 39144 - protein, 7 aa, Homo sapiens
KSSCQLL

SEQ ID NO: 39145 - protein, 16 aa, Homo sapiens
IRYFPTQALNFAFKDK

SEQ ID NO: 39146 - protein, 398 aa, Homo sapiens
KMNAGSDPVVIVSAARTIIGSFNGALAAVPVQDLGSTVIKEVLKRATVAPEDVSEVIFGHVLAAGCGQNPVRQASVGAGIPYSVPAWSCQMICGSGLKAVCLAVQSIGIGDSSIVVAGGMENMSKAPHLAYLRTGVKIGEMPLTDSILCDGLTDAFHNCHMGITAENVAKKWQVSREDQDKVAVLSQNRTENAQKAGHFDKEIVPVLVSTRKGLIEVKTDEFPRHGSNIEAMSKLKPYFLTDGTGTVTPANASGINDGAAAVVLMKKSEADKRGLTPLARIVSWSQVGVEPSIMGIGPIPAIKQAVTKAGWSLEDVDIFEINEAFAAVSAAIVKELGLNPEKVNIEGGAIALGHPLGASGCRILVTLLHTLERMGRSRGVAALCIGGGMGIAMCVQRE

SEQ ID NO: 39147 - protein, 359 aa, Homo sapiens
MRASQKDFENSMNQVKLLKKDPGNEVKLKLYALYKQATEGPCNMPKPGVFDLINKAKWDAWNALGSLPKEAARQNYVDLVSSLSPSLESSSQVEPGTDRKSTGFETLVVTSEDGITKIMFNRPKKKNAINTEMYHEIMRALKAASKDDSIITVLTGNGDYYSSGNDLTNFTDIPPGGVEEKAKNNAVLLREFVGCFIDFPKPLIAVVNGPAVGISVTLLGLFDAVYASDRATFHTPFSHLGQSPEGCSSYTFPKIMSPAKATEMLIFGKKLTAGEACAQGLVTEVFPDSTFQKEVWTRLKAFAKLPPNALRISKEVIRKREREKLHAVNAEECNVLQGRWLSDECTNAVVNFLSRKSKL

SEQ ID NO: 39148 - protein, 14 aa, Homo sapiens
LVSLSAALATWLSF

SEQ ID NO: 39149 - protein, 13 aa, Homo sapiens
VENFDEASKNEAN

SEQ ID NO: 39150 - protein, 11 aa, Homo sapiens
LMVAFLILFAM

SEQ ID NO: 39151 - protein, 17 aa, Homo sapiens
IMPKDIQLARRIRGERA

SEQ ID NO: 39152 - protein, 98 aa, Homo sapiens
KISTSLHFSFLWGAALVLFGPCLLGMEQSIEQTTEILLCLSPVEVASLKEGINFFRNKSTGKDYVLYKNKSRLRACKNMCKHQGGLFIKDIEDLAGSC

SEQ ID NO: 39153 - protein, 12 aa, Homo sapiens
KKKKFHKASQED

SEQ ID NO: 39154 - protein, 217 aa, Homo sapiens
LILNMSETAPAAPAAAPPAEKAPVKKKAAKKAGGTPRKASGPPVSELITKAVAASKERSGVSLAALKKALAAAGYDVEKNNSRIKLGLKSLVSKGTLVQTKGTGASGSFKLNKKAASGEAKPKVKKAGGTKPKKPVGAAKKPKKAAGGATPKKSAKKTPKKAKKPAAATVTKKVAKSPKKAKVAKPKKAAKSAAKAVKPKAAKPKVVKPKKAAPKKK

SEQ ID NO: 39155 - protein, 104 aa, Homo sapiens
KMSGRGKGGKGLGKGGAKRHRKVLRDNIQGITKPAIRRLARRGGVKRISGLIYEETRGVLKVFLENVIRDAVTYTEHAKRKTVTAMDVVYALKRQGRTLYGFGG

SEQ ID NO: 39156 - protein, 134 aa, Homo sapiens
LLLLFSDSMPEPAKSAPAPKKGSKKAVTKAQKKDGKKRKRSRKESYSVYVYKVLKQVHPDTGISSKAMGIMNSFVNDIFERIAGEASRLAHYNKRSTITSREIQTAVRLLLPGELAKHAVSEGTKAVTKYTSSK

SEQ ID NO: 39157 - protein, 6 aa, Homo sapiens
MAGDRI

SEQ ID NO: 39158 - protein, 67 aa, Homo sapiens
MDLWPGAWMLLLLLFLLLLFLLPTLWFCSPSAKYFFKMAFYNGWILFLAVLAIPVCAVRGRNVENMK

SEQ ID NO: 39159 - protein, 4 aa, Homo sapiens
LPPV

SEQ ID NO: 39160 - protein, 50 aa, Homo sapiens
LFGAADFLVVPHKSKAWGPGGSRKYRFEIPKYYRGNGSGRRWQRPVGHGA

SEQ ID NO: 39161 - protein, 247 aa, Homo sapiens
LVPDATMAEEQPQVELFVKAGSDGAKIGNCPFSQRLFMVLWLKGVTFNVTTVDTKRRTETVQKLCPGGQLPFLLYGTEVHTDTNKIEEFLEAVLCPPRYPKLAALNPESNTAGLDIFAKFSAYIKNSNPALNDNLEKGLLKALKVLDNYLTSPLPEEVDETSAEDEGVSQRKFLDGNELTLADCNLLPKLHIVQVVCKKYRGFTIPEAFRGVHRYLSNAYAREEFASTCPDDEEIELAYEQVAKALK

SEQ ID NO: 39162 - protein, 31 aa, Homo sapiens
IQTLEDSVILELLFLMYTVLVKGLKNWESNL

SEQ ID NO: 39163 - protein, 220 aa, Homo sapiens
LPPSWPDAMGVTCVSQMPVAEGKSVQQTVELLTRKLEMLGAEKQGTFCVDCETYHTAASTLGSQGQTGKLMYVMHNSEYPLSCFALFENGPCLIADTNFDVLMVKLKGFFQSAKASKIETRGTRYQYCDFLVKVGTVTMGPSARGISVEVEYGPCVVASDCWSLLLEFLQSFLGSHTPGAPAVFGNRHDAVYGPADTMVQYMELFNKIRKQQQVPVAGIR

SEQ ID NO: 39164 - protein, 299 aa, Homo sapiens
LPVRCPSMELLCCEGTRHAPRAGPDPRLLGDQRVLQSLLRLEERYVPRASYFQCVQREIKPHMRKMLAYWMLEVCEEQRCEEEVFPLAMNYLDRYLSCVPTRKAQLQLLGAVCMLLASKLRETTPLTIEKLCIYTDHAVSPRQLRDWEVLVLGKLKWDLAAVIAHDFLAFILHRLSLPRDRQALVKKHAQTFLALCATDYTFAMYPPSMIATGSIGAAVQGLGACSMSGDELTELLAGITGTEVDCLRACQEQIEAALRESLREASQTSSSPAPKAPRGSSSQGPSQTSTPTDVTAIHL

SEQ ID NO: 39165 - protein, 127 aa, Homo sapiens
IMPELAKSAPAPKKGSKKAVTKAQKKDGKKRKRSRKESYSVYVYKVLKQVHPDTGISSKAMGIMNSFVNDIFERIASEASRLAHYNKRSTITSREIQTAVRLLLPGELAKHAVSEGTKAVTKYTSSK

SEQ ID NO: 39166 - protein, 106 aa, Homo sapiens; identical to SEQ ID NO: 33027

SEQ ID NO: 39167 - protein, 144 aa, Homo sapiens
LSRYVYLAMARTKQTARKSTGGKAPRKQLATKAARKSAPATGGVKKPHRYRPGTVALREIRRYQKSTELLIRKLPFQRLVREIAQDFKTDLRFQSSAVMALQEACEAYLVGLFEDTNLCAIHAKRVTIMPKDIQLARRIRGERA

SEQ ID NO: 39168 - protein, 12 aa, Homo sapiens
MACGAEFSMIMD

SEQ ID NO: 39169 - protein, 314 aa, Homo sapiens
LAKSKGVVLMALCALTRALRSLNLAPPTVAAPAPSLFPAAQMMNNGLLQQPSALMLLPCRPVLTSVALNANFVSWKSRTKYTITPVKMRKSGGRDHTGRIRVHGIGGGHKQRYRMIDFLRFRPEETKSGPFEEKVIQVRYDPCRSADIALVAGGSRKRWIIATENMQAGDTILNSNHIGRMAVAAREGDAHPLGALPVGTLINNVESEPGRGAQYIRAAGTCGVLLRKVNGTAIIQLPSKRQMQVLETCVATVGRVSNVDHNKRVIGKAGRNRWLGKRPNSGRWHRKGGWAGRKIRPLPPMKSYVKLPSASAQS

SEQ ID NO: 39170 - protein, 63 aa, Homo sapiens
LDVYLPEAHILPTPRAGLARVSATGALKGHGNYSGAGGRRPKWSWPGMGRVRRKHPGRRLSCD

SEQ ID NO: 39171 - protein, 179 aa, Homo sapiens
RRCAPLSAPTSAAASPLSAAAATAASFSAAAASPQKYLRMEPSPFGDVSSRLTTEQILYNIKQEYKRMQKRRHLETSFQQTDPCCTSDAQPHAFLLSGPASPGTSSAASSPLKKEQPLFTLRQVGMICERLLKEREEKVREEYEEILNTKLAEQYDAFVKFTHDQIMRRYGEQPASYVS

SEQ ID NO: 39172 - protein, 5 aa, Homo sapiens
MFEVL

SEQ ID NO: 39173 - protein, 636 aa, Homo sapiens
ISPPQPNGEISGNMATEHVNGNGTEEPMDTTSAVIHSENFQTLLDAGLPQKVAEKLDEIYVAGLVAHSDLDERAIEALKEFNEDGALAVLQQFKDSDLSHVQNKSAFLCGVMKTYRQREKQGTKVADSSKGPDEAKIKALLERTGYTLDVTTGQRKYGGPPPDSVYSGQQPSVGTEIFVGKIPRDLFEDELVPLFEKAGPIWDLRLMMDPLTGLNRGYAFVTFCTKEAAQEAVKLYNNHEIRSGKHIGVCISVANNRLFVGSIPKSKTKEQILEEFSKVTEGLTDVILYHQPDDKKKNRGFCFLEYEDHKTAAQARRRLMSGKVKVWGNVGTVEWADPIEDPDPEVMAKVKVLFVRNLANTVTEEILEKAFSQFGKLERVKKLKDYAFIHFDERDGAVKAMEEMNGKDLEGENIEIVFAKPPDQKRKERKAQRQAAKNQMYDDYYYYGPPHMPPPTRGRGRGGRGGYGYPPDYYGYEDYYDYYGYDYHNYRGGYEDPYYGYEDFQVGARGRGGRGARGAAPSRGRGAAPPRGRAGYSQRGGPGSARGVRGARGGAQQQRGRGVRGARGGRGGNVGGKRKADGYNQPDSKRRQTNNQNWGSQPIAQQPLQGGDHSGNYGYKSENQEFYQDTFGQQWK

SEQ ID NO: 39174 - protein, 575 aa, Homo sapiens
ISPPQPNGEISGNMATEHVNGNGTEEPMDTTSAVIHSENFQTLLDAGLPQKVAEKLDEIYVAGLVAHSDLDERAIEALKEFNEDGALAVLQQFKDSDLSHVQNKSAFLCGVMKTYRQREKQGTKVADSSKGPDEAKIKALLERTGYTLDVTTGQRKYGGPPPDSVYSGQQPSVGTEIFVGKIPRDLFEDELVPLFEKAGPIWDLRLMMDPLTGLNRGYAFVTFCTKEAAQEAVKLYNNHEIRSGKHIGVCISVANNRLFVGSIPKSKTKEQILEEFSKVTEGLTDVILYHQPDDKKKNRGFCFLEYEDHKTAAQARRRLMSGKVKVWGNVGTVEWADPIEDPDPEVMAKVKVLFVRNLANTVTEEILEKAFSQFGKLERVKKLKDYAFIHFDERDGAVKAMEEMNGKDLEGENIEIVFAKPPDQKRKERKAQRQAAKNQMYDDYYYYGPPHMPPPTRGRGRGGRGGYGYPPDYYGYEDYYDYYGYDYHNYRGGYEDPYYGYEDFQVGARGRGGRGARGAAPSRGRGAAPPRGRAGYSQRGGPGSARGVRGARGGAQQQRGRGQGKGVEAGPDLLQ

SEQ ID NO: 39175 - protein, 555 aa, Homo sapiens
MKVDGAKELPDVLERVKFSCMAWTHDGKGMFYNSYPQQDGKSDGTETSTNLHQKLYYHVLGTDQSEDILCAEFPDEPKWMGGAELSDDGRYVLLSIREGCDPVNRLWYCDLQQESSGIAGILKWVKLIDNFEGEYDYVTNEGTVFTFKTNRQSPNYRVINIDFRDPEESKWKVLVPEHEKDVLEWIACVRSNFLVLCYLHDVKNILQLHDLTTGALLKTFPLDVGSIVGYSGQKKDTEIFYQFTSFLSPGIIYHCDLTKEELEPRVFREVTVKGIDASDYQTVQIFYPSKDGTKIPMFIVHKKGIKLDGSHPAFLYGYGGFNISITPNYSVSRLIFVRHMGGILAVANIRGGGEYGETWHKGGILANKQNCFDDFQCAAEYLIKEGYTSPKRLTINGGSNGGLLVAACANQRPDLFGCVIAQVGVMDMLKFHKYTIGHAWTTDYGCSDSKQHFEWLVKYSPLHNVKLPEADDIQYPSMLLLTADHDDRVVPLHSLKFIATLQYIVGRSRKQSNPLLIHVDTKAGHGAGKPTAKVIEEVSDMFAFIARCLNVDWIP

SEQ ID NO: 39176 - protein, 15 aa, Homo sapiens
VFALTNGIYPHKLVF

SEQ ID NO: 39177 - protein, 12 aa, Homo sapiens
MLRSCSLNQPKF

SEQ ID NO: 39178 - protein, 51 aa, Homo sapiens [sequence omitted]

SEQ ID NO: 39179 - protein, 82 aa, Homo sapiens
LRNLLALRQIGQRTISTASRRHFKNKVPEKQKLFQEDDEIPLYLKGGVADALLYRATMILTVGGTAYAIYELAVASFPKKQE

SEQ ID NO: 39180 - protein, 32 aa, Homo sapiens
VFIVDVKANKHRIKQAMKKLYDIDVAKVNTLI

SEQ ID NO: 39181 - protein, 15 aa, Homo sapiens
ILCLVRINTFLSLFS

SEQ ID NO: 39182 - protein, 17 aa, Homo sapiens
ILCCLLIILPCFILPGI

SEQ ID NO: 39183 - protein, 156 aa, Homo sapiens
LRRVLSGQDDEEQGLTAQVLDASSLSFNTRLKWFAICFVCGVFFSILGTGLLWLPGGIKLFAVFYTLGNLAALASTCFLMGPVKQLKKMFEATRLLATIVMLLCFIFTLCAALWWHKKGLAVLFCILQFLSMTWYSLSYIPYARDAVIKCCSSLLS

SEQ ID NO: 39184 - protein, 121 aa, Homo sapiens
IFRMTDTAEAVPNFEEMFASRFTENDKEYQEYLKRPPESPPIVEEWNSRAGGNQRNRGNRLQDNRQFRGRDNRWGWPSDNRSNQWHGRSWGNNYPQHRQEPYYPQQYGHYGYNQRPPYGYY

SEQ ID NO: 39185 - protein, 20 aa, Homo sapiens
IICLLVLVGLIRSSKGILVG

SEQ ID NO: 39186 - protein, 7 aa, Homo sapiens
MVTMFRY

SEQ ID NO: 39187 - protein, 16 aa, Homo sapiens
LQQQADDAEERAERLQ

SEQ ID NO: 39188 - protein, 15 aa, Homo sapiens
MPLLNSLFKTHLLGD

SEQ ID NO: 39189 - protein, 417 aa, Homo sapiens
LNTMIPLEKPGSGGSSPGATSGSGRAGRGLSGPCRPPPPPQARGLLTEIRAVVRTEPFQDGYSLCPGRELGRGKFAVVRKCIKKDSGKEFAAKFMRKRRKGQDCRMEIIHEIAVLELAQDNPWVINLHEVYETASEMILVLEYAAGGEIFDQCVADREEAFKEKDVQRLMRQILEGVHFLHTRDVVHLDLKPQNILLTSESPLGDIKIVDFGLSRILKNSEELREIMGTPEYVAPEILSYDPISMATDMWSIGVLTYVMLTGISPFLGNDKQETFLNISQMNLSYSEEEFDVLSESAVDFIRTLLVKKPEDRATAEECLKHPWLTQSSIQEPSFRMEKALEEANALQEGHSVPEINSDTDKSETKESIVTEELIVVTSYTLGQCRQSEKEKMEQKAISKRFKFEEPLLQEIPGEFIY

SEQ ID NO: 39190 - protein, 47 aa, Homo sapiens
LMCNKSYCAEIAHNVSSKNRKAIVETAAQLAIRVTNPNARLRSEENE

SEQ ID NO: 39191 - protein, 111 aa, Homo sapiens
LAGQREPRLRGCSSHPRISLGPKARRTNPHNLRTMDADEGQDMSQVSGKESPPVSDTPDEGDEPMPIPEDLSTTSGGQQSSKSDRVVVTYGADDFRDFHAIIPKSFSLLEL

SEQ ID NO: 39192 - protein, 550 aa, Homo sapiens
TPRRLWALSIVSFSSAGAAMAAVKTLNPKAEVARAQAALAVNISAARGLQDVLRTNLGPKGTMKMLVSGAGDIKLTKDGNVLLHEMQIQHPTASLIAKVATAQDDITGDGTTSNVLIIGELLKQADLYISEGLHPRIITEGFEAAKEKALQFLEEVKVSREMDRETLIDVARTSLRTKVHAELADVLTEAVVDSILAIKKQDEPIDLFMIEIMEMKHKSETDTSLIRGLVLDHGARHPDMKKRVEDAYILTCNVSLEYEKTEVNSGFFYKSAEEREKLVKAERKFIEDRVKKIIELKRKVCGDSDKGFVVINQKGIDPFSLDALSKEGIVALRRAKRRNMERLTLACGGVALNSFDDLSPDCLGHAGLVYEYTLGEEKFTFIEKCNNPRSVTLLIKGPNKHTLTQIKDAVRDGLRAVKNAIDDGCVVPGAGAVEVAMAEALIKHKPSVKGRAQLGVQAFADALLIIPKVLAQNSGFDLQETLVKIQAEHSESGQLVGVDLNTGEPMVAAEVGVWDNYCVKKQLLHSCTVIATNILLVDEIMRAGMSSLKG

SEQ ID NO: 39193 - protein, 15 aa, Homo sapiens
LVDEIMRAGMSSLKG

SEQ ID NO: 39194 - protein, 335 aa, Homo sapiens
LARLGPGRAAARRGGVELIRIMFSINPLENLKVYISSRPPLVVFMISVSAMAIAFLTLGYFFKIKEIKSPEMAEDWNTFLLRFNDLDLCVSENETLKHLTNDTTTPESTMTSGQARASTQSPQALEDSGPVNISVSITLTLDPLKPFGGYSRNVTHLYSTILGHQIGLSGREAHEEINITFTLPTAWSSDDCALHGHCEQVVFTACMTLTASPGVFPVTVQPPHCVPDTYSNATLWYKIFTTARDANTKYAQDYNPFWCYKGAIGKVYHALNPKLTVIVPDDDRSLINLHLMHTSYFLFVMVITMFCYAVIKGRPSKLRQSNPEFCPEKVALAEA

SEQ ID NO: 39195 - protein, 35 aa, Homo sapiens
LVAFRLDGAGQPWFAGFWVFEQPRCRSSPPPTRSA

SEQ ID NO: 39196 - protein, 68 aa, Homo sapiens
KRPKANELPQPPVPEPANAGKRKVREFNFEKWNARITDLRKQVEELFERKYAQAIKAKGPVTIPYPLF

SEQ ID NO: 39197 - protein, 27 aa, Homo sapiens
IILFPFGFICCFALRKRRCPNCGATFA

SEQ ID NO: 39198 - protein, 146 aa, Homo sapiens
RKMPKVKRSRKAPPDGWELIEPTLDELDQKMREAETEPHEGKRKVESLWPIFRIHHQKTRYIFDLFYKRKAISRELYEYCIKEGYADKNLIAKWKKQGYENLCCLRCIQTRDTNFGTNCICRVPKSKLEVGRIIECTHCGCRGCSG

SEQ ID NO: 39199 - protein, 123 aa, Homo sapiens
KKRWSVLAAAGLRGLVRLLHVRAGFCCGVIRAHKKAIATLCFSPAHETHLFTASYDKRIILWDIGVPNQDYEFQASQLLTLDTTSIPLRLCPVASCPDARLLAGCEGGCCCWDVRLDQPQKRR

SEQ ID NO: 39200 - protein, 19 aa, Homo sapiens
LVLDGRGHLLGRLAAIVAK

SEQ ID NO: 39201 - protein, 288 aa, Homo sapiens
RKMADLEEQLSDEEKVRIAAKFIIHAPPGEFNEVFNDVRLLLNNDNLLREGAAHAFAQYNLDQFTPVKIEGYEDQVLITEHGDLGNGKFLDPKNRICFKFDHLRKEATDPRPCEVENAVESWRTSVETALRAYVKEHYPNGVCTVYGKKIDGQQTIIACIESHQFQAKNFWNGRWRSEWKFTITPSTTQVVGILKIQVHYYEDGNVQLVSHKDIQDSLTVSNEVQTAKEFIKIVEAAENEYQTAISENYQTMSDTTFKALRRQLPVTRTKIDWNKILSYKIGKEMQNA

SEQ ID NO: 39202 - protein, 29 aa, Homo sapiens
RRWLFGGSEERLLLLLLLLVAPLQMYCCP

SEQ ID NO: 39203 - protein, 928 aa, Homo sapiens
LTPPVRPAAPLVAFASPHMASSAQSGGSSGGPAVPTVQRGIIKMVLSGCAIIVRGQPRGGPPPERQINLSNIRAGNLARRAAATQPDAKDTPDEPWAFPAREFLRKKLIGKEVCFTIENKTPQGREYGMIYLGKDTNGENIAESLVAEGLATRREGMRANNPEQNRLSECEEQAKAAKKGMWSEGNGSHTIRDLKYTIENPRHFVDSHHQKPVNAIIEHVRDGSVVRALLLPDYYLVTVMLSGIKCPTFRREADGSETPEPFAAEAKFFTESRLLQRDVQIILESCHNQNILGTILHPNGNITELLLKEGFARCVDWSIAVYTRGAEKLRAAERFAKERRLRIWRDYVAPTANLDQKDKQFVAKVMQVLNADAIVVKLNSGDYKTIHLSSIRPPRLEGENTQDKNKKLRPLYDIPYMFEAREFLRKKLIGKKVNVTVDYIRPASPATETVPAFSERTCATVTIGGINIAEALVSKGLATVIRYRQDDDQRSSHYDELLAAEARAIKNGKGLHSKKEVPIHRVADISGDTQKAKQFLPFLQRAGRSEAVVEYVFSGSRLKLYLPKETCLITFLLAGIECPRGARNLPGLVQEGEPFSEEATLFTKELVLQREVEVEVESMDKAGNFIGWLHIDGANLSVLLVEHALSKVHFTAERSSYYKSLLSAEEAAKQKKEKVWAHYEEQPVEEVMPVLEEKERSASYKPVFVTEITDDLHFYVQDVETGTQLEKLMENMRNDIASHPPVEGSYAPRRGEFCIAKFVDGEWYRARVEKVESPAKIHVFYIDYGNREVLPSTRLGTLSPAFSTRVLPAQATEYAFAFIQVPQDDDARTDAVDSVVRDIQNTQCLLNVEHLSAGCPHVTLQFADSKGDVGLGLVKEGLVMVEVRKEKQFQKVITEYLNAQESAKSARLNLWRYGDFRADDADEFGYSR

SEQ ID NO: 39204 - protein, 195 aa, Homo sapiens
KELPTEPPYTAYVGNLPFNTVRGDIDAIFKDLSIRSVRLVRDKDTDKFKGFCYVEFDEVDSLKEALTYDGALLGDRSLRVDIAEGRKQDKGGFGFRKGGPDDRGFRDDFLGGRGGSRPGDRRTGPPMGSRFGDGPPLGGSNMDFREPTEEESAQRPRLQLKPRTVATPLNQVANPNSAIFGGARPREEVVQKEQK

SEQ ID NO: 39205 - protein, 35 aa, Homo sapiens
IGCCHKIYLVYFSLSLMSCTIADLSTMSADCVEKL

SEQ ID NO: 39206 - protein, 19 aa, Homo sapiens
KKKKRKHKSSKSNEGSDSE

SEQ ID NO: 39207 - protein, 6 aa, Homo sapiens
IEMKIG

SEQ ID NO: 39208 - protein, 382 aa, Homo sapiens
RTSPVRVRPRRSLSSRSAAGNRAEATESAMEKTLETVPLERKKREKEQFRKLFIGGLSFETTEESLRNYYEQWGKLTDCVVMRDPASKRSRGFGFVTFSSMAEVDAAMAARPHSIDGRVVEPKRAVAREESGKPGAHVTVKKLFVGGIKEDTEEHHLRDYFEEYGKIDTIEIITDRQSGKKRGFGFVTFDDHDPVDKIVLQKYHTINGHNAEVRKALSRQEMQEVQSSRSGRGGNFGFGDSRGGGGNFGPGPGSNFRGGSDGYGSGRGFGDGYNGYGGGPGGGNFGGSPGYGGGRGGYGGGGPGYGNQGGGYGGGYDNYGGGNYGSGNYNDFGNYNQQPSNYGPMKSGNFGGSRNMGGPYGGGNYGPGGSGGSGGYGGRSRY

SEQ ID NO: 39209 - protein, 31 aa, Homo sapiens
RNRSREARKDRTPPPRFRPAGAAARPPPKPM

SEQ ID NO: 39210 - protein, 175 aa, Homo sapiens
IGNYRTQMWDKQKEVFLPSTPGLGMHVEVKDPDGKVVLSRQYGSEGRFTFTSHTPGDHQICLHSNSTRMALFAGGKLRVHLDIQVGEHANNYPEIAAKDKLTELQLRARQLLDQVEQIQKEQDYQRYREERFRLTSESTNQRVLWWSIAQTVILILTGIWQMRHLKSFFEAKKLV

SEQ ID NO: 39211 - protein, 113 aa, Homo sapiens
KAVSRSQRAGLQFPVGRIHRHLKTRTTSHGRVGATAAVYSAAILEYLTAEVLELAGNASKDLKVKRITPRHLQLAIRGDEELDSLIKATIAGGGVIPHIHKSLIGKKGQQKTA

SEQ ID NO: 39212 - protein, 20 aa, Homo sapiens
MLFVAWCFCCSQRCLLPLLP

SEQ ID NO: 39213 - protein, 22 aa, Homo sapiens
RVVFLKQLASGLLLVTGPLVLN

SEQ ID NO: 39214 - protein, 58 aa, Homo sapiens
INQTQKENLRKFYKGKKYKPLDLRPKKTRAMRRRLNKHEENLKTKKQQRKERLYLLRQ

SEQ ID NO: 39215 - protein, 4 aa, Homo sapiens
VTAA

SEQ ID NO: 39216 - protein, 412 aa, Homo sapiens
LPIRRPSTPAARTRRAGSGQGGGDLGSQRARLFSQLTMDDDIAALVVDNGSGMCKAGFAGDDAPRAVFPSIVGRPRHQGVMVGMGQKDSYVGDEAQSKRGILTLKYPIEHGIVTNWDDMEKIWHHTFYNELRVAPEEHPVLLTEAPLNPKANREKMTQIMFETFNTPAMYVAIQAVLSLYASGRTTGIVMDSGDGVTHTVPIYEGYALPHAILRLDLAGRDLTDYLMKILTERGYSFTTTAEREIVRDIKEKLCYVALDFEQEMATAASSSSLEKSYELPDGQVITIGNERFRCPEALFQPSFLGMESCGIHETTFNSIMKCDVDIRKDLYANTVLSGGTTMYPGIADRMQKEITALAPSTMKIKIIAPPERKYSVWIGGSILASLSTFQQMWISKQEYDESGPSIVHRKCF

SEQ ID NO: 39217 - protein, 7 aa, Homo sapiens
MVTMFRY

SEQ ID NO: 39218 - protein, 648 aa, Homo sapiens
VAVLGWPAGWAAARARPAMQGGNSGVRKREEEGDGAGAVAAPPAIDFPAEGPDPEYDESDVPAEIQVLKEPLQQPTFPFAVANQLLLVSLLEHLSHVHEPNPLRSRQVFKLLCQTFIKMGLLSSFTCSDEFSSLRLHHNRAITHLMRSAKERVRQDPCEDISRIQKIRSREVALEAQTSRYLNEFEELAILGKGGYGRVYKVRNKLDGQYYAIKKILIKGATKTVCMKVLREVKVLAGLQHPNIVGYHTAWIEHVHVIQPRADRAAIELPSLEVLSDQEEDREQCGVKNDESSSSSIIFAEPTPEKEKRFGESDTENQNNKSVKYTTNLVIRESGELESTLELQENGLAGLSASSIVEQQLPLRRNSHLEESFTSTEESSEENVNFLGQTEAQYHLMLHIQMQLCELSLWDWIVERNKRGREYVDESACPYVMANVATKIFQELVEGVFYIHNMGIVHRDLKPRNIFLHGPDQQVKIGDFGLACTDILQKNTDWTNRNGKRTPTHTSRVGTCLYASPEQLEGSEYDAKSDMYSLGVVLLELFQPFGTEMERAEVLTGLRTGQLPESLRKRCPVQAKYIQHLTRRNSSQRPSAIQLLQSELFQNSGNVNLTLQMKIIEQEKEIAELKKQLNLLSQDKGVRDDGKDGGVG

SEQ ID NO: 39219 - protein, 68 aa, Homo sapiens; identical to SEQ ID NO: 39196

SEQ ID NO: 39220 - protein, 30 aa, Homo sapiens
MNLSYVFIPLWALLAGALTELGYNVFFVRD

SEQ ID NO: 39221 - protein, 12 aa, Homo sapiens
VSTFLSGVMLTW

SEQ ID NO: 39222 - protein, 197 aa, Homo sapiens
VSVRGAAAAAAAAGAAMPKGGRKGGHKGRARQYTSPEEIDAQLQAEKQKAREEEEQKEGGDGAAGDPKKEKKSLDSDESEDEEDDYQQKRKGVEGLIDIENPNRVAQTTKKVTQLDLDGPKELSRREREEIEKQKAKERYMKMHLAGKTEQAKADLARLAIIRKQREEAARKKEEERKAKDDATLSGKRMQSLSLNK

SEQ ID NO: 39223 - protein, 38 aa, Homo sapiens
IHSMENKMSFIVHTKQAGLVVKLLMKLNGQLMPTERNS

SEQ ID NO: 39224 - protein, 12 aa, Homo sapiens
MQSFYLVFTFVT

SEQ ID NO: 39225 - protein, 833 aa, Homo sapiens
MATLDRKVPSPEAFLGKPWSSWIDAAKLHCSDNVDLEEAGKEGGKSREVMRLNKEDMHLFGHYPAHDDFYLVVCSACNQVVKPQVFQSHCERRHGSMCRPSPSPVSPASNPRTSLVQVKTKACLSGHHSASSTSKPFKTPKDNLLTSSSKQHTVFPAKGSRDKPCVPVPVVSLEKIPNLVKADGANVKMNSTTTTAVSASSTSSSAVSTPPLIKPVLMSKSVPPSPEKILNGKGILPTTIDKKHQNGTKNSNKPYRRLSEREFDPNKHCGVLDPETKKPCTRSLTCKTHSLSHRRAVPGRKKQFDLLLAEHKAKSREKEVKDKEHLLTSTREILPSQSGPAQDSLLGSSGSSGPEPKVASPAKSRPPNSVLPRPSSANSISSSTSSNHSGHTPEPPLPPVGGDLASRLSSDEGEMDGADESEKLDCQFSTHHPRPLAFCSFGSRLMGRGYYVFDRRWDRFRFALNSMVEKHLNSQMWKKIPPAADSPLPSPAAHITTPVPASVLQPFSNPSAVYLPSAPISSRLTSSYIMTSAMLSNAAFVTSPDPSALMSHTTAFPHVAATLSIMDSTFKAPSAVSPIPAVIPSPSHKPSKTKTSKSSKVKDLSTRSDESPSNKKRKPQSSTSSSSSSSSSSLQTSLSSPLSGPHKKNCVLNASSALNSYQAAPPYNSLSVHNSNNGVSPLSAKLEPSGRTSLPGGPADIVRQVGAVGGSSDSCPLSVPSLALHAGDLSLASHNAVSSLPLSFDKSEGKKRKNSSSSSKACKITKMPGMNSVHKKNPPSLLAPVPDPVNSTSSRQVGKNSSLALSQSSPSSISSPGHSRQNTNRTGRIRTLP

SEQ ID NO: 39226 - protein, 32 aa, Homo sapiens
MAGITTIEAVKGNIQVLQQQADDAEERADRLQ

SEQ ID NO: 39227 - protein, 167 aa, Homo sapiens
KLIESKHEVTILGGLNEFVVKFYGPQGTPYEGGVWKVRVDLPDKYPFKSPSIGFMNKIFHPNIDEASGTVCLDVINQTWTALYDLTNIFESFLPQLLAYPNPIDPLNGDAAAMYLHRPEEYKQKIKEYIQKYATEEALKEQEEGTGDSSSESSMSDFSEDEAQDMEL

SEQ ID NO: 39228 - protein, 140 aa, Homo sapiens
IRLLLPPPPHLLPGQPACPAAVMCDKEFMWALKNGDLDEVKDYVAKGEDVNRTLEGGRKPLHYAADCGQLEILEFLLLKGADINAPDKHHITPLLSAVYEGHVSCVKLLLSKGADKTVKGPDGLTAFEATDNQAIKALLQ

SEQ ID NO: 39229 - protein, 5 aa, Homo sapiens
MHIPL

SEQ ID NO: 39230 - protein, 186 aa, Homo sapiens
KCPNRDCWSTCTLSHDIHTPVNMQVLKSHGLFGLNENQLRILLLQNDPCLLPEVCLLYNKGEALYGYCNLKDKCNKFHVCKSFVKGECKLQTCKRSHQLIHAASLKLLQDQGLNIPSVVNFQIISTYKHMKLHKMLENTDNSSPSTEHSQGLEKQGVHAAGAAEAGPLASVPAQSAKKPCPVSCEK

SEQ ID NO: 39231 - protein, 23 aa, Homo sapiens
IEKFEKEAAEMGKDSFKLCLGLG

SEQ ID NO: 39232 - protein, 8 aa, Homo sapiens
MADSVASR

SEQ ID NO: 39233 - protein, 34 aa, Homo sapiens
LLDYIVNEPPPKLPSGVFSLEFQDFVNKCLIKTP

SEQ ID NO: 39234 - protein, 87 aa, Homo sapiens
KNVTNNLKSLEAASEKYSEKEDKYEEEIKLLSDKVKEAETRAEFAERTVAKLEKTIDDLEEKLAQAKEENVGLHQTLDQTLNELNCI

SEQ ID NO: 39235 - protein, 23 aa, Homo sapiens
RHGFREGTTPKPKRAAVAASSSS

SEQ ID NO: 39236 - protein, 13 aa, Homo sapiens
VLKQAFGEKITMT

SEQ ID NO: 39237 - protein, 115 aa, Homo sapiens
MTKKRRNNGRAKKGRGHVQPIRCTNCARCVPKDKAIKKFVIRNIVEAAAVRDISEVSVFDAYVLPKLYVKLHYCVSCAIHSKVVRNRSREARKDRTPPPRFRPAGAAPRPPPKPM

SEQ ID NO: 39238 - protein, 18 aa, Homo sapiens
KHFELGGDKKRKGQVIQF

SEQ ID NO: 39239 - protein, 7 aa, Homo sapiens
KSESSQK

SEQ ID NO: 39240 - protein, 295 aa, Homo sapiens
KVSELYDVTWEEMRDKMRKWREENSRNSEQIVEVGEELINEYASKLGDDIWIIYEQVMIAALDYGRDDLALFCLQELRRQFPGSHRVKRLTGMRFEAMERYDDAIQLYDRILQEDPTNTAARKRKIAIRKAQGKNVEAIRELNEYLEQFVGDQEAWHELAELYINEHDYAKAAFCLEELMMTNPHNHLYCQQYAEVKYTQGGLENLELSRKYFAQALKLNNRNMRALFGLYMSASHIASNPKASAKTKKDNMKYASWAASQINRAYQFAGRSKKETKYSLKAVEDMLETLQITQS

SEQ ID NO: 39241 - protein, 124 aa, Homo sapiens
VVGNGPQRKGHFVAGKGRPSPAVMVVSKMNKDAQMRAAINQKLIETGERERLKELLRAKLIECGWKDQLKAHCKEVIKEKGLEHVTVDDLVAEITPKGRALVPDSVKKELLQRIRTFLAQHASL

SEQ ID NO: 39242 - protein, 31 aa, Homo sapiens
LNDFISMDPKVGWGAVYTLSEFTHRFGSKNC

SEQ ID NO: 39243 - protein, 261 aa, Homo sapiens
LSPAVFGGPGTNFKMPGRSSSNSGSTGFISFSGVESALSSLKNFQACINSGMDTASSVALDLVESQTEVSSEYSMDKAMVEFATLDRQLNHYVKAVQSTINHVKEERPEKIPDLKLLVEKKFLALQSKNSDADFQNNEKFVQFKQQLKELKKQCGLQADREADGTEGVDEDIIVTQSQTNFTCPITKEEMKKPVKNKVCGHTYEEDAIVRMIESRQKRKKKAYCPQIGCSHTDIRKSDLIQDEALRRAIENHNKKRHRHSE

SEQ ID NO: 39244 - protein, 15 aa, Homo sapiens
IVKKRTKKFIRHQSD

SEQ ID NO: 39245 - protein, 24 aa, Homo sapiens
RPRSIWRAKATLDMPDEEFRFNFF

SEQ ID NO: 39246 - protein, 54 aa, Homo sapiens
IKWVNKTGRDASVHTLLDALETLGERLAKQKIEDHLLSSGKFMYLEGNADSAMS

SEQ ID NO: 39247 - protein, 7 aa, Homo sapiens
MSSCAKR

SEQ ID NO: 39248 - protein, 337 aa, Homo sapiens
VAFTMEGISNFKTPSKLSEKKKSVLCSTPTINIPASPFMQKLGFGTGVNVYLMKRSPRGLSHSPWAVKKINPICNDHYRSVYQKRLMDEAKILKSLHHPNIVGYRAFTEANDGSLCLAMEYGGEKSLNDLIEERYKASQDPFPAAIILKVALNMARGLKYLHQEKKLLHGDIKSSNVVIKGDFETIKICDVGVSLPLDENMTAPAFITILLVSVTDPEACYIGTEPWKPKEAVEENGVITDKADIFAFGLTLWEMMTLSIPHINLSNDDDDEDKTFDESDFDDEAYYAALGTRPPINMEELDESYQKVIELFSVCTNEDPKDRPSAAHIVEALETDV

SEQ ID NO: 39249 - protein, 60 aa, Homo sapiens
TAQHGAAQLLLAFPFAGREVSMGHPLPPPLPPPPPPPPPSAVSMARRRRRSASSATQVHK

SEQ ID NO: 39250 - protein, 26 aa, Homo sapiens
RVVFLKQLASGLLLVTGPLVLSRIPL

SEQ ID NO: 39251 - protein, 195 aa, Homo sapiens; identical to SEQ ID NO: 3532

SEQ ID NO: 39252 - protein, 10 aa, Homo sapiens
IFFFFWLLSI

SEQ ID NO: 39253 - protein, 26 aa, Homo sapiens
MAAVSVWGISAVRPGAPGSRLSFLPA

SEQ ID NO: 39254 - protein, 10 aa, Homo sapiens
MDSKSSGWGM

SEQ ID NO: 39255 - protein, 14 aa, Homo sapiens
KLWSEFKILFMCMA

SEQ ID NO: 39256 - protein, 72 aa, Homo sapiens
RWLYEKFRYPFAPMYGGFPVKLRTYLGDPIPYDPQITAEELAEKTKNAVQALIDKHQRIPGNIMSALLERFH

SEQ ID NO: 39257 - protein, 6 aa, Homo sapiens
MAAPRV

SEQ ID NO: 39258 - protein, 27 aa, Homo sapiens
LTTSAGIMDHKEVRRRHTGGKILGFFF

SEQ ID NO: 39259 - protein, 16 aa, Homo sapiens
KAKFENLCKLMKKNLR

SEQ ID NO: 39260 - protein, 20 aa, Homo sapiens
LATLKMSVQPTVSLGGFEIT

SEQ ID NO: 39261 - protein, 6 aa, Homo sapiens
MVLPGA

SEQ ID NO: 39262 - protein, 338 aa, Homo sapiens
VAATASRPTSAALGAVVSTGPEPMTGQGQSASGSSAWSTVFRHVRYENLIAGVSGGVLSNLALHPLDLVKIRFAVSDGLELRPKYNGILHCLTTIWKLDGLRGLYQGVTPNIWGAGLSWGLYFFFYNAIKSYKTEGRAERLEATEYLVSAAEAGAMTLCITNPLWVTKTRLMLQYDAVVNSPHRQYKGMFDTLVKIYKYEGVRGLYKGFVPGLFGTSHGALQFMAYELLKLKYNQHINRLPEAQLSTVEYISVAALSKIFAVAATYPYQVVRARLQDQHMFYSGVIDVITKTWRKEGVGGFYKGIAPNLIRVTPACCITFVVYENVSHFLLDLREKRK

SEQ ID NO: 39263 - protein, 25 aa, Homo sapiens
MAVNVYSTSVTSDNLSRHDMLAWIN

SEQ ID NO: 39264 - protein, 446 aa, Homo sapiens
KMAEYDLTTRIAHFLDRHLVFPLLEFLSVKEIYNEKELLQGKLDLLSDTNMVDFAMDVYKNLYSDDIPHALREKRTTVVAQLKQLQAETEPIVKMFEDPETTRQMQSTRDGRMLFDYLADKHGFRQEYLDTLYRYAKFQYECGNYSGAAEYLYFFRVLVPATDRNALSSLWGKLASEILMQNWDAAMEDLTRLKETIDNNSVSSPLQSLQQRTWLIHWSLFVFFNHPKGRDNIIDLFLYQPQYLNAIQTMCPHILRYLTTAVITNKDVRKRRQVLKDLVKVIQQESYTYKDPITEFVECLYVNFDFDGAQKKLRECESVLVNDFFLVACLEDFIENARLFIFETFCRIHQCISINMLADKLNMTPEEAERWIVNLIRNARLDAKIDSKLGHVVMGNNAVSPYQQVIEKTKSLSFRSQMLAMNIEKKLNQNSRSEAPNWATQDSGFY

SEQ ID NO: 39265 - protein, 353 aa, Homo sapiens
KMASRKEGTGSTATSSSSTAGAAGKGKGKGGSGDSAVKQVQIDGLVVLKIIKHYQEEGQGTEVVQGVLLGLVVEDRLEITNCFPFPQHTEDDADFDEVQYQMEMMRSLRHVNIDHLHVGWYQSTYYGSFVTRALLDSQFSYQHAIEESVVLIYDPIKTAQGSLSLKAYRLTPKLMEVCKEKDFSPEALKKANITFEYMFEEVPIVIKNSHLINVLMWELEKKSAVADKHELLSLASSNHLGKNLQLLMDRVDEMSQDIVKYNTYMRNTSKQQQQKHQYQQRRQQENMQRQSRGEPPLPEEDLSKLFKPPQPPARMDSLLIAGQINTYCQNIKEFTAQNLGKLFMAQALQEYNN

SEQ ID NO: 39266 - protein, 115 aa, Homo sapiens
MTKKRRNNGRAKKGCGHVQPIRCTNCARCMPKDKAIKKFVIRNIVEAAAVRDISEASVFDAYVLPKLYVKLHYCVSCAIHSKVVRNRSREVRKDRTPPPRFRPAGAAPRPPPKPM

SEQ ID NO: 39267 - protein, 41 aa, Homo sapiens
LVPVWCFLFAATAVSMYVTDPESPAAWDPCLPSVSPAELWN

SEQ ID NO: 39268 - protein, 43 aa, Homo sapiens
LVPVWCFLFAATAVSISGHRNQSETIASAIKTIVHHGGTHGYL

SEQ ID NO: 39269 - protein, 45 aa, Homo sapiens
KEAKKAKQASKKTAMATAKAPTKAAPKQKIVKPVKVSAPQVGGKR

SEQ ID NO: 39270 - protein, 10 aa, Homo sapiens
IRVMLYPSRI

SEQ ID NO: 39271 - protein, 19 aa, Homo sapiens
KPVDVASDNVKKKHTKKNE

SEQ ID NO: 39272 - protein, 37 aa, Homo sapiens
MEYLENPKKYIPGTKMIFAGIKKKAERKMIAYLKKSY

SEQ ID NO: 39273 - protein, 802 aa, Homo sapiens
LASRFRGAPEGSMSRRRHSDENDGGQPHKRRKTSDANETEDHLESLICKVGEKSACSLESNLEGLAGVLEADLPNYKSKILRLLCTVARLLPEKLTIYTTLVGLLNARNYNFGGEFVEAMIRQLKESLKANNYNEAVYLVRFLSDLVNCHVIAAPSMVAMFENFVSVTQEEDVPQVRRDWYVYAFLSSLPWVGKELYEKKDAEMDRIFANTESYLKRRQKTHVPMLQVWTADKPHPQEEYLDCLWAQIQKLKKDRWQERHILRPYLAFDSILCEALQHNLPPFTPPPHTEDSVYPMPRVIFRMFDYTDDPEGPVMPGSHSVERFVIEENLHCIIKSHWKERKTCAAQLVSYPGKNKIPLNYHIVEVIFAELFQLPAPPHIDVMYTTLLIELCKLQPGSLPQVLAQATEMLYMRLDTMNTTCVDRFINWFSHHLSNFQFRWSWEDWSDCLSQDPESPKPKFVREVLEKCMRLSYHQRILDIVPPTFSALCPANPTCIYKYGDESSNSLPGHSVALCLAVAFKSKATNDEIFSILKDVPNPNQDDDDDEGFSFNPLKIEVFVQTLLHLAAKSFSHSFSALAKFHEVFKTLAESDEGKLHVLRVMFEVWRNHPQMIAVLVDKMIRTQIVDCAAVANWIFSSELSRDFTRLFVWEILHSTIRKMNKHVLKIQKELEEAKEKLARQHKRRSDDDDRSSDRKDGVLEEQIERLQEKVESAQSEQKNLFLVIFQRFIMILTEHLVRCETDGTSVLTPWYKNCIERLQQIFLQHHQIIQQYMVTLENLLFTAELDPHILAVFQQFCALQA

SEQ ID NO: 39274 - protein, 5 aa, Homo sapiens
MLLGS

SEQ ID NO: 39275 - protein, 405 aa, Homo sapiens
LKTLQQQTFKIDIDPEETVKALKEKIESEKGKDAFPVAGQKLIYAGKILNDDTALKEYKIDEKNFVVVMVTKPKAVSTPAPATTQQSAPASTTAVTSSTTTTVAQAPTPVPALAPTSTPASITPASATASSEPAPASAAKQEKPAEKPAETPVATSPTATDSTSGDSSRSNLFEDATSALVTGQSYENMVTEIMSMGYEREQVIAALRASFNNPDRAVEYLLMGIPGDRESQAVVDPPQAASTGAPQSSAVAAAAATTTATTTTTSSGGHPLEFLRNQPQFQQMRQIIQQNPSLLPALLQQIGRENPQLLQQISQHQEHFIQMLNEPVQEAGGQGGGGGGGSGGIAEAGSGHMNYIQVTPQEKEAIERLKALGFPEGLVIQAYFACEKNENLAANFLLQQNFDED

SEQ ID NO: 39276 - protein, 393 aa, Homo sapiens
MARSFGDKDLILPNGGTPAGTSSPASSSSLLNRLQLDDDIDGETRDLFVIVDDPKKHVCTMETYITYRITTKSTRVEFDLPEYSVRRRYQDFDWLRSKLEESQPTHLIPPLPEKFVVKGVVDRFSEEFVETRRKALDKFLKRITDHPVLSFNEHFNIFLTAKDLNAYKKQGIALLTRMGESVKHVTGGYKLRTRPLEFAAIGDYLDTFALKLGTIDRIAQRIIKEEIEYLVELREYGPVYSTWSALEGELAEPLEGVSACIGNCSTALEELTDDMTEDFLPVLREYILYSDSMKSVLKKRDQVQAEYEAKLEAVALRKEDRPKVPADVEKCQDRMECFNADLKADMERWQNNKRQDFRQLLMGMADKNIQYYEKCLMAWESIIPLLQEKQEAK

SEQ ID NO: 39277 - protein, 333 aa, Homo sapiens [sequence omitted]

SEQ ID NO: 39278 - protein, 294 aa, Homo sapiens
KMAMEMRLPVARKPLSERLGRDTKKHLVVPGDTITTDTGFMRGHGTYMGEEKLIASVAGSVERVNKLICVKALKTRYIGEVGDIVVGRITEVQQKRWKVETNSRLDSVLLLSSMNLPGGELRRRSAEDELAMRGFLQEGDLISAEVQAVFSDGAVSLHTRSLKYGKLGQGVLVQVSPSLVKRQKTHFHDLPCGASVILGNNGFIWIYPTPEHKEEEAGGFIANLEPVSLADREVISRLRNCIISLVTQRMMLYDTSILYCYEASLPHQIKDILKPEIMEEIVMETRQRLLEQEG

SEQ ID NO: 39279 - protein, 462 aa, Homo sapiens
MGKEKTHINIVVIGHVDSGKSTTTGHLIYKCGGIDKRTIEKFEKEAAEMGKGSFKYAWVLDKLKAERERGITIDISLWKFETSKYYVTIIDAPGHRDFIKNMITGTSQADCAVLIVAAGVGEFEAGISKNGQTREHALLAYTLGVKQLIVGVNKMDSTEPPYSQKRYEEIVKEVSTYIKKIGYNPDTVAFVPISGWNGDNMLEPSANMPWFKGWKVTRKDGNASGTTLLEALDCILPPTRPTDKPLRLPLQDVYKIGGIGTVPVGRVETGVLKPGMVVTFAPVNVTTEVKSVEMHHEALSEALPGDNVGFKVKNVSVKDVRRGNVAGDSKNDPPMEAAGFTAQVIILNHPGQISAGYAPVLDCHMAHIACKFAELKEKIDRRSGKKLEDGPKFLKSGDAAIVDMVPGKPMCVESFSDYPPLGRFAVRDMRQTVAVGVIKAVDKKAAGAGKVTKSAQKAQKAK

SEQ ID NO: 39280 - protein, 121 aa, Homo sapiens
LTMTQQGAALQNYNNELVKCIEELCQKREELCRQIQEEEDEKQRLQNEVRQLTEKLARVNENLARKIASRNEFDRTIAETEAAYLKILESSQTLLSVLKREAGNLTKATAPDQKSSGGRDS

SEQ ID NO: 39281 - protein, 446 aa, Homo sapiens
IMREIVHLQAGQCGNQIGAKFWEVISDEHGIDPTGTYHGDSDLQLERINVYYNEATGGKYVPRAVLVDLEPGTMDSVRSGPFGQIFRPDNFVFGQSGAGNNWAKGHYTEGAELVDSVLDVVRKEAESCDCLQGFQLTHSLGGGTGSGMGTLLISKIREEYPDRIMNTFSVVPSPKVSDTVVEPYNATLSVHQLVENTDETYCIDNEALYDICFRTLKLTTPTYGDLNHLVSATMSGVTTCLRFPGQLNADLRKLAVNMVPFPRLHFFMPGFAPLTSRGSQQYRALTVPELTQQMFDAKNMMAACDPRHGRYLTVAAVFRGRMSMKEVDEQMLNVQNKNSSYFVEWIPNNVKTAVCDIPPRGLKMSATFIGNSTAIQELFKRISEQFTAMFRRKAFLHWYTGEGMDEMEFTEAESNMNDLVSEYQQYQDATAEEEGEFEEEAEEEVA

SEQ ID NO: 39282 - protein, 22 aa, Homo sapiens
RQRMSAIYPPLLGALSFIAASS

SEQ ID NO: 39283 - protein, 811 aa, Homo sapiens
LVSHSAWAPGARQTLAMTSGATRYRLSCSLRGHELDVRGLVCCAYPPGAFVSVSRDRTTRLWAPDSPNRSFTEMHCMSGHSNFVSCVCIIPSSDIYPHGLIATGGNDHNICIFSLDSPMPLYILKGHKNTVCSLSSGKFGTLLSGSWDTTAKVWLNDKCMMTLQGHTAAVWAVKILPEQGLMLTGSADKTVKLWKAGRCERTFSGHEDCVRGLAILSETEFLSCANDASIRRWQITGECLEVYYGHTNYIYSISVFPNCRDFVTTAEDRSLRIWKHGECAQTIRLPAQSIWCCCVLDNGDIVVGASDGIIRVFTESEDRTASAEEIKAFEKELSHATIDSKTGDLGDINAEQLPGREHLNEPGTREGQTRLIRDGEKVEAYQWSVSEGRWIKIGDVVGSSGANQQTSGKVLYEGKEFDYVFSIDVNEGGPSYKLPYNTSDDPWLTAYNFLQKNDLNPMFLDQVAKFIIDNTKGQMLGLGNPSFSDPFTGGGRYVPGSSGSSNTLPTADPFTGAGRYVPGSASMGTTMAGVDPFTGNSAYRSAASKTMNIYFPKKEAVTFDQANPTQILGKLKELNGTAPEEKKLTEDDLILLEKILSLICNSSSEKPTVQQLQILWKAINCPEDIVFPALDILRLSIKHPSVNENFCNEKEGAQFSSHLINLLNPKGKPANQLLALRTFCNCFVGQAGQKLMMSQRESLMSHAIELKSGSNKNIHIALATLALNYSVCFHKDHNIEGKAQCLSLISTILEVVQDLEATFRLLVALGTLISDDSNAVQLAKSLGVDSQIKKYSSVSEPAKVSECCRFILNLL

SEQ ID NO: 39284 - protein, 122 aa, Homo sapiens
TPKVEAEFQSMGSRLSQPFESYITAPPGTAAAPAKPAPPATPGAPTSPAEHRLLKTCWSCRVLSGLGLMGAGGYVYWVARKPMKMGYPPSPWTITQMVIGLSIATWGIVVMADPKGKAYRVV

SEQ ID NO: 39285 - protein, 180 aa, Homo sapiens
LGAASTAAPQDAQTGPQPIPRADCIMRHLPYFCRGQVVRGFGRGSKQLGIPTANFPEQVVDNLPADISTGIYYGWASVGSGDVHKMVVSIGWNPYYKNTKKSMETHIMHTFKEDFYGEILNVAIVGYLRPEKNFDSLESLISAIQGDIEEAKKRLELPEHLKIKEDNFFQVSKSKIMNGH

SEQ ID NO: 39286 - protein, 306 aa, Homo sapiens
LPGASARAAQVQSMNNLSFSELCCLFCCPPCPGKIASKLAFLPPDPTYTLMCDESGSRWTLHLSERADWQYSSREKDAIECFMTRTSKGNRIACMFVRCSPNAKYTLLFSHGNAVDLGQMSSFYIGLGSRINCNIFSYDYSGYGASSGKPTEKNLYADIEAAWLALRTRYGIRPENVIIYGQSIGTVPSVDLAARYESAAVILHSPLTSGMRVAFPDTKKTYCFDAFPNIDKISKITSPVLIIHGTEDEVIDFSHGLALFERCQRPVEPLWVEGAGHNDVELYGQYLERLKQFVSQELVQKHKEGK

SEQ ID NO: 39287 - protein, 756 aa, Homo sapiens
MQAARFGHVSVAHLLLDHGADVNAQNRLGASVLTVASRGGHLGVVKLLLEAGAFVDHHHPSGEQLGLGGSRDEPLDITALMAAIQHGHEAVVRLLMEWGADPNHAARTVGWSPLMLAALTGRLGVAQQLVEKGANPDHLSVLEKTAFEVALDCKHRDLVDYLDPLTTVRPKTDEEKRRPDIFHALKMGNFQLVKEIADEDPSHVNLVNGDGATPLMLAAVTGQLALVQLLVERHADVDKQDSVHGWTALMQATYHGNKEIVKYLLNQGADVTLRAKNGYTAFDLVMLLNDPDTELVRLLASVCMQVNKDKGRPSHQPPLPHSKVRQPWSIPVLPDDKGGLKSWWNRMSNRFRKLKLMQTLPRGLSSNQPLPFSDEPEPALDSTMRAAPQDKTSRSALPDAAPVTKDNGPGSTRGEKEDTLLTTMLRNGAPLTRLPSDKLKAVIPPFLPPSSFELWSSDRSRTRHNGKADPMKTALPQRASRGHPVGGGGTDTTPVRPVKFPSLPRSPASSANSGNFNHSPHSSGGSSGVGVSRHGGELLNRSGGSIDNVLSQIAAQRKKAAGLLEQKPSHRSSPVGPAPGSSPSELPASPAGGSAPVGKKLETSKRPPSGTSTTSKSTSPTLTPSPSPKGHTAESSVSSSSSHRQSKSSGGSSSGTITDEDELTGILKKLSLEKYQPIFEEQEVDMEAFLTLTDGDLKELGIKTDGSRQQILAAISELNAGKGRERQILQETIHNFHSSFESSASNTRAPGNSPCA

SEQ ID NO: 39288 - protein, 412 aa, Homo sapiens
TDPSVTMHPAVFLSLPDLRCSLLLLVTWVFTPVTTEITSLDTENIDEILNNADVALVNFYADWCRFSQMLHPIFEEASDVIKEEFPNENQVVFARVDCDQHSDIAQRYRISKYPTLKLFRNGMMMKREYRGQRSVKALADYIRQQKSDPIQEIRDLAEITTLDRSKRNIIGYFEQKDSDNYRVFERVANILHDDCAFLSAFGDVSKPERYSGDNIIYKPPGHSAPDMVYLGAMTNFDVTYNWIQDKCVPLVREITFENGEELTEEGLPFLILFHMKEDTESLEIFQNEVARQLISEKGTINFLHADCDKFRHPLLHIQKTPADCPVIAIDSFRHMYVFGDFKDVLIPGKLKQFVFDLHSGKLHREFHHGPDPTDTAPGEQAQDVASSPPESSFQKLAPSEYRYTLLRDRDEL

SEQ ID NO: 39289 - protein, 318 aa, Homo sapiens
MKTEEAIIYSYGFATIASAIPAYSKRGDIVFVDRAACFAIQKGLQASRSDIKLFKHNDMADLERLLKEQEIEDQKNPRKARVTRRFIVVEGLYMNTGTICPLPELVKLKYKYKARIFLEESLSFGVLGEHGRGVTEHYGINIDDIDLISANMENALASIGGFCCGRSFVIDHQRLSGQGYCFSASLPPLLAAAAIEALNIMEENPGIFAVLKEKCGQIHKALQGISGLKVVGESLSPAFHLQLEESTGSREQDVRLLQEIVDQCMNRSIALTQARYLEKEEKCLPPPSIRVVVTVEQTEEELERAASTIKEVAQAVLL

SEQ ID NO: 39290 - protein, 54 aa, Homo sapiens
TVALRPLLLRRRALHSSLSRPAGSGVCWLLLARLLPPACLSHRRRRRHSHGREW

SEQ ID NO: 39291 - protein, 466 aa, Homo sapiens
KNMETEQPEETFPNTETNGEFGKRPAEDMEEEQAFKRSRNTDEMVELRILLQSKNAGAVIGKGGKNIKALRTDYNASVSVPDSSGPERILSISADIETIGEILKKIIPTLEEGLQLPSPTATSQLPLESDAVECLNYQHYKGSDFDCELRLLIHQSLAGGIIGVKGAKIKELRENTQTTIKLFQECCPHSTDRVVLIGGKPDRVVECIKIILDLISESPIKGRAQPYDPNFYDETYDYGGFTMMFDDRRGRPVGFPMRGRGGFDRMPPGRGGRPMPPSRRDYDDMSPRRGPPPPPPGRGGRGGSRARNLPLPPPPPPRGGDLMAYDRRGRPGDRYDGMVGFSADETWDSAIDTWSPSEWQMAYEPQGGSGYDYSYAGGRGSYGDLGGPIITTQVTIPKDLAGSIIGKGGQRIKQIRHESGASIKIDEPLEGSEDRIITITGTQDQIQNAQYLLQNSVKQYADVEGF

SEQ ID NO: 39292 - protein, 127 aa, Homo sapiens
LFGALDPFPSVLTAARQTPAAKMVKQIESKTAFQEALDAAGDKLVVVDFSATWCGPCKMIKPFFHSLSEKYSNVIFLEVDVDDCQDVASECEVKCMPTFQFFKKGQKVGEFSGANKEKLEATINELV

SEQ ID NO: 39293 - protein, 119 aa, Homo sapiens
VLTNCHWTYLKQNRKMAANSSGQGFQNKNRVAILAELDKEKRKLLMQNQSSTNHPGASIALSRPSLNKDFRDHAEQQHIAAQQKAALQHAHAHSSGYFITQDSAFGNLILPVLPRLDPE

SEQ ID NO: 39294 - protein, 288 aa, Homo sapiens
KILREHRSSHRCHCYCRYCCRRVCTSRPASVPAGASVDRPRPLSRCVRTPVPGPDAPLPPGKLPSHQQPPSATMATAPYNYSYIFKYIIIGDMGVGKSCLLHQFTEKKFMADCPHTIGVEFGTRIIEVSGQKIKLQIWDTAGQERFRAVTRSYYRGAAGALMVYDITRRSTYNHLSSWLTDARNLTNPNTVIILIGNKADLEAQRDVTYEEAKQFAEENGLLFLEASAKTGENVEDAFLEAAKKIYQNIQDGSLDLNAAESGVQHKPSAPQGGRLTSEPQPQREGCGC

SEQ ID NO: 39295 - protein, 19 aa, Homo sapiens
VPSSCEPGARSRAPGRSLR

SEQ ID NO: 39296 - protein, 29 aa, Homo sapiens
IKLVSKHRAQVIYTRNTKGRDAPAAGEDA

SEQ ID NO: 39297 - protein, 697 aa, Homo sapiens
LPFAWFVAPCDPGPLPPASRKLRCAPVLRPVAGLPAAAQLAGKMKLSLVAAMLLLLSAARAEEEDKKEDVGTVVGIDLGTTYSCVGVFKNGRVEIIANDQGNRITPSYVAFTPEGERLIGDAAKNQLTSNPENTVFDAKRLIGRTWNDPSVQQDIKFLPFKVVEKKTKPYIQVDIGGGQTKTFAPEEISAMVLTKMKETAEAYLGKKVTHAVVTVPAYFNDAQRQATKDAGTIAGLNVMRIINEPTAAAIAYGLDKREGEKNILVFDLGGGTFDVSLLTIDNGVFEVVATNGDTHLGGEDFDQRVMEHFIKLYKKKTGKDVRKDNRAVQKLRREVEKAKRALSSQHQARIEIESFYEGEDFSETLTRAKFEELNMDLFRSTMKPVQKVLEDSDLKKSDIDEIVLVGGSTRIPKIQQLVKEFFNGKEPSRGINPDEAVAYGAAVQAGVLSGDQDTGDLVLLDVCPLTLGIETVGGVMTKLIPRNTVVPTKKSQIFSTASDNQPTVTIKVYEGERPLTKDNHLLGTFDLTGIPPAPRGVPQIEVTFEIDVNGILRVTAEDKGTGNKNKITITNDQNRLTPEEIERMVNDAEKFAEEDKKLKERIDTRNELESYAYSLKNQIGDKEKLGGKLSSEDKETMEKAVEEKIEWLESHQDADIEDFKAKKKELEEIVQPIISKLYGSAGPPPTGEEDTAEKDEL

SEQ ID NO: 39298 - protein, 362 aa, Homo sapiens
ILFLEHLLVVPSEMSSLSGKVQTVLGLVEPSKLGRTLTHEHLAMTFDCCYCPPPPCQEAISKEPIVMKNLYWIQKNAYSHKENLQLNQETEAIKEELLYFKANGGGALVENTTTGISRDTQTLKRLAEETGVHIISGAGFYVDATHSSETRAMSVEQLTDVLMNEILHGADGTSIKCGIIGEIGCSWPLTESERKVLQATAHAQAQLGCPVIIHPGRSSRAPFQIIRILQEAGADISKTVMSHLDRTILDKKELLEFAQLGCYLEYDLFGTELLHYQLGPDIDMPDDNKRIRRVRLLVEEGCEDRILVAHDIHTKTRLMKYGGHGYSHILTNVVPKMLLRGITENVLDKILIENPKQWLTFK

SEQ ID NO: 39299 - protein, 24 aa, Homo sapiens
LLPLLLLLRLLAEAGGSSGGGGGG

SEQ ID NO: 39300 - protein, 135 aa, Homo sapiens
MQCSALRKNGFVVLKGWPCKIVEMSASKTGKHGHAKVHLVGIDIFTGKKYEDICPSTHNMDVPNIKRNDFQLIGIQDGYLSLLQDSGEVPEDLRLPEGDLGKEIEQKYDCGEEILITVLSAMTEEAAVAIKAMAK

SEQ ID NO: 39301 - skipped

SEQ ID NO: 39302 - protein, 7 aa, Homo sapiens
LPLLGSG

SEQ ID NO: 39303 - protein, 203 aa, Homo sapiens [sequence omitted]

SEQ ID NO: 39304 - protein, 5 aa, Homo sapiens
MPDLE

SEQ ID NO: 39305 - protein, 12 aa, Homo sapiens
MAESGLLTHCLQ

SEQ ID NO: 39306 - protein, 262 aa, Homo sapiens
IDEEVNIEFEAYSLSDNDYDGIKKLLQQLFLKAPVNTAELTDLLIQQNHIGSVIKQTDVSEDSNDDMDEDEVFGFISLLNLTERKGTQCVEQIQELVLRFCEKNCEKSMVEQLDKFLNDTTKPVGLLLSERFINVPPQIALPMYQQLQKELAGAHRTNKPCGKCYFYLLISKTFVEAGKNNSKKKPSNKKKAALMFANAEEEFFYEKAILKFNYSVQEESDTCLGGKWSFDDVPMTPLRTVMLIPGDKMNEIMDKLKEYLSV

SEQ ID NO: 39307 - protein, 228 aa, Homo sapiens
MMPEINTNHLDKQQVQLLAEMCILIDENDNKIGAETKKNCHLNENIEKGLLHRAFSVFLFNTENKLLLQQRSDAKITFPGCFTNTCCSHPLSNPAELEESDALGVRRAAQRRLKAELGIPLEEVPPEEINYLTRIHYKAQSDGIWGEHEIDYILLVRKNVTLNPDPNEIKSYCYVSKEELKELLKKAASGEIKITPWFKIIAATFLFKWWDNLNHLNQFVDHEKIYRM

SEQ ID NO: 39308 - protein, 228 aa, Homo sapiens
LRAVKTRLKMESQEPTESSQNGKQYIISEELISEGKWVKLEKTTYMDPTGKTRTWESVKRTTRKEQTADGVAVIPVLQRTLHYECIVLVKQFRPPMGGYCIEFPAGLIDDGETPEAAALRELEEETGYKGDIAECSPAVCMDPGLSNCTIHIVTVTINGDDAENARPKPKPGDGEFVEVISLPKNDLLQRLDALVAEEHLTVDARVYSYALALKHANAKPFEVPFLKF

SEQ ID NO: 39309 - protein, 456 aa, Homo sapiens
LLGSCVRACPAMNEEYDVIVLGTGLTECILSGIMSVNGKKVLHMDRNPYYGGESASITPLEDLYKRFKIPGSPPESMGRGRDWNVDLIPKFLMANGQLVKMLLYTEVTRYLDFKVTEGSFVYKGGKIYKVPSTEAEALASSLMGLFEKRRFRKFLVYVANFDEKDPRTFEGIDPKKTTMRDVYKKFDLGQDVIDFTGHALALYRTDDYLDQPCYETINRIKLYSESLARYGKSPYLYPLYGLGELPQGFARLSAIYGGTYMLNKPIEEIIVQNGKVIGVKSEGEIARCKQLICDPSYVKDRVEKVGQVIRVICILSHPIKNTNDANSCQIIIPQNQVNRKSDIYVCMISFAHNVAAQGKYIAIVSTTVETKEPEKEIRPALELLEPIEQKFVSISDLLVPKDLGTESQIFISRTYDATTHFETTCDDIKNIYKRMTGSEFDFEEMKRKKNDIYGED

SEQ ID NO: 39310 - protein, 746 aa, Homo sapiens
MQVAGQEGTFSLVALPHVASAQPIQKPRMSLPENLKLPIPRYQPPRNSKASRKKPILIFPKSGCSKAPAQTQMCPQMSPSPPHHPELLYKPSPFEEVPSLEQAPASISTAALTNGSDHGDLRPPVTNTHGSLNPPATPASSTPEEPAKQDLTALSGKAHFVSKITSSKPSAVASEKFKEQVDLAKTMTNLSPTILGNAVQLISSVPKGKLPIPPYSRMKTMEVYKIKSDANIAGFSLPGPKADCDKIPSTTEGFNAATKVASRLPVPQVSQQSACESAFCPPTKLDLNHKTKLNSGAAKRKGRKRKVPDEILAFQGKRRKYIINKCRDGKERVKNDPQEFRDQKLGTLKKYRSIMPKPIMVIPTLASLASPTTLQSQMLGGLGQDVLLNNSLTPKYLGCKQDNSSSPKPSSVFRNGFSGIKKPWHRCHVCNHHFQFKQHLRDHMNTHTNRRPYSCRICRKSYVRPGSLSTHMKLHHGENRLKKLMCCEFCAKVFGHIRVYFGHLKEVHRVVISTEPAPSELQPGDIPKNRDMSVRGMEGSLERENKSNLEEDFLLNQADEVKLQIKCGRCQITAQSFAEIKFHLLDVHGEEIEGRLQEGTFPGSKGTQEELVQHASPDWKRHPERGKPEKVHSSSEESHACPRLKRQLHLHQNGVEMLMENEGPQSGTNKPRETCQGPECPGLHTFLLWSHSGFNCLLCAEMLGRKEDLLHHWKHQHNCEDPSKLWAILNTVSNQGVIELSSEAEK

SEQ ID NO: 39311 - protein, 844 aa, Homo sapiens
MADRSGKIIPGQVYIEVEYDYEYEAKDRKIVIKQGERYILVKKTNDDWWQVKPDENSKAFYVPAQYVKEVTRKALMPPVKQVAGLPNNSTKIMQSLHLQRSTENVNKLPELSSFGKPSSSVQGTGLIRDANQNFGPSYNQGQTVNLSLDLTHNNGKFNNDSHSPKVSSQNRTRSFGHFPGPEFLDVEKTSFSQEQSCDSAGEGSERIHQDSESGDELSSSSTEQIRATTPPNQGRPDSPVYANLQELKISQSALPPLPGSPAIQINGEWETHKDSSGRCYYYNRGTQERTWKPPRWTRDASISKGDFQNPGDQELLSSEENYYSTSYSQSDSQCGSPPRGWSEELDERGHTLYTSDYTNEKWLKHVDDQGRQYYYSADGSRSEWELPKYNASSQQQREIIKSRSLDRRLQEPIVLTKWRHSTIVLDTNDKESPTASKPCFPENESSPSSPKHQDTASSPKDQEKYGLLNVTKIAENGKKVRKNWLSSWAVLQGSSLLFTKTQGSSTSWFGSNQSKPEFTVDLKGATIEMASKDKSSKKNVFELKTRQGTELLIQSDNDTVINDWFKVLSSTINNQAVETDEGIEEEIPDSPGIEKHDKEKEQKDPKKLRSFKVSSIDSSEQKKTKKNLKKFLTRRPTLQAVREKGYIKDQVFGSNLANLCQRENGTVPKFVKLCIEHVEEHGLDIDGIYRVSGNLAVIQKLRFAVNHDEKLDLNDSKWEDIHVITGALKMFFRELPEPLFTFNHFNDFVNAIKQEPRQRVAAVKDLIRQLPKPNQDTMQILFRHLRRVIENGEKNRMTYQSIAIVFGPTLLKPEKETGNIAVHTVYQNQIVELILLELSSIFGR

SEQ ID NO: 39312 - protein, 199 aa, Homo sapiens
IMSFIFEWIYNGFSSVLQFLGLYKKSGKLVFLGLDNAGKTTLLHMLKDDRLGQHVPTLHPTSEELTIAGMTFTTFDLGGHEQARRVWKNYLPAINGIVFLVDCADHSRLVESKVELNALMTDETISNVPILILGNKIDRTDAISEEKLREIFGLYGQTTGKGNVTLKELNARPMEVFMCSVLKRQGYGEGFRWLSQYID

SEQ ID NO: 39313 - protein, 302 aa, Homo sapiens
VALWQRRRQDSGTMSGFSTEERAAPFSLEYRVFLKNEKGQYISPFHDIPIYADKDVFHMVVEVPRWSNAKMEIATKDPLNPIKQDVKKGKLRYVANLFPYKGYIWNYGAIPQTWEDPGHNDKHTGCCGDNDPIDVCEIGSKVCARGEIIGVKVLGILAMIDEGETDWKVIAINVDDPDAANYNDINDVKRLKPGYLEATVDWFRRYKVPDGKPENEFAFNAEFKDKDFAIDIIKSTHDHWKALVTKKTNGKGISCMNTTLSESPFKCDPDAARAIVDALPPPCESACTVPTDVDKWFHHQKN

SEQ ID NO: 39314 - protein, 135 aa, Homo sapiens
MQCSALRKNGFVVLKGWPCKIVEMSASKTGKHGHAKVHLVGIDIFTGKKYEDICPSTHNMDVPNIRRNDFQLIGIQDGYLSLLQDSGEVPEDLRLPEGDLGKETEQKYDCGEEILITVLSAMTEEAAVAIKAMAK

SEQ ID NO: 39315 - protein, 121 aa, Homo sapiens
ILILVSALSQLMVSSPPYSLSPRPSVGHIHRRVTDHLGVVYYVGDTFSEEYTGSSLKTVERNVEDDYIANLRNNCWKEKQQKEGLLYRARYFGDTDMYHRAQKMGTPSCSRLSEVQASLHG

SEQ ID NO: 39316 - protein, 362 aa, Homo sapiens
KMVHAEAFSRPLSRNEVVGLIFRLTIFGAVTYFTIKWMVDAIDPTRKQKVEAQKQAEKLMKQIGVKNVKLSEYEMSIAAHLVDPLNMHVTWSDIAGLDDVITDLKDTVILPIKKKHLFENSRLLQPPKGVLLYGPPGCGKTLIAKATAKEAGCRFINLQPSTLTDKWYGESQKLAAAVFSLAIKLQPSIIFIDEIDSFLRNRSSSDHEATAMMKAQFMSLWDGLDTDHSCQVIVMGATNRPQDLDSAIMRRMPTRFHINQPALKQREAILKLILKNENVDRHVDLLEVAQETDGFSGSDLKEMCRDAALLCVREYVNSTSEESHDEDEIRPVQQQDLHRAIEKMKKSKDAAFQNVLTHVCLD

SEQ ID NO: 39317 - protein, 86 aa, Homo sapiens
MPQYQTWEEFSRAAEKLYLADPMKARVVLKYRHSDGNLCVKVTDDLVCLVYKTDQAQDVKKIEKFHSQLMRLMVAKEARNVTMETE

SEQ ID NO: 39318 - protein, 196 aa, Homo sapiens
IMAPPVRYCIPGERLCNLEEGSPGSGTYTRHGYIFSSLAGCLMKSSENGALPVVSVVRETESQLLPDVGAIVTCKVSSINSRFAKVHILYVGSMPLKNSFRGTIRKEDVRATEKDKVEIYKSFRPGDIVLAKVISLGDAQSNYLLTTAENELGVVVAHSESGIQMVPISWCEMQCPKTHTKEFRKVARVQPEFLQT

SEQ ID NO: 39319 - protein, 410 aa, Homo sapiens
LAPSVLPGCSSKSFKLYSPKEPPNGNAFPPFHPGTMLDRDVGPTPMYPPTYLEPGIGRHTPYGNQTDYRIFELNKRLQNWTEECDNLWWDAFTTEFFEDDAMLTITFCLEDGPKRYTIGRTLIPRYFRSIFEGGATELYYVLKHPKEAFHSNFVSLDCDQGSMVTQHGKPMFTQVCVEGRLYLEFMFDDMMRIKTWHFSIRQHRELIPRSILAMHAQDPQMLDQLSKNITRCGLSNSTLNYLRLCVILEPMQELMSRHKTYSLSPRDCLKTCLFQKWQRMVAPPAEPTRQQPSKRRKRKMSGGSTMSSGGGNTNNSNSKKKSPASTFALSSQVPDVMVVGEPTLMGGEFGDEDERLITRLENTQFDAANGIDDEDSFNNSPALGANSPWNSKPPSSQESKSENPTSQASQ

SEQ ID NO: 39320 - protein, 61 aa, Homo sapiens
IEIMAGPESDAQYQFTGIKKYFNSYTLTGRMNCVLATYGSIALIVLYFKLRSKKTPAVKAT

SEQ ID NO: 39321 - protein, 239 aa, Homo sapiens
KMSEDLAKQLASYKAQLQQVEAALSGNGENEDLLKLKKDLQEVIELTKDLLSTQPSETLASSDSFASTQPTHSWKVGDKCMAVWSEDGQCYEAEIEEIDEENGTAAITFAGYGNAEVTPLLNLKPVEEGRKAKEDSGNKPMSKKEMIAQQREYKKKKALKKAQRIKELEQEREDQKVKWQQFNNRAYSKNKKGQVKRSIFASPESVTGKVGVGTCGIADKPMTQYQDTSKYNVRHLMPQ

SEQ ID NO: 39322 - protein, 12 aa, Homo sapiens
KEKLEATINELV

SEQ ID NO: 39323 - protein, 13 aa, Homo sapiens
MVRYSLDPENPTK

SEQ ID NO: 39324 - protein, 7 aa, Homo sapiens
METAEQP

SEQ ID NO: 39325 - protein, 803 aa, Homo sapiens
LDPSEPQPLAAMHVIKRDGRQERVMFDKITSRIQKLCYGLNMDFVDPAQITMKVIQGLYSGVTTVELDTLAAETAATLTTKHPDYAILAARIAVSNLHKETKKVFSDVMEDLYNYINPHNGKHSPMVAKSTLDIVLANKDRLNSAIIYDRDFSYNYFGFKTLERSYLLKINGKVAERPQHMLMRVSVGIHKEDIDAAIETYNLLSERWFTHASPTLFNAGTNRPQLSSCFLLSMKDDSIEGIYDTLKQCALISKSAGGIGVAVSCIRATGSYIAGTNGNSNGLVPMLRVYNNTARYVDQGGNKRPGAFAIYLEPWHLDIFEFLDLKKNTGKEEQRARDLFFALWIPDLFMKRVETNQDWSLMCPNECPGLDEVWGEEFEKLYASYEKQGRVRKVVKAQQLWYAIIESQTETGTPYMLYKDSCNRKSNQQNLGTIKCSNLCTEIVEYTSKDEVAVCNLASLALNMYVTSEHTYDFKKLAEVTKVVVRNLNKIIDINYYPVPEACLSNKRHRPIGIGVQGLADAFILMRYPFESAEAQLLNKQIFETIYYGALEASCDLAKEQGPYETYEGSPVSKGILQYDMWNVTPTDLWDWKVLKEKIAKYGIRNSLLIAPMPTASTAQILGNNESIEPYTSNIYTRRVLSGEFQIVNPHLLKDLTERGLWHEEMKNQIIACNGSIQSIPEIPDDLKQLYKTVWEISQKTVLKMAAERGAFIDQSQSLNIHIAEPNYGKLTSMHFYGWKQGLKTGMYYLRTRPAANPIQFTLNKEKLKDKEKVSKEEEEKERNTAAMVCSLENRDECLMCGS

SEQ ID NO: 39326 - protein, 11 aa, Homo sapiens
MAFLHVSLVFT

SEQ ID NO: 39327 - protein, 187 aa, Homo sapiens
IPARMSAARESHPHGVKRSASPDDDLGSSNWEAADLGNEERKQKFLRLMGAGKKEHTGRLVIGDHKSTSHFRTGEEDKKINEELESQYQQSMDSKLSGRYRRHCGLGFSEVEDHDGEGDVAGDDDDDDDDSPDPESPDDSESDSESEKEESAEELQAAEHPDEVEDPKNKKDAKSNYKMMFVKSSGS

SEQ ID NO: 39328 - protein, 4 aa, Homo sapiens
MIFA

SEQ ID NO: 39329 - protein, 257 aa, Homo sapiens
RLWWRGILGASALTRGTGRPSVLLLPVRRESAGADTRPTVRPRNDVAHKQLSAFGEYVAEILPKYVQQVQVSCFNELEVCIHPDGVIPVLTFLRDHTNAQFKSLVDLTAVDVPTRQNRFEIVYNLLSLRFNSRIRVKTYTDELTPIESAVSVFKAANWYEREIWDMFGVFFANHPDLRRILTDYGFEGHPFRKDFPLSGYVELRYDDEVKRVVAEPVELAQEFRKFDLNSPWEAFPVYRQPPESLKLEAGDKKPDAK

SEQ ID NO: 39330 - protein, 30 aa, Homo sapiens
IHPHIASLGSHLMLGFIIPTSLSLLLACTS

SEQ ID NO: 39331 - protein, 173 aa, Homo sapiens
KMFYHISLEHEILLHPRYFGPNLLNTVKQKLFTEVEGTCTGKYGFVIAVTTIDNIGAGVIQPGRGFVLYPVKYKAIVFRPFKGEVVDAVVTQVNKVGLFTEIGPMSCFISRHSIPSEMEFDPNSNPPCYKTMDEDIVIQQDDEIRLKIVGTRVDKNDIFAIGSLMDDYLGLVS

SEQ ID NO: 39332 - protein, 192 aa, Homo sapiens [sequence omitted]

SEQ ID NO: 39333 - protein, 37 aa, Homo sapiens
MNYEGSPIKVTLATLKMSVQPMVSLGGFEITPPVSYG

SEQ ID NO: 39334 - protein, 78 aa, Homo sapiens
KISLKTLLECVRLRTFGRFGLQQVQVDCHFLQLYLWRFVADEELVHLLLDEVVASAALRCPDPVPMEPSVVEVICERG

SEQ ID NO: 39335 - protein, 207 aa, Homo sapiens
LTTPMLLRALAQAARAGPPGGRSLHSSAVAATYKYVNMQDPEMDMKSVTDRAARTLLWTELFRGLGMTLSYLFREPATINYPFEKGPLSPRFRGEHALRRYPSGEERCIACKLCEAICPAQAITIEAEPRADGSRRTTRYDIDMTKCIYCGFCQEACPVDAIVEGPNFEFSTETHEELLYNKEKLLNNGDKWEAEIAANIQADYLYR

SEQ ID NO: 39336 - protein, 16 aa, Homo sapiens
RAHVPGRRGSSINDQP

SEQ ID NO: 39337 - protein, 178 aa, Homo sapiens
LLLCAHVVTLLVRATPVSQTTTAATASVRSTKDPCPSQPPVFPAAKQCPALEVTWPEVEVPLNGTLSLSCVACSRFPNFSILYWLGNGSFIEHLPGRLWEGSTSRERGSTGTQLCKALVLEQLTPALHSTNFSCVLVDPEQVVQRHVVLAQLWAGLRATLPPTQEALPSSHSSPQQQG

SEQ ID NO: 39338 - protein, 69 aa, Homo sapiens [sequence omitted]

SEQ ID NO: 39339 - protein, 5 aa, Homo sapiens
MAAPR

SEQ ID NO: 39340 - protein, 79 aa, Homo sapiens
IRDPETIKHLDRHSDSKQGKYLNWDAVFRFLQKYIQKETECLRIAKPNVSASTQASRQKKMQEISSLVKYFIKCANRSK

SEQ ID NO: 39341 - protein, 245 aa, Homo sapiens
TPQPLGARTDPLLQCRMSQGDSNPAAIPHAAEDIQGDDRWMSQHNRFVLDCKDKEPDVLFVGDSMVQLMQQYEIWRELFSPLHALNFGIGGDTTRHVLWRLKNGELENIKPKVIVVWVGTNNHENTAEEVAGGIEAIVQLINTRQPQAKIIVLGLLPRGEKPNPLRQKNAKVNQLLKVSLPKLANVQLLDTDGGFVHSDGAISCHDMFDFLHLTGGGYAKICKPLHELIMQLLEETPEEKQTTIA

SEQ ID NO: 39342 - protein, 208 aa, Homo sapiens
KMQSGTHWRVLGLCLLSVGVWGQDGNEEMGGITQTPYKVSISGTTVILTCPQYPGSEILWQHNDKNIGGDEDDKNIGSDEDHLSLKEFSELEQSGYYVCYPRGSKPEDANFYLYLRARVCENCMEMDVMSVATIVIVDICITGGLLLLVYYWSKNRKAKAKPVTRGAGAGGRQRGQNKERPPPVPNPDYEPIRKGQRDLYSGLNQRRI

SEQ ID NO: 39343 - protein, 6 aa, Homo sapiens
MEDTLK

SEQ ID NO: 39344 - protein, 15 aa, Homo sapiens
KNRLDYHISVQNMMR

SEQ ID NO: 39345 - protein, 37 aa, Homo sapiens
IRWICCSSYTMSVCWLLSASGTASEWVMQCWPSMAWT

SEQ ID NO: 39346 - protein, 21 aa, Homo sapiens
RVVKRRVNALKNLQVKLNVHR

SEQ ID NO: 39347 - protein, 245 aa, Homo sapiens
LPDFFLLLLFRGCLIGAVNLKSSNRTPVVQEFESVELSCIITDSQTSDPRIEWKKIQDEQTTYVFFDNKIQVKPVTPVCRVPKAVPVGKMATLHCQESEGHPRPHYSWYRNDVPLPTDSRANPRFRNSSFHLNSETGTLVFTAVHKDDSGQYYCIASNDAGSARCEEQEMEVYDLNIGGIIGGVLVVLAVLALITLGICCAYRRGYFINNKQDGESYKNPGKPDGVNYIRTDEEGDFRHKSSFVI

SEQ ID NO: 39348 - protein, 26 aa, Homo sapiens
VDVSDLGSRNYSARTDFYCLVSKDDM

SEQ ID NO: 39349 - protein, 325 aa, Homo sapiens
VALAVALRRSKEPATEFCCLGGAAPHRSLHLAAAMAKGRVAERSQLGAHHTTPVGDGAAGTRGLAAPGSRDHQKEKSWVEAGSARMSLLILVSIFLSAAFVMFLVYKNFPQLSEEERVNMKVPRDMDDAKALGKVLSKYKDTFYVQVLVAYFATYIFLQTFAIPGSIFLSILSGFLYPFPLALFLVCLCSGLGASFCYMLSYLVGRPVVYKYLTEKAVKWSQQVERHREHLINYIIFLRITPFLPNWFINITSPVINVPLKVFFIGTFLGVAPPSFVAIKAGTTLYQLTTAGEAVSWNSIFILMILAVLSILPAIFQKKLKQKFE

SEQ ID NO: 39350 - protein, 133 aa, Homo sapiens
LWTITMGIQGGSVLFGLLLVLAVFCHSGHSLQCYNCPNPTADCKTAVNCSSDFDACLITKAGLQVYNKCWKFEHCNFNDVTTRLRENELTYYCCKKDLCNFNEQLENGGTSLSEKTVLLLVTPFLAAAWSLHP

SEQ ID NO: 39351 - protein, 57 aa, Homo sapiens
VHLSTIPRLLATASSWGKPQGKTLRNGFLHEALDEMTTPQQTTPQTKKNDMMQSSGK

SEQ ID NO: 39352 - protein, 22 aa, Homo sapiens
TTTTNFFLHAVLTALLPSWIKC

SEQ ID NO: 39353 - protein, 56 aa, Homo sapiens
LLYYLLRSPFYDRFSEARILFLLQLLADHVPGVGLVTRPLMDYLPTWQKIYFYSWG

SEQ ID NO: 39354 - protein, 18 aa, Homo sapiens
MAFKDTGKTPVEPEVAIH

SEQ ID NO: 39355 - protein, 523 aa, Homo sapiens
LASEGESEVMAAFKLDFLPEMMVDHCSLNSSPVSKKMNGTLDHPDQPDLDAIKMFVGQVPRTWSEKDLRELFEQYGAVYEINVLRDRSQNPPQSKGCCFVTFYTRKAALEAQNALHNMKVLPGMHHPIQMKPADSEKNNAVEDRKLFIGMISKKCTENDIRVMFSSFGQIEECRILRGPDGLSRGCAFVTFTTRAMAQTAIKAMHQAQTMEGCSSPMVVKFADTQKDKEQKRMAQQLQQQMQQISAASVWGNLAGLNTLGPQYLALYLQLLQQTASSGNLNTLSSLHPMGGLNAMQLQNLAALAAAASAAQNTPSGTNALTTSSSPLSVLTSSAGSSPSSSSSNSVNPIASLGALQTLAGATAGLNVGSLAGMAALNGGLGSSGLSNGTGSTMEALTQAYSGIQQYAAAALPTLYNQNLLTQQSIGAAGSQKEGPEGANLFIYHLPQEFGDQDLLQMFMPFGNVVSAKVFIDKQTNLSKCFGFVSYDNPVSAQAAIQSMNGFQIGMKRLKVQLKRSKNDSKPY

SEQ ID NO: 39356 - protein, 446 aa, Homo sapiens
LSGTGLAMDPLSELQDDLTLDDTSEALNQLKLASIDEKNWPSDEMPDFPKSDDSKSSSPELVTHLKWDDPYYDIARHQIVEVAGDDKYGRKIIVFSACRMPPSHQLDHSKLLGYLKHTLDQYVESDYTLLYLHHGLTSDNKPSLSWLRDAYREFDRKYKKNIKALYIVHPTMFIKTLLILFKPLISFKFGQKIFYVNYLSELSEHVKLEQLGIPRQVLKYDDFLKSTQKSPATAPKPMPPRPPLPNQQFGVSLQHLQEKNPEQEPIPIVLRETVAYLQAHALTTEGIFRRSANTQVVREVQQKYNMGLPVDFDQYNELHLPAVILKTFLRELPEPLLTFDLYPHVVGFLNIDESQRVPATLQVLQTLPEENYQVLRFLTAFLVQISAHSDQNKMTNTNLAVVFGPNLLWAKDAAITLKAINPINTFTKFLLDHQGELFPSPDPSGL

SEQ ID NO: 39357 - protein, 30 aa, Homo sapiens [sequence omitted]

SEQ ID NO: 39358 - protein, 1718 aa, Homo sapiens
MASPLPREMEEELVPTGSEPGDTRAKPPVKPKPRALPAKPALPAKPSLLVPVGPRPPRGPLAELPSARKMNMLAGPQPYGGSKRPLPFAPRPAVEASTGGEATQETGKEEAGKEEPPPLTPPARCAAPGGVRKAPAPFRPASERFAATTVEEILAKMEQPRKEVLASPDRLWGSRLTFNHDGSSRYGPRTYGTTTAPRDEDGSTLFRGWSQEGPVKSPAECREEHSKTPEERSLPSDLAFNGDLAKAASSELPADISKPWIPSSPAPSSENGGPASPGLPAEASGSGPGSPHLHPPDKSSPCHSQLLEAQTPEASQASPCPAVTPSAPSAALPDEGSRHTPSPGLPAEGAPEAPRPSSPPPEVLEPHSLDQPPATSPRPLIEVGELLDLTRTFPSGGEEEAKGDAHLRPTSLVQRRFSEGVLQSPSQDQEKLGGSLAALPQGQGSQLALDRPFGAESNWSLSQSFEWTFPTRPSGLGVWRLDSPPPSPITEASEAAEAAEAGNLAVSSREEGVSQQGQGAGSAPSGSGSSWVQGDDPSMSLTQKGDGESQPQFPAVPLEPLPTTEGTPGLPLQQAEERYESQEPLAGQESPLPLATREAALPILEPVLGQEQPAAPDQPCVLFADAPEPGQALPVEEEAVTLARAETTQARTEAQDLCRASPEPPGPESSSRWLDDLLASPPPSGGGARRGAGAELKDTQSPSTCSEGLLGWSQKDLQSEFGITGDPQPSSFSPSSWCQGASQDYGLGGASPRGDPGLGERDWTSKYGQGAGEGSTREWASRCGIGQEEMEASSSQDQSKVSAPGVLTAQDRVVGKPAQLGTQRSQEADVQDWEFRKRDSQGTYSSRDAELQDQEFGKRDSLGTYSSRDVSLGDWEFGKRDSLGAYASQDANEQGQDLGKRDHHGRYSSQDADEQDWEFQKRDVSLGTYGSRAAEPQEQEFGKSAWIRDYSSGGSSRTLDAQDRSFGTRPLSSGFSPEEAQQQDEEFEKKIPSVEDSLGEGSRDAGRPGERGSGGLFSPSTAHVPDGALGQRDQSSWQNSDASQEVGGHQERQQAGAQGPGSADLEDGEMGKRGWVGEFSLSVGPQREAAFSPGQQDWSRDFCIEASERSYQFGIIGNDRVSGAGFSPSSKMEGGHFVPPGKTTAGSVDWTDQLGLRNLEVSSCVGSGGSSEARESAVGQMGWSGGLSLRDMNLTGCLESGGSEEPGGIGVGEKDWTSDVNVKSKDLAEVGEGGGHSQARESGVGQTDWSGVEAGEFLKSRERGVGQADWTPDLGLRNMAPGAVCSPGESKELGVGQMDWGNNLGLRDLEVTCDPDSGGSQGLRGCGVGQMDWTQDLAPQNVELFGAPSEAREHGVGGVSQCPEPGLRHNGSLSPGLEARDPLEARELGVGETSGPETQGEDYSSSSLEPHPADPGMETGEALSFGASPGRCPARPPPSGSQGLLEEMLAASSSKAVARRESAASGLGGLLEEEGAGAGAAQEEVLEPGRDSPPSWRPQPDGEASQTEDVDGTWGSSAARWSDQGPAQTSRRPSQGPPARSPSQDFSFIEDTEILDSAMYRSRANLGRKRGHRAPVIRPGGTLGLSEAADSDAHLFQDSTEPRASRVPSSDEEVVEEPQSRRTRMSLGTKGLKVNLFPGLSPSALKAKLRPRNRSAEEGELAESKSSQKESAVQRSKSCKVPGLGKPLTLPPKPEKSSGSEGSSPNWLQALKLKKKKV

SEQ ID NO: 39359 - protein, 20 aa, Homo sapiens
MTPNTVFLSSVLYIFFSLKV

SEQ ID NO: 39360 - protein, 678 aa, Homo sapiens
VRPEAAAGTAMAANMYRVGDYVYFENSSSNPYLVRRIEELNKTANGNVEAKVVCLFRRRDISSSLNSLADSNAREFEEESKQPGVSEQQRHQLKHRELFLSRQFESLPATHIRGKCSVTLLNETDILSQYLEKEDCFFYSLVFDPVQKTLLADQGEIRVGCKYQAEIPDRLVEGESDNRNQQKMEMKVWDPDNPLTDRQIDQFLVVARAVGTFARALDCSSSIRQPSLHMSAAAASRDITLFHAMDTLQRNGYDLAKAMSTLVPQGGPVLCRDEMEEWSASEAMLFEEALEKYGKDFNDIRQDFLPWKSLASIVQFYYMWKTTDRYIQQKRLKAAEADSKLKQVYIPTYTKPNPNQIISVGSKPGMNGAGFQKGLTCESCHTTQSAQWYAWGPPNMQCRLCASCWIYWKKYGGLKTPTQLEGATRGTTEPHSRGHLSRPEAQSLSPYTTSANRAKLLAKNRQTFLLQTTKLTRLARRMCRDLLQPRRAARRPYAPINANAIKAECSIRLPKAAKTPLKIHPLVRLPLATIVKDLVAQAPLKPKTPRGTKTPINRNQLSQNRGLGGIMVKRAYETMAGAGVPFSANGRPLASGIRSSSQPAAKRQKLNPADAPNPVVFVATKDTRALRKALTHLEMRRAARRPNLPLKVKPTLIAVRPPVPLPAPSHPASTNEPIVLED

SEQ ID NO: 39361 - protein, 202 aa, Homo sapiens
MLAGRGLGQGWAYCYQCQSQVPPRSGHCSACRVCILRRDHHCRLLGRCVGFGNYRPFLCLLLHAAGVLLHVSVLLGPALSALLRAHTPLHMAALLLLPWLMLLTGRVSLAQFALAFVTDTCVAGALLCGAGLLFHGMLLLRGQTTWEWARGQHSYDLGPCHNLQAALGPRWALVWLWPFLASPLPGDGITFQTTADVGHTAS

SEQ ID NO: 39362 - protein, 648 aa, Homo sapiens
VPVPVPGGAMATGANATPLDFPSKKRKRSRWNQDTMEQKTVIPGMPTVIPPGLTREQERAYIVQLQIEDLTRKLRTGDLGIPPNPEDRSPSPEPIYNSEGKRLNTREFRTRKKLEEERHNLITEMVALNPDFKPPADYKPPATRVSDKVMIPQDEYPEINFVGLLIGPRGNTLKNIEKECNAKIMIRGKGSVKEGKVGRKDGQMLPGEDEPLHALVTANTMENVKKAVEQIRNILKQGIETPEDQNDLRKMQLRELARLNGTLREDDNRILRPWQSSETRSITNTTVCTKCGGAGHIASDCKFQRPGDPQSAQDKARMDKEYLSLMAELGEAPVPASVGSTSGPATTPLASAPRPAAPANNPPPPSLMSTTQSRPPWMNSGPSESRPYHGMHGGGPGGPGGGPHSFPHPLPSLTGGHGGHPMQHNPNGPPPPWMQPPPPPMNQGPHPPGHHGPPPMDQYLGSTPVGSGVYRLHQGKGMMPPPPMGMMPPPPPPPSGQPPPPPSGPLPPWQQQQQQPPPPPPPSSSMASSTPLPWQQNTTTTTTSAGTGSIPPWQQQQAAAAASPGAPQMQGNPTMVPLPPGVQPPLPPGAPPPPPPPPPGSAGMMYAPPPPPPPPMDPSNFVTMMGMGVAGMPPFGMPPAPPPPPPQN

SEQ ID NO: 39363 - protein, 486 aa, Homo sapiens
VKLFGKRLEGPMAAKSQPNIPKAKSLDGVTNDRTASQGQWGRAWEVDWFSLASVIFLLLFAPFIVYYFIMACDQYSCALTGPVVDIVTGHARLSDIWAKTPPITRKAAQLYTLWVTFQVLLYTSLPDFCHKFLPGYVGGIQEGAVTPAGVVNKYQINGLQAWLLTHLLWFANAHLLSWFSPTIIFDNWIPLLWCANILGYAVSTFAMVKGYFFPTSARDCKFTGNFFYNYMMGIEFNPRIGKWFDFKLFFNGRPGIVAWTLINLSFAAKQRELHSHVTNAMVLVNVLQAIYVIDFFWNETWYLKTIDICHDHFGWYLGWGDCVWLPYLYTLQGLYLVYHPVQLSTPHAVGVLLLGLVGYYIFRVANHQKDLFRRTDGRCLIWGRKPKVIECSYTSADGQRHHSKLLVSGFWGVARHFNYVGDLMGSLAYCLACGGGHLLPYFYIIYMAILLTHRCLRDEHRCASKYGRDWERYTAAVPYRLLPGIF

SEQ ID NO: 39364 - protein, 10 aa, Homo sapiens
LPLPLPHLRS

SEQ ID NO: 39365 - protein, 6 aa, Homo sapiens
VETASP

SEQ ID NO: 39366 - protein, 498 aa, Homo sapiens
IPTYHSTDFEVHRNWLAITHSLPISQWYYEATSEWTLDYPPFFAWFEYILSHVAKYFDQEMLNVHNLNYSSSRTLLFQRFSVIFMDVLFVYAVRECCKCIDGKKVGKELTEKPKFILSVLLLWNFGLLIVDHIHFQYNGFLFGLMLLSIARLFQKRHMEGAFLFAVLLHFKHIYLYVAPAYGVYLLRSYCFTANKPDGSIRWKSFSFVRVISLGLVVFLVSALSLGPFLALNQLPQVFSRLFPFKRGLCHAYWAPNFWALYNALDKVLSVIGLKLKFLDPNNIPKASMTSGLVQQFQHTVLPSVTPLATLICTLIAILPSIFCLWFKPQGPRGFLRCLTLCALSSFMFGWHVHEKAILLAILPMSLLSVGKAGDASIFLILTTTGHYSLFPLLFTAPELPIKILLMLLFTIYSISSLKTLFRKEKPLFNWMETFYLLGLGPLEVCCEFVFPFTSWKVKYPFIPLLLTSVYCAVGITYAWFKLYVSVLIDSAIGKTKKQ

SEQ ID NO: 39367 - protein, 19 aa, Homo sapiens
MPHCQETGAGRFSDKISLS

SEQ ID NO: 39368 - protein, 45 aa, Homo sapiens
MNSMEKAHKETVEQLQAKNRELLKQVAALSKGKKFDKSGSILTSP

SEQ ID NO: 39369 - protein, 65 aa, Homo sapiens
KKKRLVQSPNSCFMDVKCPGCYKIITVFSHAQTVVLCVGCSTVLCQPTGGKARLTEGCSFRRKQH

SEQ ID NO: 39370 - protein, 141 aa, Homo sapiens [sequence omitted]

SEQ ID NO: 39371 - protein, 453 aa, Homo sapiens
LLPSRTSPTPGTMKAAVDLKPTLTIIKTEKVDLELFPSPDMECADVPLLTPSSKEMMSQALKATFSGFTKEQQRLGIPKDPRQWTETHVRDWVMWAVNEFSLKGVDFQKFCMNGAALCALGKDCFLELAPDFVGDILWEHLEILQKEDVKPYQVNGVNPAYPESRYTSDYFISYGIEHAQCVPPSEFSEPSFITESYQTLHPISSEELLSLKYENDYPSVILRDPLQTDTLQNDYFAIKQEVVTPDNMCMGRTSRGKLGGQDSFESIESYDSCDRLTQSWSSQSSFNSLQRVPSYDSFDSEDYPAALPNHKPKGTFKDYVRDRADLNKDKPVIPAAALAGYTGSGPIQLWQFLLELLTDKSCQSFISWTGDGWEFKLSDPDEVARRWGKRKNKPKMNYEKLSRGLRYYYDKNIIHKTAGKRYVYRFVCDLQSLLGYTPEELHAMLDVKPDADE

SEQ ID NO: 39372 - protein, 92 aa, Homo sapiens
KWSKGKVRDKLNNLVLFDKATYDKLCKEVPNYKLITPAVVSERLKIRGSLARAALQELLSKGLIKLVSKHRAQVIYTRNTKGGDAPAAGEDA

SEQ ID NO: 39373 - protein, 241 aa, Homo sapiens
LQSVGIVRTKVPCSVTMSRPRKRLAGTSGSDKGLSGKRTKTENSGEALAKVEDSNPQKTSATKNCLKNLSSHWLMKSEPESRLEKGVDVKFSIEDLKAQPKQTTCWDGVRNYQARNFLRAMKLGEEAFFYHSNCKEPGIAGLMKIVKEAYPDHTQFEKNNPHYDPSSKEDNPKWSMVDVQFVRMMKRFIPLAELKSYHQAHKATGGPLKNMVLFTRQRLSIQPLTQEEFDFVLSLEEKEPS

SEQ ID NO: 39374 - protein, 59 aa, Homo sapiens
MWLLTVPHSPVDASQKKTPPAFPESPAAVPPTTTGGPQTQLCIYTASHHSHSTGAQQAH

SEQ ID NO: 39375 - protein, 23 aa, Homo sapiens
KGVITVKDGKTLNDELEIIGHEV

SEQ ID NO: 39376 - protein, 27 aa, Homo sapiens
IRRNPDTQWITKPVHKHREMCGLTSAG

SEQ ID NO: 39377 - protein, 121 aa, Homo sapiens
LRCIMKFQYKEDHPFEYRKKEGEKIRKKYPDRVPVIVEKAPKARVPDLDKRKYLVPSDLTVGQFYFLIRKRIHLRPEDALFFFVNNTIPPTSATMGQLYEDNHEEDYFLYVAYSDESVYGK

SEQ ID NO: 39378 - protein, 9 aa, Homo sapiens
MGMYTIIKE

SEQ ID NO: 39379 - protein, 125 aa, Homo sapiens
MLSRLLKEHQAKQNERKELQEKRRREAITAATCLTEALVDHLNVGVAQAYMNQRKLDHEVKTLQVQAAQFAKQTGQWIGMVENFNQALKEIGDVENWARSIELDMRTIATALEYVYKGQLQSAPS

SEQ ID NO: 39380 - protein, 354 aa, Homo sapiens
LAKLTRARGILRSIPTRGHGTGPCFPLLGPREPGSAFCRVPRPPLQGRADPTRWRFMENFQKVEKIGEGTYGVVYKARNKLTGEVVALKKIRLDTETEGVPSTAIREISLLKELNHPNIVKLLDVIHTENKLYLVFEFLHQDLKKFMDASALTGIPLPLIKSYLFQLLQGLAFCHSHRVLHRDLKPQNLLINTEGAIKLADFGLARAFGVPVRTYTHEVVTLWYRAPEILLGCKYYSTAVDIWSLGCIFAEMVTRRALFPGDSEIDQLFRIFRTLGTPDEVVWPGVTSMPDYKPSFPKWARQDFSKVVPPLDEDGRSLLSQMLHYDPNKRISAKAALAHPFFQDVTKPVPHLRL

SEQ ID NO: 39381 - protein, 442 aa, Homo sapiens
LPAPLLARAFARPLLEDRGDSDHSLWLGRETEAAAAQGKRGCSGGSRKMSGEDEQQEQTIAEDLVVTKYKMGGDIANRVLRSLVEASSSGVSVLSLCEKGDAMIMEETGKIFKKEKEMKKGIAFPTSISVNNCVCHFSPLKSDQDYILKEGDLVKIDLGVHVDGFIANVAHTFVVDVAQGTQVTGRKADVIKAAHLCAEAALRLVKPGNQNTQVTEAWNKVAHSFNCTPIEGMLSHQLKQHVIDGEKTIIQNPTDQQKKDHEKAEFEVHEVYAVDVLVSSGEGKAKDAGQRTTIYKRDPSKQYGLKMKTSRAFFSEVERRFDAMPFTLRAFEDEKKARMGVVECAKHELLQPFNVLYEKEGEFVAQFKFTVLLMPNGPMRITSGPFEPDLYKSEMEVQDAELKALLQSSASRKTQKKKKKKASKTAENATSGETLEENEAGD

SEQ ID NO: 39382 - protein, 330 aa, Homo sapiens
IVKVSLHPAVMSKSESPKEPEQLRKLFIGGLSFETTDESLRSHFEQWGTLTDCVVMRDPNTKRSRGFGFVTYATVEEVDAAMNARPHKVDGRVVEPKRAVSREDSQRPGAHLTVKKIFVGGIKEDTEEHHLRDYFEQYGKIEVIEIMTDRGSGKKRGFAFVTFDDHDSVDKIVIQKYHTVNGHNCEVRKALSKQEMASASSSQRGRSGSGNFGGGRGGGFGGNDNFGRGGNFSGRGGFGGSRGGGGYGGSGDGYNGFGNDGSNFGGGGSYNDFGNYNNQSSNFGPMKGGNFGGRSSGPYGGGGQYFAKPRNQGGYGGSSSSSSYGSGRRF

SEQ ID NO: 39383 - protein, 17 aa, Homo sapiens
MMRLLLWLMIPWKASMK

SEQ ID NO: 39384 - protein, 1216 aa, Homo sapiens
MTSSDKDFRFMATNDLMTELQKDSIKLDDDSERKVVKMILKLLEDKNGEVQNLAVKCLGPLVSKVKEYQVETIVDTLCTNMLSDKEQLRDISSIGLKTVIGELPPASSGSALAANVCKKITGRLTSAIAKQEDVSVQLEALDIMADMLSRQGGLLVNFHPSILTCLLPQLTSPRLAVRKRTIIALGHLVMSCGNIVFVDLIEHLLSELSKNDSMSTTRTYIQCIAAISRQAGHRIGEYLEKIIPLVVKFCNVDDDELREYCIQAFESFVRRCPKEVYPHVSTIINICLKYLTYDPNYNYDDEDEDENAMDADGGDDDDQGSDDEYSDDDDMSWKVRRAAAKCLDAVVSTRHEMLPEFYKTVSPALISRFKEREENVKADVFHAYLSLLKQTRPVQSWLCDPDAMEQGETPLTMLQSQVPNIVKALHKQMKEKSVKTRQCCFNMLTELVNVLPGALTQHIPVLVPGIIFSLNDKSSSSNLKIDALSCLYVILCNHSPQVFHPHVQALVPPVVACVGDPFYKITSEALLVTQQLVKVIRPLDQPSSFDATPYIKDLFTCTIKRLKAADIDQEVKERAISCMGQIICNLGDNLGSDLPNTLQIFLERLKNEITRLTTVKALTLIAGSPLKIDLRPVLGEGVPILASFLRKNQRALKLGTLSALDILIKNYSDSLTAAMIDAVLDELPPLISESDMHVSQMAISFLTTLAKVYPSSLSKISGSILNELIGLVRSPLLQGGALSAMLDFFQALVVTGTNNLGYMDLLRMLTGPVYSQSTALTHKQSYYSIAKCVAALTRACPKEGPAVVGQFIQDVKNSRSTDSIRLLALLSLGEVGHHIDLSGQLELKSVILEAFSSPSEEVKSAASYALGSISVGNLPEYLPFVLQEITSQPKRQYLLLHSLKEIISSASVVGLKPYVENIWALLLKHCECAEEGTRNVVAECLGKLTLIDPETLLPRLKGYLISGSSYARSSVVTAVKFTISDHPQPIDPLLKNCIGDFLKTLEDPDLNVRRVALVTFNSAAHNKPSLIRDLLDTVLPHLYNETKVRKELIREVEMGPFKHTVDDGLDIRKAAFECMYTLLDSCLDRLDIFEFLNHVEDGLKDHYDIKMLTFLMLVRLSTLCPSAVLQRLDRLVEPLRATCTTKVKANSVKQEFEKQDELKRSAMRAVAALLTIPEAEKSPLMSEFQSQISSNPELAAIFESIQKDSSSTNLESMDTS

SEQ ID NO: 39385 - protein, 5 aa, Homo sapiens
MAGSW

SEQ ID NO: 39386 - protein, 124 aa, Homo sapiens
LAATPAEIMNQTDKNQQEIPSYLNDEPPEGSMKDHPQQQPGMLSRVTGGIFSVTKGAVGATIGGVAWIGGKSLEVTKTAVTTVPSMGIGLVKGGVSAVAGGVTAVGSAVVNKVPLTGKKKDKSD

SEQ ID NO: 39387 - protein, 362 aa, Homo sapiens
KMFSSVAHLARANPFNTPHLQLVHDGLGDLRSSSPGPTGQPRRPRNLAAAAVEEYSCEFGSAKYYALCGFGGVLSCGLTHTAVVPLDLVKCRMQVDPQKYKGIFNGFSVTLKEDGVRGLAKGWAPTFLGYSMQGLCKFGFYEVFKVLYSNMLGEENTYLWRTSLYLAASASAEFFADIALAPMEAAKVRIQTQPGYANTLRDAAPKMYKEEGLKAFYKGVAPLWMRQIPYTMMKFACFERTVEALYKFVVPKPRSECSKPEQLVVTFVAGYIAGVFCAIVSHPADSVVSVLNKEKGSSASLVLKRLGFKGVWKGLFARIIMIGTLTALQWFIYDSVKVYFRLPRPPPPEMPESLKKKLGLTQ

SEQ ID NO: 39388 - protein, 267 aa, Homo sapiens
LQEPGDMAAAVPRAAFLSPLLPLLLGFLLLSAPHGGSGLHTKGALPLDTVTFYKVIPKSKFVLVKFDTQYPYGEKQDEFKRLAENSASSDDLLVAEVGISDYGDKLNMELSEKYKLDKESYPVFYLFRDGDFENPVPYTGAVKVGAIQRWLKGQGVYLGMPGCLPVYDALAGEFIRASGVEARQALLKQGQDNLSSVKETQKKWAEQYLKIMGKILDQGEDFPASEMTRIARLIEKNKMSDGKKEELQKSLNILTAFQKKGAEKEEL

SEQ ID NO: 39389 - protein, 802 aa, Homo sapiens
RALWVLGLCCVLLTFGSVRADDEVDVDGTVEEDLGKSREGSRTDDEVVQREEEAIQLDGLNASQIRELREKSEKFAFQAEVNRMMKLIINSLYKNKEIFLRELISNASDALDKIRLISLTDENALSGNEELTVKIKCDKEKNLLHVTDTGVGMTREELVKNLGTIAKSGTSEFLNKMTEAQEDGQSTSELIGQFGVGFYSAFLVADKVIVTSKHNNDTQHIWESDSNEFSVIADPRGNTLGRGTTITLVLKEEASDYLELDTIKNLVKKYSQFINFPIYVWSSKTETVEEPMEEEEAAKEEKEESDDEAAVEEEEEEKKPKTKKVEKTVWDWELMNDIKPIWQRPSKEVEEDEYKAFYKSFSKESDDPMAYIHFTAEGEVTFKSILFVPTSAPRGLFDEYGSKKSDYIKLYVRRVFITDDFHDMMPKYLNFVKGVVDSDDLPLNVSRETLQQHKLLKVIRKKLVRKTLDMIKKIADDKYNDTFWKEFGTNIKLGVIEDHSNRTRLAKLLRFQSSHHPTDITSLDQYVERMKEKQDKIYFMAGSSRKEAESSPFVERLLKKGYEVIYLTEPVDEYCIQALPEFDGKRFQNVAKEGVKFDESEKTKESREAVEKEFEPLLNWMKDKALKDKIEKAVVSQRLTESPCALVASQYGWSGNMERIMKAQAYQTGKDISTNYYASQKKTFEINPRHPLIRDMLRRIKEDEDDKTVLDLAVVLFETATLRSGYLLPDTKAYGDRIERMLRLSLNIDPDAKVEEEPEEEPEETAEDTTEDTEQDEDEEMDVGTDEEEETAKESTAEKDEL

SEQ ID NO: 39390 - protein, 254 aa, Homo sapiens
MAAYKLVLIRHGESAWNLENRFSGWYDADLSPAGHEEAKRGGQALRDAGYEFDICFTSVQKRAIRTLWTVLDAIDQMWLPVVRTWRLNERHYGGLTGLNKAETAAKHCEAQVKIWRRSYDVPPPPMEPDHPFYSNISKDRRYADLTEDQLPSCESLKDTIARALPFWNEEIVPQIKEGKRVLIAAHGNSLRGIVKHLEGLSEEAIMELNLPTGIPIVYELDKNLKPIKPMQFLGDEETVRKAMEAVAAQGKAKK

SEQ ID NO: 39391 - protein, 534 aa, Homo sapiens
LAAETDLPVVFVKQRKIGGHGPTLKAYQEGRLQKLLKMNGPEDLPKSYDYDLIIIGGGSGGLAAAKEAAQYGKKVMVLDFVTPTPLGTRWGLGGTCVNVGCIPKKLMHQAALLGQALQDSRNYGWKVEETVKHDWDRMIEAVQNHIGSLNWGYRVALREKKVVYENAYGQFIGPHRIKATNNKGKEKIYSAERFLIATGERPRYLGIPGDKEYCISSDDLFSLPYCPGKTLVVGASYVALECAGFLAGIGLDVTVMVRSILLRGFDQDMANKIGEHMEEHGIKFIRQFVPIKVEQIEAGTPGRLRVVAQSTNSEEIIEGEYNTVMLAIGRDACTRKIGLETVGVKINEKTGKIPVTDEEQTNVPYIYAIGDILEDKVELTPVAIQAGRLLAQRLYAGSTVKCDYENVPTTVFTPLEYGACGLSEEKAVEKFGEENIEVYHSYFWPLEWTIPSRDNNKCYAKIICNTKDNERVVGFHVLGPNAGEVTQGFAAALKCGLTKKQLDSTIGIHPVCAEVFTTLSVTKRSGASILQAGC

SEQ ID NO: 39392 - protein, 39 aa, Homo sapiens
RNIIHGSDSVKSAEKEISLRFKPEELVDYKSCAHDWVYE

SEQ ID NO: 39393 - protein, 295 aa, Homo sapiens
VAAMLGAWAVEGTAVALLRLLLLLLPPAIRGPGLGVAGVAGAAGAGLPESVIWAVNAGGEAHVDVHGIHFRKDPLEGRVGRASDYGMKLPILRSNPEDQILYQTERYNEETFGYEVPIKEEGDYVLVLKFAEVYFAQSQQKVFDVRLNGHVVVKDLDIFDRVGHSTAHDEIIPMSIRKGKLSVQGEVSTFTGKLYIEFVKGYYDNPKVCALYIMAGTVDDVPKLQPHPGLEKKEEEEEEEEYDEGSNLKKQTNKNRVQSGPRTPNPYASDNSSLMFPILVAFGVFIPTLFCLCRL

SEQ ID NO: 39394 - protein, 161 aa, Homo sapiens
IYSIDFTRFKIRDLETGTVLFEIAKPCVSDQEEDEEEGGGDVDISAGRFVRYQFTPAFLRLRTVGATVEFTVGDKPVSNFRMIERHYFREHLLKNFDFDFGFCIPSSRNTCEHIYEFPQLSEDVIRLMIENPYETRSDSFYFVDNKLIMHNKADYAYNGGQ

SEQ ID NO: 39395 - protein, 1102 aa, Homo sapiens
LGEGARGDSAPGEAEAAARGGGESPSAPGLPGWHEPAAGVRGGGEEAAGTGGEAGRAPEAMENAHTKTVEEVLGHFGVNESTGLSLEQVKKLKERWGSNELPAEEGKTLLELVIEQFEDLLVRILLLAACISFVLAWFEEGEETITAFVEPFVILLILVANAIVGVWQERNAENAIEALKEYEPEMGKVYRQDRKSVQRIKAKDIVPGDIVEIAVGDKVPADIRLTSIKSTTLRVDQSILTGESVSVIKHTDPVPDPRAVNQDKKNMLFSGTNIAAGKAMGVVVATGVNTEIGKIRDEMVATEQERTPLQQKLDEFGEQLSKVISLICIAVWIINIGHFNDPVHGGSWIRGAIYYFKIAVALAVAAIPEGLPAVITTCLALGTRRMAKKNAIVRSLPSVETLGCTSVICSDKTGTLTTNQMSVCRMFILDRVEGDTCSLNEFTITGSTYAPIGEVHKDDKPVNCHQYDGLVELATICALCNDSALDYNEAKGVYEKVGEATETALTCLVEKMNVFDTELKGLSKIERANACNSVIKQLMKKEFTLEFSRDRKSMSVYCTPNKPSRTSMSKMFVKGAPEGVIDRCTHIRVGSTKVPMTSGVKQKIMSVIREWGSGSDTLRCLALATHDNPLRREEMHLEDSANFIKYETNLTFVGCVGMLDPPRIEVASSVKLCRQAGIRVIMITGDNKGTAVAICRRIGIFGQDEDVTSKAFTGREFDELNPSAQRDACLNARCFARVEPSHKSKIVEFLQSFDEITAMTGDGVNDAPALKKAEIGIAMGSGTAVAKTASEMVLADDNFSTIVAAVEEGRAIYNNMKQFIRYLISSNVGEVVCIFLTAALGFPEALIPVQLLWVNLVTDGLPATALGFNPPDLDIMNKPPRNPKEPLISGWLFFRYLAIGCYVGAATVGAAAWWFIAADGGPRVSFYQLSHFLQCKEDNPDFEGVDCAIFESPYPMTMALSVLVTIEMCNALNSLSENQSLLRMPPWENIWLVGSICLSMSLHFLILYVEPLPLIFQITPLNVTQWLMVLKISLPVILMDETLKFVARNYLEPGKECVQPATKSCSFSACTDGISWPFVLLIMPLVIWVYSTDTNFSDMFWS

SEQ ID NO: 39396 - protein, 235 aa, Homo sapiens
LLLLLLLLLGLLAPGAQGARGRGGAEKNSYRRTVNTFSQSVSSLFGEDNVRAAQKFLARLTERFVLGVDMFVETLWKVWTELLDVLGLDVSNLSQYFSPASVSSSPARALLLVGVVLLAYWFLSLTLGFTFSVLHVVFGRFFWIVRVVLFSMSCVYILHKYEGEPENAVLPLCFVVAVYFMTGPMGFYWRSSPSGPSNPSNPSVEEKLEHLEKQVRLLNIRLNRVLESLDRSKDK

SEQ ID NO: 39397 - protein, 84 aa, Homo sapiens; identical to SEQ ID NO: 19782

SEQ ID NO: 39398 - protein, 16 aa, Homo sapiens
MVRLWILPEDVEKTCC

SEQ ID NO: 39399 - protein, 13 aa, Homo sapiens
KVTKSAQKAQKAR

SEQ ID NO: 39400 - protein, 278 aa, Homo sapiens
TMFPFYSCWRTGLLLLLLAVAVRESWQTEEKTCDLVGEKGKESEKELALVKRLKPLFNKSFESTVGQGSDTYIYIFRVCREAGNHTSGAGLVQINKSNGKETVVGRLNETHIFNGSNWIMLIYKGGDEYDNHCGKEQRRAVVMISCNRHTLADNFNPVSEERGKVQDCFYLFEMDSSLACSPEISHLSVGSILLVTFASLVAVYVVGGFLYQRLVVGAKGMEQFPHLAFWQDLGNLVADGCDFVCRSKPRNVPAAYRGVGDDQLGEESEERDDHLLPM

SEQ ID NO: 39401 - protein, 381 aa, Homo sapiens
LSESRGGGGMSEAGEATTTTTTTLPQAPTEAAAAAPQDPAPKSPVGSGAPQAAAPAPAAHVAGNPGGDAAPAATGTAAAASLATAAGSEDAEKKVLATKVLGTVKWFNVRNGYGFINRNDTKEDVFVHQTAIKKNNPRKYLRSVGDGETVEFDVVEGEKGAEAANVTGPDGVPVEGSRYAADRRRYRRGYYGRRRGPPRNYAGEEEEEGSGSSEGFDPPATDRQFSGARNQLRRPQYRPQYRQRRFPPYHVGQTFDRRSRVLPHPNRIQAGEIGEMKDGVPEGAQLQGPVHRNPTYRPRYRSRGPPRPRPAPAVGEAEDKENQQATSGPNQPSVRRGYRRPYNYRRRPRPPNAPSQDGKEAKAGEAPTENPAPPTQQSSAE

SEQ ID NO: 39402 - protein, 337 aa, Homo sapiens
LCKMATLKEKLIAPVAEEEATVPNNKITVVGVGQVGMACAISILGKSLADELALVDVLEDKLKGEMMDLQHGSLFLQTPKIVADKDYSVTANSKIVVVTAGVRQQEGESRLNLVQRNVNVFKFIIPQIVKYSPDCIIIVVSNPVDILTYVTWKLSGLPKHRVIGSGCNLDSARFRYLMAEKLGIHPSSCHGWILGEHGDSSVAVWSGVNVAGVSLQELNPEMGTDNDSENWKEVHKMVVESAYEVIKLKGYTNWAIGLSVADLIESMLKNLSRIHPVSTMVKGMYGIENEVFLSLPCILNARGLTSVINQKLKDDEVAQLKKSADTLWDIQKDLKDL

SEQ ID NO: 39403 - protein, 21 aa, Homo sapiens
LAGTVPVIFLGLFGVLLKGGD

SEQ ID NO: 39404 - protein, 5 aa, Homo sapiens
MNAFH

SEQ ID NO: 39405 - protein, 91 aa, Homo sapiens
IEAIKESKNGKKIGVFSKDKFPGEFMKSWNDCLNKEGFDKIDISAVVAYTVAVREDGELKLMKKAAGITSEVFNKFFKERVMEIVDADEKV

SEQ ID NO: 39406 - protein, 19 aa, Homo sapiens
LNLQNAFRIIKEVQKRYKT

SEQ ID NO: 39407 - protein, 32 aa, Homo sapiens
MITGTSQADCAVLIVAASVGEFEAGISKNGQT

SEQ ID NO: 39408 - protein, 48 aa, Homo sapiens
MHPSSSVVIYRRRMEKDVPMLPQSQRRKMGCPSVLNMSVGMPWHFMLK

SEQ ID NO: 39409 - protein, 21 aa, Homo sapiens
KNNMFECFSRQVITGIYFLFF

SEQ ID NO: 39410 - protein, 7 aa, Homo sapiens
MYLASWW

SEQ ID NO: 39411 - protein, 50 aa, Homo sapiens [sequence omitted]

SEQ ID NO: 39412 - protein, 39 aa, Homo sapiens
IAFCHLSLYFRRYLLSVYCVPGTISMCIEKPWKAIQQYI

SEQ ID NO: 39413 - protein, 509 aa, Homo sapiens
VLSMKKAEMGRFSISPDEDSSSYSSNSDFNYSYPTKQAALKSHYADVDPENQNFLLESNLGKKKYETEFHPGTTSFGMSVFNLSNAIVGSGILGLSYAMANTGIALFIILLTFVSIFSLYSVHLLLKTANEGGSLLYEQLGYKAFGLVGKLAASGSITMQNIGAMSSYLFIVKYELPLVIQALTNIEDKTGLWYLNGNYLVLLVSLVVILPLSLFRNLGYLGYTSGLSLLCMVFFLIVVICKKFQVPCPVEAALIINETINTTLTQPTALVPALSHNVTENDSCRPHYFIFNSQTVYAVPILIFSFVCHPAVLPIYEELKDRSRRRMMNVSKISFFAMFLMYLLAALFGYLTFYEHVESELLHTYSSILGTDILLLIVRLAVLMAVTLTVPVVIFPIRSSVTHLLCASKDFSWWRHSLITVSILAFTNLLVIFVPTIRDIFGFIGASAASMLIFILPSAFYIKLVKKEPMKSVQKIGALFFLLSGVLVMTGSMALIVLDWVHNAPGGGH

SEQ ID NO: 39414 - protein, 5 aa, Homo sapiens
MMAVT

SEQ ID NO: 39415 - protein, 22 aa, Homo sapiens
MATPYVTDETGGVGTAKPLPSF

SEQ ID NO: 39416 - protein, 31 aa, Homo sapiens
LGLPQLGWLVLGLGLELCLGASSLVMPGTLL

SEQ ID NO: 39417 - protein, 233 aa, Homo sapiens
TLSLGLSAAILVPRSLHKMPGEATETVPATEQELPQPQAETGSGTESDSDESVPELEEQDSTQATTQQAQLAAAAEIDEEPVSKAKQSRSEKKARKAMSKLGLRQVTGVTRVTIRKSKNILFVITKPDVYKSPASDTYIVFGEAKIEDLSQQAQLAAAEKFKVQGEAVSNIQENTQTPTVQEESEEEEVDETGVEVKDIELVMSQANVSRAKAVRALKNNSNDIVNAIMELTM

SEQ ID NO: 39418 - protein, 45 aa, Homo sapiens
MLSRVWKHLTTKCYPCENSYSTRGSASVLYQHFCLQHCTSSATSS

SEQ ID NO: 39419 - protein, 579 aa, Homo sapiens
LVGLSPFSYLCVPPSRPVPGSPRSLSAMRLLPLAPGRLRRGSPRHLPSCSPALLLLVLGGCLGVFGVAAGTRRPNVVLLLTDDQDEVLGGMTPLKKTKALIGEMGMTFSSAYVPSALCCPSRASILTGKYPHNHHVVNNTLEGNCSSKSWQKIQEPNTFPAILRSMCGYQTFFAGKYLNEYGAPDAGGLEHVPLGWSYWYALEKNSKYYNYTLSINGKARKHGENYSVDYLTDVLANVSLDFLDYKSNFEPFFMMIATPAPHSPWTAAPQYQKAFQNVFAPRNKNFNIHGTNKHWLIRQAKTPMTNSSIQFLDNAFRKRWQTLLSVDDLVEKLVKRLEFTGELNNTYIFYTSDNGYHTGQFSLPIDKRQLYEFDIKVPLLVRGPGIKPNQTSKMLVANIDLGPTILDIAGYDLNKTQMDGMSLLPILRGASNLTWRSDVLVEYQGEGRNVTDPTCPSLSPGVSQCFPDCVCEDAYNNTYACVRTMSALWNLQYCEFDDQEVFVEVYNLTADPDQITNIAKTIDPELLGKMNYRLMMLQSCSGPTCRTPGVFDPGYRFDPRLMFSNRGSVRTRRFSKHLL

SEQ ID NO: 39420 - protein, 30 aa, Homo sapiens
ILSRRIANKMGYWENLFSGTEWRHQGVGAL

SEQ ID NO: 39421 - protein, 88 aa, Homo sapiens
ITLKMKGWGWLALLLGALLGTAWARRSQDLHCGACRALVDELEWEIAQVDPKKTIQMGSFRINPDGSQSVVEVTVTVPPNKVAHSGFG

SEQ ID NO: 39422 - protein, 20 aa, Homo sapiens
RKKRMRRLKRKRRKMRQRSK

SEQ ID NO: 39423 - protein, 254 aa, Homo sapiens; identical to SEQ ID NO: 8870

SEQ ID NO: 39424 - protein, 13 aa, Homo sapiens
MAKSKNHTTHNQS

SEQ ID NO: 39425 - protein, 74 aa, Homo sapiens
IKKPRSQRYESLKGVDPKFLRNMRFAKKHNKKGLKKMQANNAKAMSARAEAIKALVKPKEVKPKIPKGVSHKLD

SEQ ID NO: 39426 - protein, 330 aa, Homo sapiens
LTYKMKQDASRNAAYTVDCEDYVHVVEFNPFENGDSGNLIAYGGNNYVVIGTCTFQEEEADVEGIQYKTLRTFHHGVRVDGIAWSPETRLDSLPPVIKFCTSAADMKIRLFTSDLQDKNEYKVLEGHTDFINGLVFDPKEGQEIASVSDDHTCRIWNLEGVQTAHFVLHSPGMSVCWHPEETFKLMVAEKNGTIRFYDLLAQQAILSLESEQVPLMSAHWCLKNTFKVGAVAGNDWLIWDITRSSYPQNKRPVHMDRACLFRWSTISENLFATTGYPGKMASQFQIHHLGHPQPILMGSVAVGSGLSWHRTLPLCVIGGDHKLLFWVTEV

SEQ ID NO: 39427 - protein, 74 aa, Homo sapiens
LPTMPAGVPMSTYLKMFAASLLAMCAGAEVVHRYYRPDLTIPEIPPKRGELKTELLGLKERKHKPQVSQQEELK

SEQ ID NO: 39428 - protein, 170 aa, Homo sapiens
MDPDTKLIGNMALLPIRSQFKGPAPRETKDTDIVDEAIYYFKANVFFKNYEIKNEADRTLIYITLYISECLKKLQKCNSKSQGEKEMYTLGITNFPIPGEPGFPLNAIYAKPANKQEDEVMRAYLQQLRQETGLRLCEKVFDPQNDKPSKWWTCFVKRQFMNKSLSGPGQ

SEQ ID NO: 39429 - protein, 187 aa, Homo sapiens
RMAGHRLVLVLGDLHIPHRCNSLPAKFKKLLVPGKIQHILCTGNLCTKESYDYLKTLAGDVHIVRGDFDENLNYPEQKVVTVGQFKIGLIHGHQVIPWGDMASLALLQRQFDVDILISGHTHKFEAFEHENKFYINPGSATGAYNALETNIIPSFVLMDIQASTVVTYVYQLIGDDVKVERIEYKKP

SEQ ID NO: 39430 - protein, 5 aa, Homo sapiens
MSKAN

SEQ ID NO: 39431 - protein, 318 aa, Homo sapiens
VMPREDRATWKSNYFLKIIQLLDDYPKCFIVGADNVGSKQMQQIRMSLRGKAVVLMGKNTMMRKAIRGHLENNPALEKLLPHIRGNVGFVFTKEDLTEIRDMLLANKVPAAARAGAIAPCEVTVPAQNTGLGPEKTSFFQALGITTKISRGTIEILSDVQLIKTGDKVGASEATLLNMLNISPFSFGLVIQQVFDNGSIYNPEVLDITEETLHSRFLEGVRNVASVCLQIGYPTVASVPHSIINGYKRVLALSVETDYTFPLAEKVKAFLADPSAFVAAAPVAAATTAAPAAAAAPAKVEAKEESEESDEDMGFGLFD

SEQ ID NO: 39432 - protein, 11 aa, Homo sapiens
MRSIRGAIIAN

SEQ ID NO: 39433 - protein, 694 aa, Homo sapiens
VDRCDRHLTMQIFVKTLTGKTITLEVEPSDTIENVKAKIQDKEGIPPDQQRLIFAGKQLEDGRTLSDYNIQKESTLHLVLRLRGGMQIFVKTLTGKTITLEVEPSDTIENVKAKIQDKEGIPPDQQRLIFAGKQLEDGRTLSDYNIQKESTLHLVLRLRGGMQIFVKTLTGKTITLEVEPSDTIENVKAKIQDKEGIPPDQQRLIFAGKQLEDGRTLSDYNIQKESTLHLVLRLRGGMQIFVKTLTGKTITLEVEPSDTIENVKAKIQDKEGIPPDQQRLIFAGKQLEDGRTLSDYNIQKESTLHLVLRLRGGMQIFVKTLTGKTITLEVEPSDTIENVKAKIQDKEGIPPDQQRLIFAGKQLEDGRTLSDYNIQKESTLHLVLRLRGGMQIFVKTLTGKTITLEVEPSDTIENVKAKIQDKEGIPPDQQRLIFAGKQLEDGRTLSDYNIQKESTLHLVLRLRGGMQIFVKTLTGKTITLEVEPSDTIENVKAKIQDKEGIPPDQQRLIFAGKQLEDGRTLSDYNIQKESTLHLVLRLRGGMQIFVKTLTGKTITLEVEPSDTIENVKAKIQDKEGIPPDQQRLIFAGKQLEDGRTLSDYNIQKESTLHLVLRLRGGMQIFVKTLTGKTITLEVEPSDTIENVKAKIQDKEGIPPDQQRLIFAGKQLEDGRTLSDYNIQKESTLHLVLRLRGGV

SEQ ID NO: 39434 - protein, 15 aa, Homo sapiens
LLLPHQSGWCCGRRA

SEQ ID NO: 39435 - protein, 64 aa, Homo sapiens
LIPDSIGKDIEKTCQSIYPLHDVFVRKVKMLKKPKFELGKLMELHGEGSSSGKATGSKTGAKVE

SEQ ID NO: 39436 - protein, 144 aa, Homo sapiens
LRKMNARGLGSELKDSIPVTELSASGPFESHDLLRKGFSCVKNELLPSHPLELSEKNFQLNQDKMNFSTLRNIQGLFAPLKLQMEFKAVQQVQRLPFLSSSNLSLDVLRGNDETIGFEDILNDPSQSEVMGEPHLMVEYKLGLL

SEQ ID NO: 39437 - protein, 10 aa, Homo sapiens
MFLPFRISSM

SEQ ID NO: 39438 - protein, 824 aa, Homo sapiens
IAAVDLDEMSFTFTELQKNIEISVHKFFNLLKEIDTSTKVDNAMSRLLKKYDVLFALFSKLERTCELIYLTQPSSSISTEINSALVLKVSWITFLLAKGEVLQMEDDLVISFQLMLCVLDYFIKLSPPMLLKEPYKTAVIPINGSPRTPRRGQNRSARIAKQLENDTRIIEVLCKEHECNIDEVKNVYFKNFIPFMNSLGLVTSNGLPEVENLSKRYEEIYLKNKDLDARLFLDHDKTLQTDSIDSFETQRTPRKSNLDEEVNVIPPHTPVRTVMNTIQQLMMILNSASDQPSENLISYFNNCTVNPKESILKRVKDIGYIFKEKFAKAVGQGCVEIGSQRYKLGVRLYYRVMESMLKSEEERLSIQNFSKLLNDNIFHMSLLACALEVVMATYSRSTSQNLDSGTDLSFPWILNVLNLKAFDFYKVIESFIKAEGNLTREMIKHLERCEHRIMESLAWLSDSPLFDLIKQSKDREGPTDHLESACPLNLPLQNNHTAADMYLSPVRSPKKKGSTTRVNSTANAETQATSAFQTQKPLKSTSLSLFYKKVYRLAYLRLNTLCERLLSEHPELEHIIWTLFQHTLQNEYELMRDRHLDQIMMCSMYGICKVKNIDLKFKIIVTAYKDLPHAVQETFKRVLIKEEEYDSIIVFYNSVFMQRLKTNILQYASTRPPTLSPIPHIPRSPYKFPSSPLRIPGGNIYISPLKSPYKISEGLPTPTKMTPRSRILVSIGESFGTSEKFQKINQMVCNSDRVLKRSAEGSNPPKPLKKLRFDIEGSDEADGSKHLPGESKFQQKLAEMTSTRTRMQKQKMNDSMDTSNKEEK

SEQ ID NO: 39439 - protein, 6 aa, Homo sapiens
MEVSFS

SEQ ID NO: 39440 - skipped

SEQ ID NO: 39441 - protein, 173 aa, Homo sapiens
IMIIYRDLISHDEMFSDIYKIREIADGLCLEVEGKMVSRTEGNIDDSLIGGNASAEGPEGEGTESTVITGVDIVMNHHLQETSFTKEAYKKYIKDYMKSIKGKLEEQRPERVKPFMTGAAEQIKHILANFKNYQFFIGENMNPDGMVALLDYREDGVTPYMIFFKDGLEMEKC

SEQ ID NO: 39442 - protein, 914 aa, Homo sapiens
LTGRGCLCVLLSVRGTARPRGPEQNAARAESGGRRSRQGAGGRRPRPEAEADREPAMSVVGLDVGSQSCYIAVARAGGIETIANEFSDRCTPSVISFGSKNRTIGVAAKNQQITHANNTVSNFKRFHGRAFNDPFIQKEKENLSYDLVPLKNGGVGIKVMYMGEEHLFSVEQITAMLLTKLKETAENSLKKPVTDCVISVPSFFTDAERRSVLDAAQIVGLNCLRLMNDMTAVALNYGIYKQDLPSLDEKPRIVVFVDMGHSAFQVSACAFNKGKLKVLGTAFDPFLGGKNFDEKLVEHFCAEFKTKYKLDAKSKIRALLRLYQECEKLKKLMSSNSTDLPLNIECFMNDKDVSGKMNRSQFEELCAELLQKIEVPLYSLLEQTHLKVEDVSAVEIVGGATRIPAVKERIAKFFGKDISTTLNADEAVARGCALQCAILSPAFKVREFSVTDAVPFPISLIWNHDSEDTEGVHEVFSRNHAAPFSKVLTFLRRGPFELEAFYSDPQGVPYPEAKIGRFVVQNVSAQKDGEKSRVKVKVRVNTHGIFTISTASMVEKVPTEENEMSSEADMECLNQRPPENPDTDKNVQQDNSEAGTQPQVQTDAQQTSQSPPSPELTSEENKIPDADKANEKKVDQPPEAKKPKIKVVNVELPIEANLVWQLGKDLLNMYIETEGKMIMQDKLEKERNDAKNAVEEYVYEFRDKLCGPYEKFICEQDHQNFLRLLTETEDWLYEEGEDQAKQAYVDKLEELMKIGTPVKVRFQEAEERPKMFEELGQRLQHYAKIAADFRNKDEKYNHIDESEMKKVEKSVNEVMEWMNNVMNAQAKKSLDQDPVVRAQEIKTKIKELNNTCEPVVTQPKPKIESPKLERTPNGPNIDKKEEDLEDKNNFGAEPPHQNGECYPNEKNSVNMDLD

SEQ ID NO: 39443 - protein, 75 aa, Homo sapiens
LKPTRKFAYLGRLAHEVGWKYQAVTATLEEKRKEKAKIHYRKKKQLMRLRKQAEKNVEKKIDKYTEVLKTHGLLV

SEQ ID NO: 39444 - protein, 12 aa, Homo sapiens
VLKAQAQSQKAK

SEQ ID NO: 39445 - protein, 10 aa, Homo sapiens
LTRISMNQEN

SEQ ID NO: 39446 - protein, 24 aa, Homo sapiens
IAGGGVIPHIHKSLIGKKGQQKTV

SEQ ID NO: 39447 - protein, 115 aa, Homo sapiens [sequence omitted]

SEQ ID NO: 39448 - protein, 9 aa, Homo sapiens
LSFSLKTQD

SEQ ID NO: 39449 - protein, 153 aa, Homo sapiens
VTIFGCPSREKGRMPLESSSSMPLSFPSLLPSVPHNTNPSPPLMSYITSQEMKCILHWFANWSGPQRERFLEDLVAKAVPEKLQPLLDSLEQLSVSGADRPPSIFECQLHLWDQWFRGWAEQERNEFVRQLEFSEPDFVAKFYQAVAATAGKD

SEQ ID NO: 39450 - protein, 279 aa, Homo sapiens
VPGAGGEAGEGAPGGAGDYGNGLESEELEPEELLLEPEPEPEPEEEPPRPRAPPGAPGPGPGSGAPGSQEEEEEPGLVEGDPGDGAIEDPELEAIKARVREMEEEAEKLKELQNEVEKQMNMSPPPGNAGPVIMSIEEKMEADARSIYVGNVDYGATAEELEAHFHGCGSVNRVTILCDKFSGHPKGFAYIEFSDKESVRTSLALDESLFRGRQIKVIPKRTNRPGISTTDRGFPRARYRARTTNYNSSRSRFYSGFNSRPRGRVYRGRARATSWYSPY

SEQ ID NO: 39451 - protein, 291 aa, Homo sapiens
VMAVTAQVKSLTQKVQAGAYPTEKGLSFLEVKDQLLLMYLMDLTHLILDKASGGSLQGHDAVLRLVEIRTVLEKLRPLDQKLKYQIDKLIKTAVTGSLSENDPLRFKPHPSNMMSKLSSEDEEEDEAEDDQSEASGKKSVKGVSKKYVPPRLVPVHYDETEAEREKKRLERAKRRALSSSVIRELKEQYSDAPEEIRDARHPHVTRQSQEDQHRINYEESMMVRLSVSKREKGRRKRANVMSSQLHSLTHFSDISALTGGTVHLDEDQNPIKKRKKIPQKGRKKKGFRRRR

SEQ ID NO: 39452 - protein, 23 aa, Homo sapiens
KDIRKFLDGIYVSEKGTVQPADE

SEQ ID NO: 39453 - protein, 24 aa, Homo sapiens
KKKVVDPFSKKDWYDVKALAMFNI

SEQ ID NO: 39454 - protein, 39 aa, Homo sapiens
LHSVAHTVVLVDNLGGTEAPIISYFCSLGCYVNSSDMLK

SEQ ID NO: 39455 - protein, 815 aa, Homo sapiens
KISSERRKEKSRDAARSRRSKESEVFYELAHQLPLPHNVSSHLDKASVMRLTISYLRVRKLLDAGDLDIEDDMKAQMNCFYLKALDGFVMVLTDDGDMIYISDNVNKYMGLTQFELTGHSVFDFTHPCDHEEMREMLTHRNGLVKKGKEQNTQRSFFLRMKCTLTSRGRTMNIKSATWKVLHCTGHIHVYDTNSNQPQCGYKKPPMTCLVLICEPIPHPSNIEIPLDSKTFLSRHSLDMKFSYCDERITELMGYEPEELLGRSIYEYYHALDSDHLTKTHHDMFTKGQVTTGQYRMLAKRGGYVWVETQATVIYNTKNSQPQCIVCVNYVVSGIIQHDLIFSLQQTECVLKPVESSDMKMTQLFTKVESEDTSSLFDKLKKEPDALTLLAPAAGDTIISLDFGSNDTETDDQQLEEVPLYNDVMLPSPNEKLQNINLAMSPLPTAETPKPLRSSADPALNQEVALKLEPNPESLELSFTMPQIQDQTPSPSDGSTRQSSPEPNSPSEYCFYVDSDMVNEFKLELVEKLFAEDTEAKNPFSTQDTDLDLEMLAPYIPMDDDFQLRSFDQLSPLESSSASPESASPQSTVTVFQQTQIQEPTANATTTTATTDELKTVTKDRMEDIKILIASPSPTHIHKETTSATSSPYRDTQSRTASPNRAGKGVIEQTEKSHPRSPNVLSVALSQRTTVPEEELNPKILALQNAQRKRKMEHDGSLFQAVGIGTLLQQPDDHAATTSLSWKRVKGCKSSEQNGMEQKTIILIPSDLACRLLGQSMDESGLPQLTSYDCEVNAPIQGSRNLLQGEELLRALDQVN

SEQ ID NO: 39456 - protein, 113 aa, Homo sapiens
MCGDCVEKEYPNRGNTCLENGSFLLNFTGCAVCSKRDFMLITNKSLKEEDGEEIVTYDPDLCKNCHHVIARHEYTFSIMDEFQEYTMLCLLCGKAEDTISILPDDPRQMTLLF

SEQ ID NO: 39457 - protein, 11 aa, Homo sapiens
MTLMVFLFKIK

SEQ ID NO: 39458 - protein, 5 aa, Homo sapiens
MFSIL

SEQ ID NO: 39459 - protein, 110 aa, Homo sapiens
KMAASAARGAAALRRSINQPVAFVRRIPWTAASSQLKEHFAQFGHVRRCILPFDKETGFHRGLGWVQFSSEEGLRNALQQENHIIDGVKVQVHTRRPKLPQTSDDEKKDF

SEQ ID NO: 39460 - protein, 16 aa, Homo sapiens
IYFYLGQVAILLFKSG

SEQ ID NO: 39461 - protein, 11 aa, Homo sapiens
KMAAVGKERRR

SEQ ID NO: 39462 - protein, 91 aa, Homo sapiens
VTGACCLFLAGKVEETPKKCKDIIKTARSLLNDVQFGQFGDDPKEEVMVLERILLQTIKFDLQVEHPYQFLLKYAKQLKGKKKVFRRIFSF

SEQ ID NO: 39463 - protein, 30 aa, Homo sapiens
MTKIYHPNVDKLGRICLDILKDEWSPALQI

SEQ ID NO: 39464 - protein, 117 aa, Homo sapiens
LRAVMSASVVSVISRFLEEYLSSTPQRLKLLDAYLLYILLTGALQFGYCLLVGTFPFNSFLSGFISCVGSFILAVCLRIQINPQNKADFQGISPERAFADFLFASTILHLVVMNFVG

SEQ ID NO: 39465 - protein, 10 aa, Homo sapiens
VCSPKLERRC

SEQ ID NO: 39466 - protein, 64 aa, Homo sapiens
MDPPFYLFTLSLIMRHHISSHSLGHHSHCPLPWMPSNVCLLVGDCEDPRIQYSWPRGPLLATGC

SEQ ID NO: 39467 - protein, 12 aa, Homo sapiens
IFLIFSYIFGFV

SEQ ID NO: 39468 - protein, 20 aa, Homo sapiens
VMMMMIMTLMIFNRIKIEFF

SEQ ID NO: 39469 - protein, 15 aa, Homo sapiens
LRRARCRALFLVFII

SEQ ID NO: 39470 - protein, 14 aa, Homo sapiens
VKVSAPNLLNVKRK

SEQ ID NO: 39471 - protein, 13 aa, Homo sapiens
VAEMEMRMDLPVS

SEQ ID NO: 39472 - protein, 6 aa, Homo sapiens
KMATAA

SEQ ID NO: 39473 - protein, 26 aa, Homo sapiens
LFPSWSSQNALMFLTLLCLTLLAEEL

SEQ ID NO: 39474 - protein, 39 aa, Homo sapiens
MEEFTHVCTRGDACFSQEQDSRLWSPHVVADCWRFFWSS

SEQ ID NO: 39475 - protein, 53 aa, Homo sapiens
MRKSKTPSLMTGRIFEDPGLGKILTSSKEEIQKALRLRQLDSADSFFLFFFFK

SEQ ID NO: 39476 - protein, 339 aa, Homo sapiens
RMTTTLVSATIFDLSEVLCKGNKMLNYSAPSAGGCLLDRKAVGTPAGGGFPRRHSVTLPSSKFHQNQLLSSLKGEPAPALSSRDSRFRDRSFSEGGERLLPTQKQPGGGQVNSSRYKTELCRPFEENGACKYGDKCQFAHGIHELRSLTRHPKYKTELCRTFHTIGFCPYGPRCHFIHNAEERRALAGARDLSADRPRLQHSFSFAGFPSAAATAAATGLLDSPTSITPPPILSADDLLGSPTLPDGTNNPFAFSSQELASLFAPSMGLPGGGSPTTFLFRPMSESPHMFDSPPSPQDSLSDQEGYLSSSSSSHSGSDSPTLDNSRRLPIFSRLSISDD

SEQ ID NO: 39477 - protein, 15 aa, Homo sapiens
KHSKSRDSFLKRVVK

SEQ ID NO: 39478 - protein, 138 aa, Homo sapiens
VARAGQKGYHHRTEINKKIYKIGQGYLIKDGKLIKNNASTDYDLSDKSINPLGGFVHYGEVTNDFVMLKGCVVGTKKRVLTLRKSLLVQTKRRALEKIDLKFIDTTSKFGHGRFQTMEEKKAFMGPLKKDRIAKEEGA

SEQ ID NO: 39479 - protein, 59 aa, Homo sapiens
KMLQSIIKNIWIPMKPYYTKVYQEIWIGMGLMGFIVYKIRAADKRSKALKASAPAPGHH

SEQ ID NO: 39480 - protein, 23 aa, Homo sapiens
KTLGVIFGVSWFLSQVAPNLDLQ

SEQ ID NO: 39481 - protein, 745 aa, Homo sapiens
VAVPLVLCGHLAKMPEETQTQDQPMEEEEVETFAFQAEIAQLMSLIINTFYSNKEIFLRELISNSSDALDKIRYESLTDPSKLDSGKELHINLIPNKQDRTLTIVDTGIGMTKADLINNLGTIAKSGTKAFMEALQAGADISMIGQFGVGFYSAYLVAEKVTVITKHNDDEQYAWESSAGGSFTVRTDTGEPMGRGTKVILHLKEDQTEYLEERRIKEIVKKHSQFIGYPITLFVEKERDKEVSDDEAEEKEDKEEEKEKEEKESEDKPEIEDVGSDEEEEKKDGDKKKKKKIKEKYIDQEELNKTKPIWTRNPDDITNEEYGEFYKSLTNDWEDHLAVKHFSVEGQLEFRALLFVPRRAPFDLFENRKKKNNIKLYVRRVFIMDNCEELIPEYLNFIRGVVDSEDLPLNISREMLQQSKILKVIRKNLVKKCLELFTELAEDKENYKKFYEQFSKNIKLGIHEDSQNRKKLSELLRYYTSASGDEMVSLKDYCTRMKENQKHIYYITGETKDQVANSAFVERLRKHGLEVIYMIEPIDEYCVQQLKEFEGKTLVSVTKEGLELPEDEEEKKKQEEKKTKFENLCKIMKDILEKKVEKVVVSNRLVTSPCCIVTSTYGWTANMERIMKAQALRDNSTMGYMAAKKHLEINPDHSIIETLRQKAEADKNDKSVKDLVILLYETALLSSGFSLEDPQTHANRIYRMIKLGLGIDEDDPTADDTSAAVTEEMPPLEGDDDTSRMEEVD

SEQ ID NO: 39482 - protein, 6 aa, Homo sapiens
MPDASV

SEQ ID NO: 39483 - protein, 25 aa, Homo sapiens [sequence omitted]

SEQ ID NO: 39484 - protein, 36 aa, Homo sapiens
IHLELRNRTPSDVKELVLDNSRSNEGKLEGLTDESE

SEQ ID NO: 39485 - protein, 1225 aa, Homo sapiens
LAVIFLCTLAGLLGARLPDFSKPLLGFEPRDTDIGSKLVVWRALQALTGPRKLLFLSPDLELNSSSSHNTLRPAPRGSAQESAVRPRRMVEPLEDRRQENFFCGPPEKSYAKLVFMSTSSGSLWNLHAIHSMCRMEQDQIRSHTSFGALCQRTAANQCCPSWSLGNYLAVLSNRSSCLDTTQADAARTLALLRTCALYYHSGALVPSCLGPGQNKSPRCAQVPTKCSQSSAIYQLLHFLLDRDFLSPQTTDYQVPSLKYSLLFLPTPKGASLMDIYLDRLATPWGLADNYTSVTGMDLGLKQELLRHFLVQDTVYPLLALVAIFFGMALYLRSLFLTLMVLLGVLGSLLVAFFLYQVAFRMAYFPFVNLAALLLLSSVCANHTLIFFDLWRLSKSQLPSGGLAQRVGRTMHHFGYLLLVSGLTTSAAFYASYLSRLPAVRCLALFMGTAVLVHLALTLVWLPASAVLHERYLARGCARRARGRWEGSAPRRLLLALHRRLRGLRRAAAGTSRLLFQRLLPCGVIKFRYIWICWFAALAAGGAYIAGVSPRLRLPTLPPPGGQVFRPSHPFERFDAEYRQLFLFEQLPQGEGGHMPVVLVWGVLPVDTGDPLDPRSNSSLVRDPAFSASGPEAQRWLLALCHRARNQSFFDTLQEGWPTLCFVETLQRWMESPSCARLGPDLCCGHSDFPWAPQFFLHCLKMMALEQGPDGTQDLGLRFDAHGSLAALVLQFQTNFRNSPDYNQTQLFYNEVSHWLAAELGMAPPGLRRGWFTSRLELYSLQHSLSTEPAVVLGLALALAFATLLLGTWNVPLSLFSVAAVAGTVLLTVGLLVLLEWQLNTAEALFLSASVGLSVDFTVNYCISYHLCPHPDRLSRVAFSLRQTSCATAVGAAALFAAGVLMLPATVLLYRKLGIILMMVKCVSCGFASFFFQSLCCFFGPEKNCGQILWPCAHLPWDAGTGDPGGEKAGRPRPGSVGGMPGSCSEQYELQPLARRRSPSFDTSTATSKLSHRPSVLSEDLQLHDGPCCSRPPPAPASPRELLLDHQAVFSQCPALQTSSPYKQAGPSPKTRARQDSQGEEAEPLPASPEAPAHSPKAKAADPPDGFCSSASTLEGLSVSDETCLSTSEPSARVPDSVGVSPDDLDDTGQPVLERGQLNGKRDTLWLALRETVYDPSLPASHHSSLSWKGRGGPGDGSPVVLPNSQPDLPDVWLRRPSTHTSGYSS

SEQ ID NO: 39486 - protein, 91 aa, Homo sapiens
LNAKYGSGVLPDAPKEMSKGQGKDKDLNSKSASDLSEDLFKVHDFDVKIDLQVPSSESKALAITSKAPPAKDGAPRRSLNLEDYKKRRGLI

SEQ ID NO: 39487 - protein, 88 aa, Homo sapiens
ISSDGHEFIVKREHALTSGTIKAMLSEFAENETNEVNFREIPSHVLSKVCMYFTYKVRYTNSSIEIPEFPIAPEIVLELLMAANFLDC

SEQ ID NO: 39488 - protein, 212 aa, Homo sapiens
IMDNLSSEEIQQRAHQITDESLESTRRILGLAIESQDAGIKTITMLDEQKEQLNRIEEGLDQINKDMRETEKTLTELNKCCGLCVCPCNRTKNFESGKAYKTTWGDGGENSPCNVVSKQPGPVTNGQLQQPTTGAASGGYIKRITNDAREDEMEENLTQVGSILGNLKDMALNIGNEIDAQNPQIKRITDKADTNRDRIDIANARAKKLIDS

SEQ ID NO: 39489 - protein, 19 aa, Homo sapiens
ISCFFAIVALIWDYMHPFP

SEQ ID NO: 39490 - protein, 188 aa, Homo sapiens
ISEKKKIAEKIKEKERQQKKRQEEIKKRLEEPEEPKVLTPEEQLADKLRLKKLQEESDLELAKETFGVNNAVYGIDAMNPSSRDDFTEFGKLLKDKITQYEKSLYYASFLEVLVRDVCISLEIDDLKKITNSLTVLCSEKQKQEKQSKAKKKKKGVVPGGGLKATMKDDLADYGGYDGGYVQDYEDFM

SEQ ID NO: 39491 - protein, 258 aa, Homo sapiens
KRLTKGGKKGAKKKVVDPFSKKDWYDVKAPAMFNIRNIGKTLVTRTQGTKIASDGLKGRVFEVSLADLQNDEVAFRKFKLITEDVQGKNCLTNFHGMDLTRDKMCSMVKKWQTMIEAHVDVKTTDGYLLRLFCVGFTKKRKNQIRKTSYAQHQQVRQIRKKMMEIMIREVQTNDLKEVVNKLIPDSIGKDIEKACQSIYPLHDVFVRKVKMLKKPKFELGKLMELHGEGSSSGKATGDETGAKVERADGYEPPVQESV

SEQ ID NO: 39492 - protein, 629 aa, Homo sapiens
LGYAGRNKHGRKHELLTKALHLLKAGCSPAVQMKIKELYRRRFPQKIMTPADLSIPNVHSSPMPATLSPSTIPQLTYDGHPASSPLLPVSLLGPKHELELPHLTSALHPVHPDIKLQKLPFYDLLDELIKPTSLASDNSQRFRETCFAFALTPQQVQQISSSMDISGTKCDFTVQVQLRFCLSETSCPQEDHFPPNLCVKVNTKPCSLPGYLPPTKNGVEPKRPSRPINITSLVRLSTTVPNTIVVSWTAEIGRNYSMAVYLVKQLSSTVLLQRLRAKGIRNPDHSRALIKEKLTADPDSEIATTSLRVSLLCPLGKMRLTIPCRALTCSHLQCFDATLYIQMNEKKPTWVCPVCDKKAPYEHLIIDGLFMEILKYCTDCDEIQFKEDGTWAPMRSKKEVQEVSASYNGVDGCLSSTLEHQVASHHQSSNKNKKVEVIDLTIDSSSDEEEEEPSAKRTCPSLSPTSPLNNKGILSLPHQASPVSRTPSLPAVDTSYINTSLIQDYRHPFHMTPMPYDLQGLDFFPFLSGDNQHYNTSLLAAAAAAVSDDQDLLHSSRFFPYTSSQMFLDQLSAGGSTSLPTTNGSSSGSNSSLVSSNSLRESHSHTVTNRSSTDTASIFGIIPDIISLD

SEQ ID NO: 39493 - protein, 218 aa, Homo sapiens
IMGSTVPRSASVLLLLLLLRRAEQPCGAELTFELPDNAKQCFHEEVEQGVKFSLDYQVITGGHYDVDCYVEDPQGNTIYRETKKQYDSFTYRAEVKGVYQFCFSNEFSTFSHKTVYFDFQVGDEPPILPDMGNRVTALTQMESACVTIHEALKTVIDSQTHYRLREAQDRARAEDLNSRVSYWSVGETIALFVVSFSQVLLLKSFFTEKRPISRAVHS

SEQ ID NO: 39494 - protein, 28 aa, Homo sapiens
MDLRRQPAPGRRARGLGGRAAAAPGRAL

SEQ ID NO: 39495 - protein, 64 aa, Homo sapiens
MAVTLSLLLGGRVCAAVTRCGFATRGVAGPGPIGREPDPDSDWEPEERELQEVERYRLLPGPSA

SEQ ID NO: 39496 - skipped

SEQ ID NO: 39497 - protein, 43 aa, Homo sapiens
IQPVSVKVGDKVLLPEYGGTKVVLDDKDYFLFRDGDILGKYID

SEQ ID NO: 39498 - protein, 426 aa, Homo sapiens
KMNAMLETPELPAVFDGVKLAAVAAVLYVIVRCLNLKSPTAPPDLYFQDSGLSRFLLKSCPLLTKEYIPPLIWGKSGHIQTALYGKMGRVRSPHPYGHRKFITMSDGATSTFDLFEPLAEHCVGDDITMVICPGIANHSEKQYIRTFVDYAQKNGYRCAVLNHLGALPNIELTSPRMFTYGCTWEFGAMVNYIKKTYPLTQLVVVGFSLGGNIVCKYLGETQANQEKVLCCVSVCQGYSALRAQETFMQWDQCRRFYNFLMADNMKKIILSHRQALFGDHVKKPQSLEDTDLSRLYTATSLMQIDDNVMRKFHGYNSLKEYYEEESCMRYLHRIYVPLMLVNAADDPLVHESLLTIPKSLSEKRENVMFVLPLHGGHLGFFEGSVLFPEPLTWMDKLVVEYANAICQWERNKLQCSDTEQVEADLE

SEQ ID NO: 39499 - protein, 65 aa, Homo sapiens
MKPARMSFVLPVQLFFVWIIMQQLLKPSSFIRLMQNSVILIPPRKEQAQLTLRTRKVPPTTPALR

SEQ ID NO: 39500 - protein, 65 aa, Homo sapiens
IMFLQYYLNEQGDRVYTLKKFDPMGQQTCSAHPARFSPDDKYSRHRITIKKRFKVLMTQQPRPVL

SEQ ID NO: 39501 - protein, 25 aa, Homo sapiens
IPQLQGYLRSVFALTNGIYPHKLVF

SEQ ID NO: 39502 - protein, 40 aa, Homo sapiens
LIGNTGIIFIMPTVVVMDVSLSMTRPVSIEGSEEYQRSTK

SEQ ID NO: 39503 - protein, 218 aa, Homo sapiens
LWMLRLSERNMKVLLAAALIAGSVFFLLLPGPSAADEKKKGPKVTVKVYFDLRIGDEDVGRVIFGLFGKTVPKTVDNFVALATGEKGFGYKNSKFHRVIKDFMIQGGDFTRGDGTGGKSIYGERFPDENFKLKHYGPGWVSMANAGKDTNGSQFFITTVKTAWLDGKHVVFGKVLEGMEVVRKVESTKTDSRDKPLKDVIIADCGKIEVEKPFAIAKE

SEQ ID NO: 39504 - protein, 766 aa, Homo sapiens
VKITDSEASKPKDGQDAIAQSPEKESKDYEMNANHKDGKKEDCVKGDPVEKEARESSKKAESGDKEKDTLKKGPSSTGASGQAKSSSKESKDSKTSSKDDKGSTSSTSGSSGSSTKNIWVSGLSSNTKAADLKNLFGKYGKVLSAKVVTNARSPGAKCYGIVTMSSSTEVSRCIAHLHRTELHGQLISVEKVKGDPSKKEMKKENDEKSSSRSSGDKKNTSDRSSKTQASVKKEEKRSSEKSEKKESKDTKKIEGKDEKNDNGASGQTSESIKKSEEKKRISSKSPGHMVILDQTKGDHCRPSRRGRYEKIHGRSKEKERASLDKKRDKDYRRKEILPFEKMKEQRLREHLVRFERLRRAMELRRRREIAERERRERERIRIIREREERERLQRERERLEIERQKLERERMERERLERERIRIEQERRKEAERIAREREELRRQQQQLRYEQEKRNSLKRPRDVDHRRDDPYWSENKKLSLDTDARFGHGSDYSRQQNRFNDFDHRERGRFPESSAVQSSSFERRDRFVGQSEGKKARPTARREDPSFERYPKNFSDSRRNEPPPPRNELRESDRREVRGERDERRTVIIHDRPDITHPRHPREAGPNPSRPTSWKSEGSMSTDKRETRVERPERSGREVSGHSVRGAPPGNRSSASGYGSREGDRGVITDRGGGSQHYPEERHVVERHGRDTSGPRKEWHGPPSQGPSYHDTRRMGDGRAGAGMITQHSSNASPINRIVQISGNSMPRGSGSGFKPFKGGPPRRF

SEQ ID NO: 39505 - protein, 25 aa, Homo sapiens
RMLAIKRCKHFELEGDKRKGQVIQF

SEQ ID NO: 39506 - protein, 307 aa, Homo sapiens
KEMTNQYGILFKQEQAHDDAIWSVAWGTNKKENSETVVTGSLDDLVKVWKWRDERLDLQWSLEGHQLGVVSVDISHTLPIAASSSLDAHIRLWDLENGKQIKSIDAGPVDAWTLAFSPDSQYLATGTHVGKVNIFGVESGKKEYSLDTRGKFILSIAYSPDGKYLASGAIDGIINIFDIATGKLLHTLEGHAMPIRSLTFSPDSQLLVTASDDGYIKIYDVQHANLAGTLSGHASWVLNVAFCPDDTHFVSSSSDKSVKVWDVGTRTCVHTFFDHQDQVWGVKYNGNGSKIVSVGDDQEIHIYDCPI

SEQ ID NO: 39507 - protein, 50 aa, Homo sapiens
LPVRSDAAAAVALSAPRWGRGAQAGSSENPLRRLPVPAGLRMPGRLICTY

SEQ ID NO: 39508 - protein, 192 aa, Homo sapiens [sequence omitted]

SEQ ID NO: 39509 - protein, 20 aa, Homo sapiens
VAPCTAAARAVAPDLFVFAA

SEQ ID NO: 39510 - protein, 151 aa, Homo sapiens
IVFSCILLYVVFQKLSARLRALRQRQLDRAAAAVEPDVVVKRQEALAAARLKMQEELNAQVEKHKEKLKQLEEEKRRQKIEMWDSMQEGKSYKGNAKKPQEEDSPGPSTSSVLKRKSDRKPLRGGGYNPLSGEGGGACSWRPGRRGPSSGG

SEQ ID NO: 39511 - protein, 29 aa, Homo sapiens
LHSPSEIVKQITSISIEPGVEVEVTIADA

SEQ ID NO: 39512 - protein, 12 aa, Homo sapiens
VWGMMVTLLTHV

SEQ ID NO: 39513 - protein, 180 aa, Homo sapiens
VPGPSSPPPPPPPRPAELAPSPPADMSESKSGPEYASFFAVMGASAAMVFSALGAAYGTAKSGTGIAAMSVMRPEQIMKSIIPVVMAGIIAIYGLVVAVLIANSLNDDISLYKSFLQLGAGLSVGLSGLAAGFAIGIVGDAGVRGTAQQPRLFVGMILILIFAEVLGLYGLIVALILSTK

SEQ ID NO: 39514 - protein, 1465 aa, Homo sapiens
MTPLNKTKTALGFLLWIVCWADLFYSFWERSRGIFLAPVFLVSPTLLGITMLLATFLIQLERRKGVQSSGIMLTFWLVALVCALAILRSKIMTALKEDAQVDLFRDITFYVYFSLLLIQLVLSCFSDRSPLFSETIHDPNPCPESSASFLSRITFWWITGLIVRGYRQPLEGSDLWSLNKEDTSEQVVPVLVKNWKKECAKTRKQPVKVVYSSKDPAQPKESSKVDANEEVEALIVKSPQKEWNPSLFKVLYKTFGPYFLMSFFFKAIHDLMMFSGPQILKLLIKFVNDTKAPDWQGYFYTVLLFVTACLQTLVLHQYFHICFVSGMRIKTAVIGAVYRKALVITNSARKSSTVGEIVNLMSVDAQRFMDLATYINMIWSAPLQVILALYLLWLNLGPSVLAGVAVMVLMVPVNAVMAMKTKTYQVAHMKSKDNRIKLMNEILNGIKVLKLYAWELAFKDKVLAIRQEELKVLKKSAYLSAVGTFTWVCTPFLVALCTFAVYVTIDENNILDAQTAFVSLALFNILRFPLNILPMVISSIVQASVSLKRLRIFLSHEELEPDSIERRPVKDGGGTNSITVRNATFTWARSDPPTLNGITFSIPEGALVAVVGQVGCGKSSLLSALLAEMDKVEGHVAIKGSVAYVPQQAWIQNDSLRENILFGCQLEEPYYRSVIQACALLPDLEILPSGDRTEIGEKGVNLSGGQKQRVSLARAVYSNADIYLFDDPLSAVDAHVGKHIFENVIGPKGMLKNKTRILVTHSMSYLPQVDVIIVMSGGKISEMGSYQELLARDGAFAEFLRTYASTEQEQDAEENGVTGVSGPGKEAKQMENGMLVTDSAGKQLQRQLSSSSSYSGDISRHHNSTAELQKAEAKKEETWKLMEADKAQTGQVKLSVYWDYMKAIGLFISFLSIFLFMCNHVSALASNYWLSLWTDDPIVNGTQEHTKVRLSVYGALGISQGIAVFGYSMAVSIGGILASRCLHVDLLHSILRSPMSFFERTPSGNLVNRFSKELDTVDSMIPEVIKMFMGSLFNVIGACIVILLATPIAAIIIPPLGLIYFFVQRFYVASSRQLKRLESVSRSPVYSHFNETLLGVSVIRAFEEQERFIHQSDLKVDENQKAYYPSIVANRWLAVRLECVGNCIVLFAALFAVISRHSLSAGLVGLSVSYSLQVTTYLNWLVRMSSEMETNIVAVERLKEYSETEKEAPWQIQETAPPSSWPQVGRVEFRNYCLRYREDLDFVLRHINVTINGGEKVGIVGRTGAGKSSLTLGLFRINESAEGEIIIDGINIAKIGLHDLRFKITIIPQDPVLFSGSLRMNLDPFSQYSDEEVWTSLELAHLKDFVSALPDKLDHECAEGGENLSVGQRQLVCLARALLRKTKILVLDEATAAVDLETDDLIQSTIRTQFEDCTVLTIAHRLNTIMDYTRVIVLDKGEIQEYGAPSDLLQQRGLFYSMAKDAGLV

SEQ ID NO: 39515 - protein, 610 aa, Homo sapiens
LQRSFGSMSAAVTAGKLARAPADPGKAGVPGVAAPGAPAAAPPAKEIPEVLVDPRSRRRYVRGRFLGKGGFAKCFEISDADTKEVFAGKIVPKSLLLKPHQREKMSMEISIHRSLAHQHVVGFHGFFEDNDFVFVVLELCRRRSLLELHKRRKALTEPEARYYLRQIVLGCQYLHRNRVIHRDLKLGNLFLNEDLEVKIGDFGLATKVEYDGERKKTLCGTPNYIAPEVLSKKGHSFEVDVWSIGCIMYTLLVGKPPFETSCLKETYLRIKKNEYSIPKHINPVAASLIQKMLQTDPTARPTINELLNDEFFTSGYIPARLPITCLTIPPRFSIAPSSLDPSNRKPLTVLNKGLENPLPERPREKEEPVVRETGEVVDCHLSDMLQQLHSVNASKPSERGLVRQEEAEDPACIPIFWVSKWVDYSDKYGLGYQLCDNSVGVLFNDSTRLILYNDGDSLQYIERDGTESYLTVSSHPNSLMKKITLLKYFRNYMSEHLLKAGANITPREGDELARLPYLRTWFRTRSAIILHLSNGSVQINFFQDHTKLILCPLMAAVTYIDEKRDFRTYRLSLLEEYGCCKELASRLRYARTMVDKLLSSRSASNRLKAS

SEQ ID NO: 39516 - protein, 6 aa, Homo sapiens
KMAALG

SEQ ID NO: 39517 - protein, 4 aa, Homo sapiens
LSRL

SEQ ID NO: 39518 - protein, 390 aa, Homo sapiens
LTTKGLRLDFQGRISSEAPELATTSTMPYQYPALTPEQKKELSDIAHRIVAPGKGILAADESTGSIAKRLQSIGTENTEENRRFYRQLLLTADDRVNPCIGGVILFHETLYQKADDGRPFPQVIKSKGGVVGIKVDKGVVPLAGTNGETTTQGLDGLSERCAQYKKDGADFAKWRCVLKIGEHTPSALAIMENANVLARYASICQQNGIVPIVEPEILPDGDHDLKRCQYVTEKVLAAVYKALSDHHIYLEGTLLKPNMVTPGHACTQKFSHEEIAMATVTALRRTVPPAVTGITFLSGGQSEEEASINLNAINKCPLLKPWALTFSYGRALQASALKAWGGKKENLKAAQEEYVKRALANSLACQGKYTPSGQAGAAASESLFVSNHAY

SEQ ID NO: 39519 - protein, 1192 aa, Homo sapiens
TRPPGPARRPPARLGAEIGRIASKYVRVSLPPPPPAAGRPGAAVADDAREEEEEAAPPPPPPPPPRLAAARPPGSQPRPPAAGEAQAAADMNHQQQQQQQKAGEQQLSEPEDMEMEAGDTDDPPRITQNPVINGNVALSDGHNTAEEDMEDDTSWRSEATFQFTVERFSRLSESVLSPPCFVRNLPWKIMVMPRFYPDRPHQKSVGFFLQCNAESDSTSWSCHAQAVLKIINYRDDEKSFSRRISHLFFHKENDWGFSNFMAWSEVTDPEKGFIDDDKVTFEVFVQADAPHGVAWDSKKHTGYVGLKNQGATCYMNSLLQTLFFTNQLRKAVYMMPTEGDDSSKSVPLALQRVFYELQHSDKPVGTKKLTKSFGWETLDSFMQHDVQELCRVLLDNVENKMKGTCVEGTIPKLFRGKMVSYIQCKEVDYRSDRREDYYDIQLSIKGKKNIFESFVDYVAVEQLDGDNKYDAGEHGLQEAEKGVKFLTLPPVLHLQLMRFMYDPQTDQNIKINDRFEFPEQLPLDEFLQKTDPKDPANYILHAVLVHSGDNHGGHYVVYLNPKGDGKWCKFDDDVVSRCTKEEAIEHNYGGHDDDLSVRHCTNAYMLVYIRESKLSEVLQAVTDHDIPQQLVERLQEEKRIEAQKRKERQEAHLYMQVQIVAEDQFCGHQGNDMYDEEKVKYTVFKVLKNSSLAEFVQSLSQTMGFPQDQIRLWPMQARSNGTKRPAMLDNEADGNKTMIELSDNENPWTIFLETVDPELAASGATLPKFDKDHDVMLFLKMYDPKTRSLNYCGHIYTPISCKIRDLLPVMCDRAGFIQDTSLILYEEVKPNLTERIQDYDVSLDKALDELMDGDIIVFQKDDPENDNSELPTAKEYFRDLYHRVDVIFCDKTIPNDPGFVVTLSNRMNYFQVAKTVAQRLNTDPMLLQFFKSQGYRDGPGNPLRHNYEGTLRDLLQFFKPRQPKKLYYQQLKMKITDFENRRSFKCIWLNSQFREEEITLYPDKHGCVRDLLEECKKAVELGEKASGKLRLLEIVSYKIIGVHQEDELLECLSPATSRTFRIEEIPLDQVDIDKENEMLVTVAHFHKEVFGTFGIPFLLRIHQGEHFREVMKRIQSLLDIQEKEFEKFKFAIVMMGRHQYINEDEYEVNLKDFEPQPGNMSHPRPWLGLDHFNKAPKRSRYTYLEKAIKIHN

SEQ ID NO: 39520 - protein, 47 aa, Homo sapiens
MCGITCPMCPRREEKGSRTLRKDCSLYSHRCHIQEHRSNMRYICVLS

SEQ ID NO: 39521 - protein, 663 aa, Homo sapiens
LPTPLRPGAPASISRSLSTTHTAPPIMDPGSGGGGGGGGGGGSSSGSSSSDSAPDCWDQADMEAPGPGPCGGGGSLAAAAEAQRENLSAAFSRQLNVNAKPFVPNVHAAEFVPSFLRGPAAPPPPVGGAANNHGAGSGAGGRAAPVESSQEEQSLCEGSNSAVSMELSEPIVENGETEMSPEESWEHKEEISEAEPGGGSLGDGRPPEESAHEMMEEEEEIPKPKSVVAPPGAPKKEHVNVVFIGHVDAGKSTIGGQIMYLTGMVDKRTLEKYEREAKEKNRETWYLSWALDTNQEERDKGKTVEVGRAYFETEKKHFTILDAPGHKSFVPNMIGGASQADLAVLVISARKGEFETGFEKGGQTREHAMLAKTAGVKHLIVLINKMDDPTVNWSNERYEECKEKLVPFLKKVGFNPKKDIHFMPCSGLTGANLKEQSDFCPWYIGLPFIPYLDNLPNFNRSVDGPIRLPIVDKYKDMGTVVLGKLESGSICKGQQLVMMPNKHNVEVLGILSDDVETDTVAPGENLKIRLKGIEEEEILPGFILCDPNNLCHSGRTFDAQIVIIEHKSIICPGYNAVLHIHTCIEEVEITALICLVDKKSGEKSKTRPRFVKQDQVCIARLRTAGTICLETFKDFPQMGRFTLRDEGKTIAIGKVLKLVPEKD

SEQ ID NO: 39522 - protein, 349 aa, Homo sapiens
VKGQPFDVGPRYTQLQYIGEGAYGMVSSAYDHVRKTRVAIKKISPFEHQTYCQRTLREIQILLRFRHENVIGIRDILRASTLEAMRDVYIVQDLMETDLYKLLKSQQLSNDHICYFLYQILRGLKYIHSANVLHRDLKPSNLLINTTCDLKICDFGLARIADPEHDHTGFLTEYVATRWYRAPEIMLNSKGYTKSIDIWSVGCILAEMLSNRPIFPGKHYLDQLNHILGILGSPSQEDLNCIINMKARNYLQSLPSKTKVAWAKLFPKSDSKALDLLDRMLTFNPNKRITVEEALAHPYLEQYYDPTDEPVAEEPFTFAMELDDLPKERLKELIFQETARFQPGVLEAP

SEQ ID NO: 39523 - protein, 116 aa, Homo sapiens
VAPVRQQGSVAGARAGVVSLLGCRSSWTAAMELSAEYLREKLQRDLEAEHVEVEDTTLNRCSCSFRVLVVSAKFEGKPLLQRHRLVNACLAEELPHIHAFEQKTLTPDQWARERQK

SEQ ID NO: 39524 - protein, 116 aa, Homo sapiens; identical to SEQ ID NO: 39523

SEQ ID NO: 39525 - protein, 8 aa, Homo sapiens
ICPNAPDP

SEQ ID NO: 39526 - protein, 166 aa, Homo sapiens
LEIMGSTWGSPGWVRLALCLTGLVLSLYALHVKAARARDRDYRALCDVGTAISCSRVFSSRWGRGFGLVEHVLGQDSILNQSNSIFGCIFYTLQLLLGCLRTRWASVLMLLSSLVSLAGSVYLAWILFFVLYDFCIVCITTYAINVSLMWLSFRKVQEPQGKAKRH

SEQ ID NO: 39527 - protein, 41 aa, Homo sapiens [sequence omitted]

SEQ ID NO: 39528 - protein, 10 aa, Homo sapiens
KSAQKAQKAK

SEQ ID NO: 39529 - protein, 39 aa, Homo sapiens
REALLKIFPDSEQRLKIDQILVAHPYMKDLNALSAMVLD

SEQ ID NO: 39530 - protein, 242 aa, Homo sapiens
LPATFCSPSAPELASMSVVPPNRSQTGWPRGVTQFGNKYIQQTKPLTLERTINLYPLTNYTFGTKEPLYEKDSSVAARFQRMREEFDKIGMRRTVEGVLIVHEHRLPHVLLLQLGTTFFKLPGGELNPGEDEVEGLKRLMTEILGRQDGVLQDWVIDDCIGNWWRPNFEPPQYPYIPAHITKPKEHKKLFLVQLQEKALFAVPKNYKLVAAPLFELYDNAPGYGPIISSLPQLLSRFNFIYN

SEQ ID NO: 39531 - protein, 5 aa, Homo sapiens
MAAVS

SEQ ID NO: 39532 - protein, 21 aa, Homo sapiens
LEPSKITKFENAFLSHVVSQR

SEQ ID NO: 39533 - protein, 21 aa, Homo sapiens
LGTGQTFCVLVVSFLRILATL

SEQ ID NO: 39534 - protein, 156 aa, Homo sapiens
VDCIPLFHGTLALAPMLEVALTLIDSWCKDHSYVIAGYYQANERVKDASPNQVAEKVASRIAEGFSDTALIMVDNTKFTMDCVAPTIHVYEHHENRWRCRDPHHDYCEDWPEAQRISASLLDSRSYETLVDFDNHLDDIRNDWTNPEINKAVLHLC

SEQ ID NO: 39535 - protein, 233 aa, Homo sapiens
VEWQMGEQADGKDSIARQVAPESHWPELRVLILVVSAEKKLTGSTVGMRASVETSPLLRFRAESVVPARMAEMARCIRERDFPSFAQLTMKDSNQFHATCLDTFPPISYLNAISWRIIHLVHRFNAHHGDTKVAYTFDAGPNAVIFTLDDTVAEFVAAVWHGFPPGSNGDTFLKGLQVRPAPLSAELQAALAMEPTPGGVKYIIVTQVGPGPQILDDPCAHLLGPDGLPKPAA

SEQ ID NO: 39536 - protein, 13 aa, Homo sapiens
TLPTSRALTFTAG

SEQ ID NO: 39537 - protein, 632 aa, Homo sapiens
KLELLRGPRGSLGGGAMVGQLSEGAIAAIMQKGDTNIKPILQVINIRPITTGNSPPRYRLLMSDGLNTLSSFMLATQLNPLVEEEQLSSNCVCQIHRFIVNTLKDGRRVVILMELEVLKSAEAVGVKIGNPVPYNEGLGQPQVAPPAPAASPAASSRPQPQNGSSGMGSTVSKAYGASKTFGKAAGPSLSHTSGGTQSKVVPIASLTPYQSKWTICARVTNKSQIRTWSNSRGEGKLFSLELVDESGEIRATAFNEQVDKFFPLIEVNKVYYFSKGTLKIANKQFTAVKNDYEMTFNNETSVMPCEDDHHLPTVQFDFTGIDDLENKSKDSLVDIIGICKSYEDATKITVRSNNREVAKRNIYLMDTSGKVVTATLWGEDADKFDGSRQPVLAIKGARVSDFGGRSLSVLSSSTIIANPDIPEAYKLRGWFDAEGQALDGVSISDLKSGGVGGSNTNWKTLYEVKSENLGQGDKPDYFSSVATVVYLRKENCMYQACPTQDCNKKVIDQQNGLYRCEKCDTEFPNFKYRMILSVNIADFQENQWVTCFQESAEAILGQNAAYLGELKDKNEQAFEEVFQNANFRSFIFRVRVKVETYNDESRIKATVMDVKPVDYREYGRRLVMSIRRSALM

SEQ ID NO: 39538 - protein, 5 aa, Homo sapiens
MNLTC

SEQ ID NO: 39539 - protein, 124 aa, Homo sapiens
LFREKARGRARAGAMAAVVAKREGPPFISEAAVRGNAAVLDYCRTSVSALSGATAGILGLTGLYGFIFYLLASVLLSLLLILKAGRRWNKYFKSRRPLFTGGLIGGLFTYVLFWTFLYGMVHVY

SEQ ID NO: 39540 - protein, 12 aa, Homo sapiens
IVTLMVAPVFHD

SEQ ID NO: 39541 - protein, 10 aa, Homo sapiens
LWLCLFSVLL

SEQ ID NO: 39542 - protein, 81 aa, Homo sapiens
MAPGTGGNLSSNQKASISLIHQGSLAWSLPPFSQVFLRELFLLDFAKAEPPSSLLSPVVSSLYSWQHQLTAPVHPSGRRIS

SEQ ID NO: 39543 - protein, 37 aa, Homo sapiens
IHSKVVRNRSREARKDRTPPPRFRPAGAAPCLPPKPM

SEQ ID NO: 39544 - protein, 407 aa, Homo sapiens
IMSASQDSRSRDNGPDGMEPEGVIESNWNEIVDSFDDMNLSESLLRGIYAYGFEKPSAIQQRAILPCIKGYDVIAQAQSGTGKTATFAISILQQIELDLKATQALVLAPTRELAQQIQKVVMALGDYMGASCHACIGGTNVRAEVQKLQMEAPHIIVGTPGRVFDMLNRRYLSPKYIKMFVLDEADEMLSRGFKDQIYDIFQKLNSNTQVVLLSATMPSDVLEVTKKFMRDPIRILVKKEELTLEGIRQFYINVEREEWKLDTLCDLYETLTITQAVIFINTRRKVDWLTEKMHARDFTVSAMHGDMDQKERDVIMREFRSGSSRVLITTDLLARGIDVQQVSLVINYDLPTNRENYIHRIGRGGRFGRKGVAINMVTEEDKRTLRDIETFYNTSIEEMPLNVADLI

SEQ ID NO: 39545 - protein, 30 aa, Homo sapiens
KLQLALLAYACMANPSLTPDFSLTQDRVCS

SEQ ID NO: 39546 - protein, 397 aa, Homo sapiens
ILHSIVKRDIQENDEEAVQVKEQSILELGSLLAKTGQAAELGGLLKYVRPFLNSISKAKAARLVRSLLDLFLDMEAATGQEVELCLECIEWAKSEKRTFLRQALEARLVSLYFDTKRYQEALHLGSQLLRELKKMDDKALLVEVQLLESKTYHALSNLPKARAALTSARTTANAIYCPPKLQATLDMQSGIIHAAEEKDWKTAYSYFYEAFEGYDSIDSPKAITSLKYMLLCKIMLNTPEDVQALVSGKLALRYAGRQTEALKCVAQASKNRSLADFEKALTDYRAELRDDPIISTHLAKLYDNLLEQNLIRVIEPFSRVQIEHISSLIKLSKADVERKLSQMILDKKFHGILDQGEGVLIIFDEPPVDKTYEAALETIQNMSKVVDSLYNKAKKLT

SEQ ID NO: 39547 - protein, 77 aa, Homo sapiens
LVAGKTYRWCVCGRSKKQPFCDGSHFFQRTGLSPLKFKAQETRMVALCTCKATQRPPYCDGTHRSERVQKAEVGSPL

SEQ ID NO: 39548 - protein, 206 aa, Homo sapiens
IMSIMSYNGGAVMAMKGKNCVAIAADRRFGIQAQMVTTDFQKIFPMGDRLYIGLAGLATDVQTVAQRLKFRLNLYELKEGRQIKPYTLMSMVANLLYEKRFGPYYTEPVIAGLDPKTFKPFICSLDLIGCPMVTDDFVVSGTCAEQMYGMCESLWEPNMDPDHLFETISQAMLNAVDRDAVSGMGVIVHIIEKDKITTRTLKARMD

SEQ ID NO: 39549 - protein, 276 aa, Homo sapiens
TRVSSGVPAPAFLGTMNPNCARCGKIVYPTEKVNCLDKFWHKACFHCETCKMTLNMKNYKGYEKKPYCNAHYPKQSFTMVADTPENLRLKQQSELQSQVRYKEEFEKNKGKGFSVVADTPELQRIKKTQDQISNIKYHEEFEKSRMGPSGGEGMEPERRDSQDGSSYRRPLEQQQPHHIPTSAPVYQQPQQQPVAQSYGGYKEPAAPVSIQRSAPGGGGKRYRAVYDYSAADEDEVSFQDGDTIVNVQQIDDGWMYGTVERTGDTGMLPANYVEAI

SEQ ID NO: 39550 - protein, 66 aa, Homo sapiens
IVSFVLAWLETWFLDFKVLPQEAEEERFCSSRVSCRPGCCCPWTPAVLRCSVRGTVLFTPRILCRV

SEQ ID NO: 39551 - protein, 13 aa, Homo sapiens
MTCFLLALRIISI

SEQ ID NO: 39552 - protein, 16 aa, Homo sapiens
MHCGTKGLGHTVPWKL

SEQ ID NO: 39553 - protein, 115 aa, Homo sapiens [sequence omitted]

SEQ ID NO: 39554 - protein, 271 aa, Homo sapiens
LEGTMANCERTFIAIKPDGVQRGLVGEIIKRFEQKGFRLVGLKFMQASEDLLKEHYVDLKDRPFFAGLVKYMHSGPVVAMVWEGLNVVKTGRVMLGETNPADSKPGTIRGDFCIQVGRTMANLERTFIAIKPDGVQRGLVGEIIKRFEQKGFRLVAMKFLRASEEHLKQHYIDLKDRPFFPGLVKYMNSGPVVAMVWEGLNVVKTGRVMLGETNPADSKPGTIRGDFCIQVGRNIIHGSDSVKSAEKEISLWFKPEELVDYKSCAHDWVYE

SEQ ID NO: 39555 - protein, 8 aa, Homo sapiens
LDYSAKML

SEQ ID NO: 39556 - protein, 36 aa, Homo sapiens
RRRCWDCFALEPASGCPLQWLCYCMDCILDFMCMSQ

SEQ ID NO: 39557 - protein, 34 aa, Homo sapiens
MPILKMRKKILATLIYLTFLLKTHQLASNSIPSQ

SEQ ID NO: 39558 - protein, 345 aa, Homo sapiens
VATMSLHGKRKEIYKYEAPWTVYAMNWSVRPDKRFRLALGSFVEEYNNKVQLVGLDEESSEFICRNTFDHPYPTTKLMWIPDTKGVYPDLLATSGDYLRVWRVGETETRLECLLNNNKNSDFCAPLTSFDWNEVDPYLLGTSSIDTTCTIWGLETGQVLGRVNLVSGHVKTQLIAHDKEVYDIAFSRAGGGRDMFASVGADGSVRMFDLRHLEHSTIIYEDPQHHPLLRLCWNKQDPNYLATMAMDGMEVVILDVRVPCTPVARLNNHRACVNGIAWAPHSSCHICTAADDHQALIWDIQQMPRAIEDPILAYTAEGEINNVQWASTQPDWIAICYNNCLEILRV

SEQ ID NO: 39559 - protein, 41 aa, Homo sapiens
RMHVPGGRNYSNFSYSETKKKDYSSCEGQFIPYCYWKYRKW

SEQ ID NO: 39560 - protein, 410 aa, Homo sapiens
LIYEMAENGKNCDQRRVAMNKEHHNGNFTDPSSVNEKKRREREERQNIVLWRQPLITLQYFSLEILVILKEWTSKLWHRQSIVVSFLLLLAVLIATYYVEGVHQQYVQRIEKQFLLYAYWIGLGILSSVGLGTGLHTFLLYLGPHIASVTLAAYECNSVNFPEPPYPDQIICPDEEGTEGTISLWSIISKVRIEACMWGIGTAIGELPPYFMARAARLSGAEPDDEEYQEFEEMLEHAESAQDFASRAKLAVQKLVQKVGFFGILACASIPNPLFDLAGITCGHFLVPFWTFFGATLIGKAIIKMHIQKIFVIITFSKHIVEQMVAFIGAVPGIGPSLQKPFQEYLEAQRQKLHHKSEMGTPQGENWLSWMFEKLVVVMVCYFILSIINSMAQSYAKRIQQRLNSEEKTK

SEQ ID NO: 39561 - protein, 564 aa, Homo sapiens
VDPLNAVALQPLIPPASPPVEAQARFAAFSLCLITMSTNENANTPAARLHRFKNKGKDSTEMRRRRIEVNVELRKAKKDDQMLKRRNVSSFPDDATSPLQENRNNQGTVNWSVDDIVKGINSSNVENQLQATQAARKLLSREKQPPIDNIIRAGLIPKFVSFLGRTDCSPIQFESAWALTNIASGTSEQTKAVVDGGAIPAFISLLASPHAHISEQAVWALGNIAGDGSVFRDLVIKYGAVDPLLALLAVPDMSSLACGYLRNLTWTLSNLCRNKNPAPPIDAVEQILPTLVRLLHHDDPEVLADTCWAISYLTDGPNERIGMVVKTGVVPQLVKLLGASELPIVTPALRAIGNIVTGTDEQTQVVIDAGALAVFPSLLTNPKTNIQKEATWTMSNITAGRQDQIQQVVNHGLVPFLVSVLSKADFKTQKEAVWAVTNYTSGGTVEQIVYLVHCGIIEPLMNLLTAKDTKIILVILDAISNIFQAAEKLGETEKLSIMIEECGGLDKIEALQNHENESVYKASLSLIEKYFSVEEEEDQNVVPETTSEGYTFQVQDGAPGTFNF

SEQ ID NO: 39562 - protein, 53 aa, Homo sapiens
LKIPIGIQNKVTFTDLIVLHSVVSRKQPPTMDPHSGRWLGARPPAEKPSPPAC

SEQ ID NO: 39563 - protein, 6 aa, Homo sapiens
MLARPI

SEQ ID NO: 39564 - protein, 60 aa, Homo sapiens
RGKRLPGVAGQYLFKCLINVKKEVDDALVEMHWVEGQNRDLMNQLCTYIRNQIFRLVAVN

SEQ ID NO: 39565 - protein, 28 aa, Homo sapiens
ISLPRGKGIRLTIAEERDKRLAAKQSSG

SEQ ID NO: 39566 - protein, 278 aa, Homo sapiens
RLRESETLSASIRRADPAGAAAAMDDREDLVYQAKLAEQAERYDEMVESMKKVAGMDVELTVEERNLLSVAYKNVIGARRASWRIISSIEQKEENKGGEDKLKMIREYRQMVETELKLICCDILDVLDKHLIPAANTGESKVFYYKMKGDYHRYLAEFATGNDRKEAAENSLVAYKAASDIAMTELPPTHPIRLGLALNFSVFYYEILNSPDRACRLAKAAFDDAIAELDTLSEESYKDSTLIMQLLRDNLTLWTSDMQGDGEEQNKEALQDVEDENQ

SEQ ID NO: 39567 - protein, 147 aa, Homo sapiens
LQMTVHNLYLFDRNGVCLHYSEWHRKKQAGIPKEEEYKLMYGMLFSIRSFVSKMSPLDMKDGFLAFQTSRYKLHYYETPTGIKVVMNTDLGVGPIRDVLHHIYSALYVELVVKNPLCPLGQTVQSELFRSRLDSYVRSLPFFSARAG

SEQ ID NO: 39568 - protein, 128 aa, Homo sapiens
LPLPSPPPAAPAMSATAATAPPAAPAGEGGPPAPPPNLTSNRRLQQTQAQVDEVVDIMRVNVDKVLERDQKLSELDDRADALQAGASQFETSAAKLKRKYWWKNLKMMIILGVICAIILIIIIVYFST

SEQ ID NO: 39569 - protein, 30 aa, Homo sapiens
VVGCSCVVVKDYGKESQAKDDIEEYLKCKK

SEQ ID NO: 39570 - protein, 188 aa, Homo sapiens
LSPALRKPRRQPGPSAGRMTELQSALLLRRQLAELNKNPVEGFSAGLIDDNDLYRWEVLIIGPPDTLYEGGVFKAHLTFPKDYPLRPPKMKFITEIWHPNVDKNGDVCISILHEPGEDKYGYEKPEERWLPIHTVETIMISVISMLADPNGDSPANVDAAKEWREDRNGEFKRKVARCVRKSQETAFE

SEQ ID NO: 39571 - protein, 2341 aa, Homo sapiens
LWDSPDMAGVFPYRGPGNPVPGPLAPLPDYMSEEKLQEKARKWQQLQAKRYAEKRKFGFVDAQKEDMPPEHVRKIIRDHGDMTNRKFRHDKRVYLGALKYMPHAVLKLLENMPMPWEQIRDVPVLYHITGAISFVNEIPWVIEPVYISQWGSMWIMMRREKRDRRHFKRMRFPPFDDEEPPLDYADNILDVEPLEAIQLELDPEEDAPVLDWFYDHQPLRDSRKYVNGSTYQRWQFTLPMMSTLYRLANQLLTDLVDDNYFYLFDLKAFFTSKALNMAIPGGPKFEPLVRDINLQDEDWNEFNDINKIIIRQPIRTEYKIAFPYLYNNLPHHVHLTWYHTPNVVFIKTEDPDLPAFYFDPLINPISHRHSVKSQEPLPDDDEEFELPEFVEPFLKDTPLYTDNTANGIALLWAPRPFNLRSGRTRRALDIPLVKNWYREHCPAGQPVKVRVSYQKLLKYYVLNALKHRPPKAQKKRYLFRSFKATKFFQSTKLDWVEVGLQVCRQGYNMLNLLIHRKNLNYLHLDYNFNLKPVKTLTTKERKKSRFGNAFHLCREVLRLTKLVVDSHVQYRLGNVDAFQLADGLQYIFAHVGQLTGMYRYKYKLMRQIRMCKDLKHLIYYRFNTGPVGKGPGCGFWAAGWRVWLFFMRGITPLLERWLGNLLARQFEGRHSKGVAKTVTKQRVESHFDLELRAAVMHDILDMMPEGIKQNKARTILQHLSEAWRCWKANIPWKVPGLPTPIENMILRYVKAKADWWTNTAHYNRERIRRGATVDKTVCKKNLGRLTRLYLKAEQERQHNYLKDGPYITAEEAVAVYTTTVHWLESRRFSPIPFPPLSYKHDTKLLILALERLKEAYSVKSRLNQSQREELGLIEQAYDNPHEALSRIKRHLLTQRAFKEVGIEFMDLYSHLVPVYDVEPLEKITDAYLDQYLWYEADKRRLFPPWIKPADTEPPPLLVYKWCQGINNLQDVWETSEGECNVMLESRFEKMYEKIDLTLLNRLLRLIVDHNIADYMTAKNNVVINYKDMNHTNSYGIIRGLQFASFIVQYYGLVMDLLVLGLHRASEMAGPPQMPNDFLSFQDIATEAAHPIRLFCRYIDRIHIFFRFTADEARDLIQRYLTEHPDPNNENIVGYNNKKCWPRDARMRLMKHDVNLGRAVFWDIKNRLPRSVTTVQWENSFVSVYSKDNPNLLFNMCGFECRILPKCRTSYEEFTHKDGVWNLQNEVTKERTAQCFLRVDDESMQRFHNRVRQILMASGSTTFTKIVNKWNTALIGLMTYFREAVVNTQELLDLLVKCENKIQTRIKIGLNSKMPSRFPPVVFYTPKELGGLGMLSMGHVLIPQSDLRWSKQTDVGITHFRSGMSHEEDQLIPNLYRYIQPWESEFIDSQRVWAEYALKRQEAIAQNRRLTLEDLEDSWDRGIPRINTLFQKDRHTLAYDKGWRVRTDFKQYQVLKQNPFWWTHQRHDGKLWNLNNYRTDMIQALGGVEGILEHTLFKGTYFPTWEGLFWEKASGFEESMKWKKLTNAQRSGLNQIPNRRFTLWWSPTINRANVYVGFQVQLDLTGIFMHGKIPTLKISLIQIFRAHLWQKIHESIVMDLCQVFDQELDALEIETVQKETIHPRKSYKMNSSCADILLFASYKWNVSRPSLLADSKDVMDSTTTQKYWIDIQLRWGDYDSHDIERYARAKFLDYTTDNMSIYPSPTGVLIAIDLAYNLHSAYGNWFPGSKPLIQQAMAKIMKANPALYVLRERIRKGLQLYSSEPTEPYLSSQNYGELFSNQIIWFVDDTNVYRVTIHKTFEGNLTTKPINGAIFIFNPRTGQLFLKIIHTSVWAGQKRLGQLAKWKTAEEVAALIRSLPVEEQPKQIIVTRKGMLDPLEVHLLDFPNIVIKGSELQLPFQACLKVEKFGDLILKATEPQMVLFNLYDDWLKTISSYTAFSRLILILRALHVNNDRAKVILKPDKTTITEPHHIWPTLTDEEWIKVEVQLKDLILADYGKKNNVNVASLTQSEIRDIILGMEISAPSQQRQQIAEIEKQTKEQSQLTATQTRTVNKHGDEIITSTTSNYETQTFSSKTEWRVRAISAANLHLRTNHIYVSSDDIKETGYTYILPKNVLKKFICISDLRAQIAGYLYGVSPPDNPQVKEIRCIVMVPQWGTHQTVHLPGQLPQHEYLKEMEPLGWIHTQPNESPQLSPQDVTTHAKIMADNPSWDGEKTIIITCSFTPGSCTLTAYKLTPSGYEWGRQNTDKGNNPKGYLPSHYERVQMLLSDRFLGFFMVPAQSSWNYNFMGVRHDPNMKYELQLANPKEFYHEVHRPSHFLNFALLQEGEVYSADREDLYA

SEQ ID NO: 39572 - protein, 8 aa, Homo sapiens
LGWLALAL

SEQ ID NO: 39573 - protein, 118 aa, Homo sapiens
ITEAGAAKMKFNPFVTSDRSKNRKRHFNAPSHIRRKIMSSPLSKELRQKYNVRSMPIRKDDEVQVVRGHYKGQQIGKVVQVYRKKYVIYIERVQREKANGTTVHVGIHPSKVGVFENA

SEQ ID NO: 39574 - protein, 7 aa, Homo sapiens
IISIVCY

SEQ ID NO: 39575 - protein, 545 aa, Homo sapiens
LASSSPPSPPPPARGRALPPMVSRPEPEGEAMDAELAVAPPGCSHLGSFKVDNWKQNLRAIYQCFVWSGTAEARKRKAKSCICHVCGVHLNRLHSCLYCVFFGCFTKKHIHEHAKAKRHNLAIDLMYGGIYCFLCQDYIYDKDMEIIAKEEQRKAWKMQGVGEKFSTWEPTKRELELLKHNPKRRKITSNCTIGLRGLINLGNTCFMNCIVQALTHTPLLRDFFLSDRHRCEMQSPSSCLVCEMSSLFQEFYSGHRSPHIPYKLLHLVWTHARHLAGYEQQDAHEFLIAALDVLHRHCKGDDNGKKANNPNHCNCIIDQIFTGGLQSDVTCQVCHGVSTTIDPFWDISLDLPGSSTPFWPLSPGSEGNVVNGESHVSGTTTLTDCLRRFTRPEHLGSSAKIKCSGCHSYQESTKQLTMKKLPIVACFHLKRFEHSAKLRRKITTYVSFPLELDMTPFMASSKESRMNGQYQQPTDSLNNDNKYSLFAVVNHQGTLESGHYTSFIRQHKDQWFKCDDAIITKASIKDVLDSEGYLLFYHKQFLEYE

SEQ ID NO: 39576 - protein, 141 aa, Homo sapiens
KMSKRGRGGSSGAKFRISLGLPVGAVINCADNTGAKNLYIISVKGIKGRLNRLPAAGVGDMVMATVKKGKPELRKKVHPAVVIRQRKSYRRKDGVFLYFEDNAGVIVNNKGEMKGSAITGPVAKECADLWPRIASNAGSIA

SEQ ID NO: 39577 - protein, 28 aa, Homo sapiens
IKTIIEEVAPDGRVLSSMVESETKKHYY

SEQ ID NO: 39578 - protein, 39 aa, Homo sapiens
IKLHQEERVSLHTDHYLQMHGKQSLQENTSVLMVYGNRP

SEQ ID NO: 39579 - protein, 813 aa, Homo sapiens
LDRHPGLALSLPLGSERPFGLREPRRPSPAHAQPRPLGLCRRNRMAQWNQLQQLDTRYLEQLHQLYSDSFPMELRQFLAPWIESQDWAYAASKESHATLVFHNLLGEIDQQYSRFLQESNVLYQHNLRRIKQFLQSRYLEKPMEIARIVARCLWEESRLLQTAATAAQQGGQANHPTAAVVTEKQQMLEQHLQDVRKRVQDLEQKMKVVENLQDDFDFNYKTLKSQGDMQDLNGNNQSVTRQKMQQLEQMLTALDQMRRSIVSELAGLLSAMEYVQKTLTDEELADWKRRQQIACIGGPPNICLDRLENWITSLAESQLQTRQQIKKLEELQQKVSYKGDPIVQHRPMLEERIVELFRNLMKSAFVVERQPCMPMHPDRPLVIKTGVQFTTKVRLLVKFPELNYQLKIKVCIDKDSGDVAALRGSRKFNILGTNTKVMNMEESNNGSLSAEFKHLTLREQRCGNGGRANCDASLIVTEELHLITFETEVYHQGLKIDLETHSLPVVVISNICQMPNAWASILWYNMLTNNPKNVNFFTKPPIGTWDQVAEVLSWQFSSTTKRGLSIEQLTTLAEKLLGPGVNYSGCQITWAKFCKENMAGKGFSFWVWLDNIIDLVKKYILALWNEGYIMGFISKERERAILSTKPPGTFLLRFSESSKEGGVTFTWVEKDISGKTQIQSVEPYTKQQLNNMSFAEIIMGYKIMDATNILVSPLVYLYPDIPKEEAFGKYCRPESQEHPEADPGAAPYLKTKFICVTPTTCSNTIDLPMSPRTLDSLMQFGNNGEGAEPSAGGQFESLTFDMELTSECATSPM

SEQ ID NO: 39580 - protein, 232 aa, Homo sapiens
KMFLVGLTGGIASGKSSVIQVFQQLGCAVIDVDVMARHVVQPGYPAHRRIVEVFGTEVLLENGDINRKVLGDLIFNQPDRRQLLNAITHPEIRKEMMKETFKYFLRGYRYVILDIPLLFETKKLLKYMKHTVVVYCDRDTQLARLMRRNSLNRKDAEARINAQLPLTDKARMARHVLDNSGEWSVTKRQVILLHTELERSLEYLPLRFGVLTGLAAIASLLYLLTHYLLPYA

SEQ ID NO: 39581 - protein, 42 aa, Homo sapiens
IELVSNSAALIQQATTVKNKDIRKFLNGIYVSEKGTVQQADE

SEQ ID NO: 39582 - protein, 163 aa, Homo sapiens [sequence omitted]

SEQ ID NO: 39583 - protein, 189 aa, Homo sapiens
LAGTMGKKQNKKKVEEVLEEEEEEYVVEKVLDRRVVKGKVEYLLKWKGFSDEDNTWEPEENLDCPDLIAEFLQSQKTAHETDKSEGGKRKADSDSEDKGEESKPKKKKEESEKPRGFARGLEPERIIGATDSSGELMFLMKWKNSDEADLVPAKEANVKCPQVVISFYEERLTWHSYPSEDDDKKDDKN

SEQ ID NO: 39584 - protein, 182 aa, Homo sapiens
LEQQRPPLPGTVPGPLIFGPTRTAERGSRMNVGTAHSEVNPNTRVMNSRGIWLSYVLAIGLLHIVLLSIPFVSVPVVWTLTNLIHNMGMYIFLHTVKGTPFETPDQGKARLLTHWEQMDYGVQFTASRKFLTITPIVLYFLTSFYTKYDQIHFVLNTVSLMSVLIPKLPQLHGVRIFGINKY

SEQ ID NO: 39585 - protein, 131 aa, Homo sapiens
LWSSISLLFFPSAKMALETVPKDLRHLRACLLCSLVKTIDQFEYDGCDNCDAYLQMKGNREMVYDCTSSSFDGIIAMMSPEDSWVSKWQRVSNFKPGVYAVSVTGRLPQGIVRELKSRGVAYKSRDTAIKT

SEQ ID NO: 39586 - protein, 233 aa, Homo sapiens
ISDSDSSTSSEEEESWEPLRGKKRSRGPKSDDDGFEIVPIEDPAKHRILDPEGLALGAVIASSKKAKRDLIDNSFNRYTFNEDEGELPEWFVQEEKQHRIRQLPVGKKEVEHYRKRWREINARPIKKVAEAKARKKRRMLKRLEQTRKKAEAVVNTVDISEREKVAQLRSLYKKAGLGKEKRHVTYVVAKKGVGRKVRRPAGVRGHFKVVDSRMKKDQRAQQRKEQKKKHKRK

SEQ ID NO: 39587 - protein, 661 aa, Homo sapiens
VQLRLVSSVSFLRCRPRKASPSSRPFPATCRTLFYILRSPPTATIDAMSGYSSDRDRGRDRGFGAPRFGGSRAGPLSGKKFGNPGEKLVKKKWNLDELPKFEKNFYQEHPDLARRTAQEVETYRRSKEITVRGHNCPKPVLNFYEANFPANVMDVIARQNFTEPTAIQAQGWPVALSGLDMVGVAQTGSGKTLSYLLPAIVHINHQPFLERGDGPICLVLAPTRELAQQVQQVAAEYCRACRLKSTCIYGGAPKGPQIRDLERGVEICIATPGRLIDFLECGKTNLRRTTYLVLDEADRMLDMGFEPQIRKIVDQIRPDRQTLMWSATWPKEVRQLAEDFLKDYIHINIGALELSANHNILQIVDVCHDVEKDEKLIRLMEEIMSEKENKTIVFVETKRRCDELTRKMRRDGWPAMGIHGDKSQQERDWVLNEFKHGKAPILIATDVASRGLDVEDVKFVINYDYPNSSEDYIHRIGRTARSTKTGTAYTFFTPNNIKQVSDLISVLREANQAINPKLLQLVEDRGSGRSRGRGGMKDDRRDRYSAGKRGGFNTFRDRENYDRGYSSLLKRDFGAKTQNGVYSAANYTNGSFGSNFVSAGIQTSFRTGNPTGTYQNGYDSTQQYGSNVPNMHNGMNQQAYAYPATAAAPMIGYPMPTGYSQ

SEQ ID NO: 39588 - protein, 189 aa, Homo sapiens
VHPQQAFCNADVVIRAKAVSEKEVDSGNDIYGNPIKRIQYEIKQIKMFKGPEKDIEFIYTAPSSAVCGVSLDVGGKKEYLIAGKAEGDGKMHITLCDFIVPWDTLSTTQKKSLNHRYQMGCECKITRCPMIPCYISSPDECLWMDWVTEKNINGHQAKFFACIKRSDGSCAWYRGAAPPKQEFLDIEDP

SEQ ID NO: 39589 - protein, 245 aa, Homo sapiens
LGVGNMAGPPRLLLLPLLLALARGLPGALAAQEVQQSPHCTTVPVGASVNITCSTSGGLRGIYLRQLGPQPQDIIYYEDGVVPTTDRRFRGRIDFSGSQDNLTITMHRLQLSDTGTYTCQAITEVNVYGSGTLVLVTEEQSQGWHRCSDAPPRASALPAPPTGSALPDPQTASALPDPPAASALPAALAVISFLLGLGLGVACVLARTQIKKLCSWRDKNSAACVVYEDMSHSRCNTLSSPNQYQ

SEQ ID NO: 39590 - protein, 213 aa, Homo sapiens
VSRPRLSLSMAEQEPTAEQLAQIAAENEEDEHSVNYKPPAQKSIQEIQELDKDDESLRKYKEALLGRVAVSADPNVPNVVVTGLTLVCSSAPGPLELDLTGDLESFKKQSFVLKEGVEYRIKISFRVNREIVSGMKYIQHTYRKGVKIDKTDYMVGSYGPRAEEYEFLTPVEEAPKGMLARGSYSIKSRFTDDDKTDHLSWEWNLTIKKDWKD

SEQ ID NO: 39591 - protein, 408 aa, Homo sapiens
VHSPSSCALSSGVPAMSDEREVAEAATGEDASSPPPKTEAASDPQHPAASEGAAAAAASPPLLRCLVLTGFGGYDKVKLQSRPAAPPAPGPGQLTLRLRACGLNFADLMARQGLYDRLPPLPVTPGMEGAGVVIAVGEGVSDRKAGDRVMVLNRSGMWQEEVTVPSVQTFLIPEAMTFEEAAALLVNYITAYMVLFDFGNLQPGHSVLVHMAAGGVGMAAVQLCRTVENVTVFGTASASKHEALKENGVTHPIDYHTTDYVDEIKKISPKGVDIVMDPLGGSDTAKGYNLLKPMGKVVTYGMANLLTGPKRNLMALARTWWNQFSVTALQLLQANRAVCGFHLGYLDGEVELVSGVVARLLALYNQGHIKPHIDSVWPFEKVADAMKQMQEKKNVGKVLLVPGPEKEN

SEQ ID NO: 39592 - protein, 283 aa, Homo sapiens
LPSFLPGPRLVPAGHPTATMFVPCGESAPDLAGFTLLMPAVSVGNVGQLAMDLIISTLNMSKIGYFYTDCLVPMVGNNPYATTEGNSTELSINAEVYSLPSRKLVALQLRSIFIKYKSKPFCEKLLSWVKSSGCARVIVLSSSHSYQRNDLQLRSTPFRYLLTPSMQKSVQNKIKSLNWEEMEKSRCIPEIDDSEFCIRIPGGGITKTLYDESCSKEIQMAVLLKFVSEGDNIPDALGLVEYLNEWLQILKPLSDDPTVSASRWKIPSSWRLLFGSGLPPALF

SEQ ID NO: 39593 - protein, 242 aa, Homo sapiens
MAKHEQILVLDPPTDLKFKGPFTDVVTTNLKLRNPSDRKVCFKVKTTAPRRYCVRPNSGIIDPGSTVTVSVMLQPFDYDPNEKSKHKFMVQTIFAPPNTSDMEAVWKEAKPDELMDSKLRCVFEMPNENDKLNDMEPSKAVPLNASKQDGPMPKPHSVSLNDTETRKLMEECKRLQGEMMKLSEENRHLRDEGLRLRKVAHSDKPGSTSTASFRDNVTSPLPSLLVVIAAIFIGFFLGKFIL

SEQ ID NO: 39594 - protein, 585 aa, Homo sapiens
KMLSRLRVVSTTCTLACRHLHIKEKGKPLMLNPRTNKGMAFTLQERQMLGLQGLLPPKIETQDIQALRFHRNLKKMTSPLEKYIYIMGIQERNEKLFYRILQDDIESLMPIVYTPTVGLACSQYGHIFRRPKGLFISISDRGHVRSIVDNWPENHVKAVVVTDGERILGLGDLGVYGMGIPVGKLCLYTACAGIRPDRCLPVCIDVGTDNIALLKDPFYMGLYQKRDRTQQYDDLIDEFMKAITDRYGRNTLIQFEDFGNHNAFRFLRKYREKYCTFNDDIQGTAAVALAGLLAAQKVISKPISEHKILFLGAGEAALGIANLIVMSMVENGLSEQEAQKKIWMFDKYGLLVKGRKAKIDSYQEPFTHSAPESIPDTFEDAVNILKPSTIIGVAGAGRLFTPDVIRAMASINERPVIFALSNPTAQAECTAEEAYTLTEGRCLFASGSPFGPVKLTDGRVFTPGQGNNVYIFPGVALAVILCNTRHISDSVFLEAAKALTSQLTDEELAQGRLYPPLANIQEVSINIAIKVTEYLYANKMAFRYPEPEDKAKYVKERTWRSEYDSLLPDVYEWPESASSPPVITE

SEQ ID NO: 39595 - protein, 24 aa, Homo sapiens
LAIKRCKHFELGGDKKRKGQVIPF

SEQ ID NO: 39596 - protein, 43 aa, Homo sapiens
KYSAAKSKVEKKKKEKVLAAVTKPVGGDKNGGTRVVKLRKMPR

SEQ ID NO: 39597 - protein, 168 aa, Homo sapiens
VPRKLLSHGKKPFSQHVRKLRASITPGTILIILTGRHRGKRVVFLKQLASGLLLVTGPLVLNRVPLRRTHQKFVIATSTKIDISNVKIPKHLTDAYFKKKKLRKPRHQEGEIFDTEKEKYEITEQRKIDQKAVDSQILPKIKAIPQLQGYLRSVFALTNGIYPHKLVF

SEQ ID NO: 39598 - protein, 27 aa, Homo sapiens
LLLFLYPLLPISGRGPLHGDGGRGPLD

SEQ ID NO: 39599 - protein, 19 aa, Homo sapiens
IKLTMAQLKISQGNIYKHV

SEQ ID NO: 39600 - protein, 9 aa, Homo sapiens
MKPPRVRAW

SEQ ID NO: 39601 - protein, 747 aa, Homo sapiens
LILTFALSVTNPLHELKAAAFPQTTEKISPNWESGINVDLAISTRQYHLQQLFYRYGENNSLSVEGFRKLLQNIGIDKIKRIHIHHDHDHHSDHEHHSDHERHSDHEHHSEHEHHSDHDHHSHHNHAASGKNKRKALCPDHDSDSSGKDPRNSQGKGAHRPEHASGRRNVKDSVSASEVTSTVYNTVSEGTHFLETIETPRPGKLFPKDVSSSTPPSVTSKSRVSRLAGRKTNESVSEPRKGFMYSRNTNENPQECFNASKLLTSHGMGIQVPLNATEFNYLCPAIINQIDARSCLIHTSEKKAEIPPKTYSLQIAWVGGFIAISIISFLSLLGVILVPLMNRVFFKFLLSFLVALAVGTLSGDAFLHLLPHSHASHHHSHSHEEPAMEMKRGPLFSHLSSQNIEESAYFDSTWKGLTALGGLYFMFLVEHVLTLIKQFKDKKKKNQKKPENDDDVEIKKQLSKYESQLSTNEEKVDTDDRTEGYLRADSQEPSHFDSQQPAVLEEEEVMIAHAHPQEVYNEYVPRGCKNKCHSHFHDTLGQSDDLIHHHHDYHHILHHHHHQNHHPHSHSQRYSREELKDAGVATLAWMVIMGDGLHNFSDGLAIGAAFTEGLSSGLSTSVAVFCHELPHELGDFAVLLKAGMTVKQAVLYNALSAMLAYLGMATGIFIGHYAENVSMWIFALTAGLFMYVALVDMVPEMLHNDASDHGCSRWGYFFLQNAGMLLGFGIMLLISIFEHKIVFRINF

SEQ ID NO: 39602 - protein, 554 aa, Homo sapiens
KMLSVRVAAAVVRALPRRAGLVSRNALGSSFIAARNFHASNTHLQKTGTAEMSSILEERILGADTSVDLEETGRVLSIGDGIARVHGLRNVQAEEMVEFSSGLKGMSLNLEPDNVGVVVFGNDKLIKEGDIVKRTGAIVDVPVGEELLGRVVDALGNAIDGKGPIGSKTRRRVGLKAPGIIPRISVREPMQTGIKAVDSLVPIGRGQRELIIGDRQTGKTSIAIDTIINQKRFNDGSDEKKKLYCIYVAIGQKRSTVAQLVKRLTDADAMKYTIVVSATASDAAPLQYLAPYSGCSMGEYFRDNGKHALIIYDDLSKQAVAYRQMSLLLRRPPGREAYPGDVFYLHSRLLERAAKMNDAFGGGSLTALPVIETQAGDVSAYIPTNVISITDGQIFLETELFYKGIRPAINVGLSVSRVGSAAQTRAMKQVAGTMKLELAQYREVAAFAQFGSDLDAATQQLLSRGVRLTELLKQGQYSPMAIEEQVAVIYAGVRGYLDKLEPSKITKFENAFLSHVVSQHQALLGTIRADGKISEQSDAKLKEIVTNFLAGFEA

SEQ ID NO: 39603 - protein, 13 aa, Homo sapiens
LAFFLYLFSSHGY

SEQ ID NO: 39604 - protein, 4 aa, Homo sapiens
MDSD

SEQ ID NO: 39605 - protein, 181 aa, Homo sapiens
TNSETNRGESEKKRNLGELSRTTSEDNEVFGEADANQNNGTSSQDTAVTDSKRTADPKNAWQDAHPADPGSRPHLIRLFSRDAPGREDNTFKDRPSESDELQTIQEDSAATSESLDVMASQKRPSQRHGSKYLATASTMDHARHGFLPRHRDTGILDSIGRFFGGDRGAPKRGSGKVSSEE

SEQ ID NO: 39606 - protein, 186 aa, Homo sapiens
VKMVRYSLDPENPTKSCKSRGSNLRVHFKNTRETAQAIKGMHIRKATKYLKDVTLQKQCVPFRRYNGGVGRCAQAKQWGWTQGRWPKKSAEFLLHMLKNAESNAELKGLDVDSLVIEHIQVNKAPKMRRRTYRAHGRINPYMSSPCHIEMILTEKEQIVPKPEEEVAQKKKISQKKLKKQKLMARE

SEQ ID NO: 39607 - protein, 230 aa, Homo sapiens
VKMVRYSLDPENPTKSCKSRGSNLRVHFKNTRETAQAIKGMHIRKATKYLKDVTLQKQCVPFRRYNGGVGRCAQAKQWGWTQGRWPKKSAEFLLHMLKNAESNAELKGLDVDSLVIEHIQVNKAPKMRRRTYRAHGRINPYMSSPCHIEMILTEKEQIVPKPEEEVAQKKKLRSSSLGKWCAFLVSSFQFCSGSTKNSWSHIYTLWFPPSLVVYGLRKQYKNPMIQTKAK

SEQ ID NO: 39608 - protein, 114 aa, Homo sapiens
ISAETFTALSVLGVMVYGIKKYGPFVADFADKLNEQNLAQLEEAKQASIQQIQNAIDMEKSQQALVQKRHYLFDVQRNNIAMALEVTYRERLYRVYKEVKNRLDYHISVQNMMC

SEQ ID NO: 39609 - protein, 270 aa, Homo sapiens
IMAAALFVLLGFALLGTHGASGAAGTVFTTVEDLGSKILLTCSLNDSATEVTGHRWLKGGVVLKEDALPGQKTEFKVDSDDQWGEYSCVFLPEPMGTANIQLHGPPRVKAVKSSEHINEGETAMLVCKSESVPPVTDWAWYKITDSEDKALMNGSESRFFVSSSQGRSELHIENLNMEADPGQYRCNGTSSKGSDQAIITLRVRSHLAALWPFLGIVAEVLVLVTIIFIYEKRRKPEDVLDDDDAGSAPLKSSGQHQNDKGKNVRQRNSS

SEQ ID NO: 39610 - protein, 174 aa, Homo sapiens
LPPAAAMLPAALLRRPGLGRLVRHARAYAEAAAAPAAASGPNQMSFTFASPTQVFFNGANVRQVDVPTLTGAFGILAAHVPTLQVLRPGLVVVHAEDGTTSKYFVSSGSIAVNADSSVQLLAEEAVTLDMLDLGAAKANLEKAQAELVGTADEATRAEIQIRIEANEALVKALE

SEQ ID NO: 39611 - protein, 146 aa, Homo sapiens
KMAEVEQKKKRTFRKFTYRGVDLDQLLDMSYEQLMQLYSARQRRRLNRGLRRKQHSLLKRLRKAKKEAPPMEKPEVVKTHLRDMIILPEMVGSMVGVYNGKTFNQVEIKPEMIGHYLGEFSITYKPVKHGRPGIGATHSSRFIPLK

SEQ ID NO: 39612 - protein, 858 aa, Homo sapiens
MERLKKAIEDEGGNPDEIEITSEGNKKTSKRSSKGRKPEEEGVEDNGLEENSGDGQEDVETSLENLQDIDIMDISVLDEAEIDNGSVADCVEDDDADNLQESLSDSRELVEGEMKELPEQLQEHAIEDKETINNLDTSSSDFTILQEIEEPSLEPENEKILDILGETCKSEPVKEESSELEQPFAQDTSSVGPDRKLAEEEDLFDSAHPEEGDLDLASESTAHAQSSKADSLLAVVKREPAEQPGDGERTDCEPVGLEPAVEQSSAASELAEASSEELAEAPTEAPSPEARDSKEDGRKFDFDACNEVPPAPKESSTSEGADQKMSSPEDDSDTKRLSKEEKGRSSCGRNFWVSGLSSTTRATDLKNLFSKYGKVVGAKVVTNARSPGARCYGFVTMSTAEEATKCINHLHKTELHGKMISVEKAKNEPVGKKTSDKRDSDGKKEKSSNSDRSTNLKRDDKCDRKDDAKKGDDGSGEKSKDQDDQKPGPSERSRATKSGSRGTERTVVMDKSKGVPVISVKTSGSKERASKSQDRKSASREKRSVVSFDKVKEPRKSRDSESHSRVRERSEREQRMQAQWEREERERLEIARERLAFQRQRLERERMERERLERERMHVEHERRREQERIHREREELRRQQELRYEQERRPAVRRPYDLDRRDDAYWPEAKRAALDERYHSDFNRQDRFHDFDHRDRGRYPDHSVDRREGSRSMMGEREGQHYPERHGGPERHGRDSRDGWGGYGSDKRMSEGRGLPPPPRRDWGDHGRREDDRSWQGTADGGMMDRDHKRWQGGERSMSGHSGPGHMMNRGGMSGRGSFAPGGASRGHPIPHGGMQGGFGGQSRGSRPSDARFTRRY

SEQ ID NO: 39613 - protein, 32 aa, Homo sapiens
LPVSAAIRTPGSSVQPWPYATLWPWASTRATK

SEQ ID NO: 39614 - protein, 70 aa, Homo sapiens
IMDTSRVQPIKLARVTKVLGRTGSQGQCTQVRVEFMDDTSRSIIRNVKGPVREGDVLTLLESEREARRLR

SEQ ID NO: 39615 - protein, 801 aa, Homo sapiens
MTEQFLQDTRLALWRQQGAGMTDKCRQLWDELGALWVCVVLSPHCKPEERAGWLQLLSRWDKLDVCPLEEGNYSFDGPSLQPTMAPAPGSEEEEEVAATSPRHTVFGRALLAGELHWNDAYLQRILASDSYGPSLTGSVGGDKPTFDPQGRPLWLGEPFPTACARVDTLRAHGYPRQALRLASAIINTLRLQQRHQLESYKQQKKELLQKGSTCITNTEGWVGHPLDPIGCLCRALLEACRLEEETLTLYPDSGPEKRKVAYQHVPVPGSPGESYLVLALEVALLGLGQQRALPEGLYAQDKVVRNEEQLLALLEEVELDERLVQVLRKQAGLLLEGGPFSGFGEVLFRESVPMHTCARYLFTALLPHDPDLAYRLALRAMRLPILETAFPAGEPHPSPLDSIMSNRFPRWFILGHLETRQCELASTMLTAAKGDPKWLHTVLGSIQQNIHSPALLFKLAQDACKTATPVSAPPDTTLLGIALELGLQVMRMTLNVMTWRRREMVRWLVSCATEIGPQALMNIMQNWYSLFTPVEAATIVAVTGTTHATLLRLQLDTSRREELWACARTLALQCAMKDPQNCALPALTLCEKNHSAFEAAYQIVLDAAAGGLGHAHLFTVARYMEHRGLPLRAYKLATLALAQLSIAFNQDSHPAVNDVLWACSLSHSLGRHELSAIVPLIIRSIHCAPMLSDILRRWTLSAPGLGPLGARRAAKPLGADRAPLCQLLDAAVTAYITTSHSRLTHISPRHYGDFIEFLGKARETFLLAPDGHLQFSQFLENLKQTYKGKKKLMLLVRERFG

SEQ ID NO: 39616 - protein, 205 aa, Homo sapiens
KTYDYLFKLLLIGDSGVGKTCVLFRFSEDAFNSTFISTIGIDFKIRTIELDGKRIKLQIWDTAGQERFRTITTAYYRGAMGIMLVYDITNEKSFDNIRNWIRNIEEHASADVEKMILGNKCDVNDKRQVSKERGEKLALDYGIKFMETSAKANINVENAFFTLARDIKAKMDKKLEGNSPQGSNQGVKITPDQQKRSSFFRCVLL

SEQ ID NO: 39617 - protein, 116 aa, Homo sapiens
LESVMEAYEQVQKGPLKLKGVAELGVTKRKKKKKDKDKAKLLEAMGTSKKNEEEKRRGLDKRTPAQAAFEKMQEKRQMERILKKASKTHKQRVEDFNRHLDTLTEHYDIPKVSWTK

SEQ ID NO: 39618 - protein, 216 aa, Homo sapiens
MDPQLERQVETIRNLVDSYVAIINKSIRDLMPKTIMHLMINNTKAFIHHELLAYLYSSADQSSLMEESADQAQRRDDMLRMYHALKEALNIIGDISTSTVSTPVPPPVDDTWLQSASSHSPTPQRRPVSSIHPPGRPPAVRGPTPGPPLIPVPVGAAASFSAPPIPSRPGPQSVFANSDLFPAPPQIPSRPVRIPPGIPPGVPRRPPPSAPARPFF

SEQ ID NO: 39619 - protein, 4 aa, Homo sapiens
MAAS

SEQ ID NO: 39620 - protein, 184 aa, Homo sapiens
LGFCDERLVPFDHAESTYGLYRTHLLSRLPIPESQVITINPELPVEEAAEDYAKKLRQAFQGDSIPVFDLLILGVGPDGHTCSLFPDHPLLQEREKIVAPISDSPKPPPQRVTLTLPVLNAARTVIFVATGEGKAAVLKRILEDQEENPLPAALVQPHTGKLCWFLDEAAARLLTVPFEKHSTL

SEQ ID NO: 39621 - protein, 155 aa, Homo sapiens
TDTSYTRAVDWWGLGVLLYEMLVGESPFPGDDEEEVFDSIVNDEVRYPRFLSAEAIGIMRRLLRRNPERRLGSSERDAEDVKKQPFFRTLGWEALLARRLPPPFVPTLSGRTDVSNFDEEFTGEAPTLSPPRDARPLTAAEQAAFLDFDFVAGGC

SEQ ID NO: 39622 - protein, 25 aa, Homo sapiens
MCRQRRRRKRWTSRTRPRGSSAAAS

SEQ ID NO: 39623 - protein, 286 aa, Homo sapiens
VLSSLLSGALAGALAKTAVAPLDRTKIIFQVSSKRFSAKEAFRVLYYTYLNEGFLSLWRGNSATMVRVVPYAAIQFSAHEEYKRILGSYYGFRGEALPPWPRLFAGALAGTTAASLTYPLDLVRARMAVTPKEMYSNIFHVFIRISREEGLKTLYHGFMPTVLGVIPYAGLSFFTYETLKSLHREYSGRRQPYPFERMIFGACAGLIGQSASYPLDVVRRRMQTAGVTGYPRASIARTLRTIVREEGAVRGLYKGLSMNWVKGPIAVGISFTTFDLMQILLRHLQS

SEQ ID NO: 39624 - protein, 255 aa, Homo sapiens
RKSDGIYIINLKRTWEKLLLAARAIVAIENPADVSVISSRNTGQRAVLKFAAATGATPIAGRFTPGTFTNQIQAAFWEPRLLVVTDPRADHQPLTEASYVNLPTIALCNTDSPLRYVDIAIPCNNKGAHSVGLMWWMLAREVLRMRGTISREHPWEVMPDLYFYRDPEEIEKEEQAAAEKAVTKEEFQGEWTAPSPEFTATQPEVADWSEGVQVPSVPIQQFPTEDWSAQPATEDWSAAPTAQATEWVGATTDWS

SEQ ID NO: 39625 - protein, 4 aa, Homo sapiens
MILC

SEQ ID NO: 39626 - protein, 14 aa, Homo sapiens
TPRNVLKPWPSGER

SEQ ID NO: 39627 - protein, 18 aa, Homo sapiens
MPKKLRSGLLGCLELVGL

SEQ ID NO: 39628 - protein, 8 aa, Homo sapiens
MFTAVYPG

SEQ ID NO: 39629 - protein, 27 aa, Homo sapiens
TRPPRAAMSPAPRCCLERGGTWREAAP

SEQ ID NO: 39630 - protein, 208 aa, Homo sapiens
KRLPKMAEVQVLVLDGRGHLLGRLAAIVAKQVLLGRKVVVVRCEGINISGNFYRNKLKYLAFLRKRMNTNPSRGPYHFRAPSRIFWRTVRGMLPHKTKRGQAALDRLKVFDGIPPPYDKKKRMVVPAALKVVRLKPTRKFAYLGRLAHEVGWKYQAVTATLEEKRKEKAKIHYRKKKQLMRLRKQAEKNVEKKIDKYTEVLKTHGLLV

SEQ ID NO: 39631 - protein, 11 aa, Homo sapiens
RRHWRRTKLGL

SEQ ID NO: 39632 - protein, 331 aa, Homo sapiens
VDSSAKTAAMPVTVTRTTITTTTTSSSGLGSPMIVGSPRALTQPLGLLRLLQLVSTCVAFSLVASVGAWTGSMGNWSMFTWCFCFSVTLIILIVELCGLQARFPLSWRNFPITFACYAALFCLSASIIYPTTYVQFLSHGRSRDHAIAATFFSCIACVAYATEVAWTRARPGEITGYMATVPGLLKVLETFVACIIFAFISDPNLYQHQPALEWCVAVYAICFILAAIAILLNLGECTNVLPIPFPSFLSGLALLSVLLYATALVLWPLYQFDEKYGGQPRRSRDVSCSRSHAYYVCAWDRRLAVAILTAINLLAYVADLVHSAHLVFVKV

SEQ ID NO: 39633 - protein, 85 aa, Homo sapiens
KMAARVGAFLKNAWDKEPVLVVSFVVGGLAVILPPLSPYFKYSVMINKATPYNYPVPVRDDGNMPDVPSHPQDPQGPSLEWLKKL

SEQ ID NO: 39634 - protein, 205 aa, Homo sapiens
RMTEWETAAPAVAETPDIKLFGKWSTDDVQINDISLQDYIAVKEKYAKYLPHSAGRYAAKRFRKAQCPIVERLTNSMMMHGRNNGKKLMTVRIVKHAFEIIHLLTGENPLQVLVNAIINSGPREDSTRIGRAGTVRRQAVDVSPLRRVNQAIWLLCTGAREAAFRNIKTIAECLADELINAAKGSSNSYAIKKKDELERVAKSNR

SEQ ID NO: 39635 - protein, 4 aa, Homo sapiens
LAVP

SEQ ID NO: 39636 - protein, 80 aa, Homo sapiens
KLDPGLIMEQVKVQIAVANAQELLQRMTDKCFRKCIGKPGGSLDNSEQKCIAMCMDRYMDAWNTVSRAYNSRLQRERANM

SEQ ID NO: 39637 - protein, 330 aa, Homo sapiens
LKNTMSNGYEDHMAEDCRGDIGRTNLIVNYLPQNMTQDELRSLFSSIGEVESAKLIRDKVAGHSLGYGFVNYVTAKDAERAINTLNGLRLQSKTIKVSYARPSSEVIKDANLYISGLPRTMTQKDVEDMFSRFGRIINSRVLVDQTTGLSRGVAFIRFDKRSEAEEAITSFNGHKPPGSSEPITVKFAANPNQNKNVALLSQLYHSPARRFGGPVHHQAQRFRFSPMGVDHMSGLSGVNVPGNASSGWCIFIYNLGQDADEGILWQMFGPFGAVTNVKVIRDFNTNKCKGFGFVTMTNYEEAAMAIASLNGYRLGDKILQVSFKTNKSHK

SEQ ID NO: 39638 - protein, 64 aa, Homo sapiens
TDELVELHRRLMALRERNVLQQIVNLIEETGHFNVTNTTFDFDLFSLDETTVRKLQSCLEAVAT

SEQ ID NO: 39639 - protein, 56 aa, Homo sapiens
VLLSVVVLLHALLAMGCKLYFFQSLPPENVAPPPQITSLPSNIALSPTLPQSLAPS

SEQ ID NO: 39640 - protein, 512 aa, Homo sapiens
LEGVMADGQVAELLLRRLEASDGGLDSAELAAELGMEHQAVVGAVKSLQALGEVIEAELRSTKHWELTAEGEEIAREGSHEARVFRSIPPEGLAQSELMRLPSGKVGFSKAMSNKWIRVDKSAADGPRVFRVVDSMEDEVQRRLQLVRGGQAEKLGEKERSELRKRKLLAEVTLKTYWVSKGSAFSTSISKQETELSPEMISSGSWRDRPFKPYNFLAHGVLPDSGHLHPLLKVRSQFRQIFLEMGFTEMPTDNFIESSFWNFDALFQPQQHPARDQHDTFFLRDPAEALQLPMDYVQRVKRTHSQGGYGSQGYKYNWKLDEARKNLLRTHTTSASARALYRLAQKKPFTPVKYFSIDRVFRNETLDATHLAEFHQIEGVVADHGLTLGHLMGVLREFFTKLGITQLRFKPAYNPYTEPSMEVFSYHQGLKKWVEVGNSGVFRPEMLLPMGLPENVSVIAWGLSLERPTMIKYGINNIRELVGHKVNLQMVYDSPLCRLDAEPRPPPTQEAA

SEQ ID NO: 39641 - protein, 193 aa, Homo sapiens
TDCKMEEGGNLGGLIKMVHLLVLSGAWGMQMWVTFVSGFLLFRSLPRHTFGLVQSKLFPFYFHISMGCAFINLCILASQHAWAQLTFWEASQLYLLFLSLTLATVNARWLEPRTTAAMWALQTVEKERGLGGEVPGSHQGPDPYRQLREKDPKYSALRQNFFRYHGLSSLCNLGCVLSNGLCLAGLALEIRSL

SEQ ID NO: 39642 - protein, 76 aa, Homo sapiens
TMIGDILLFGTLLMNAGAVLNFKLKKKDTQGFGEESREPSTGDNIREFLLSLRYFRIFIALWNIFMMFCMIVLFGS

SEQ ID NO: 39643 - protein, 375 aa, Homo sapiens
LWYALSAGGNVVNKVILSAFPFPVTVSLCHILALCAGLPPLLRAWRVPPAPPVSGPGPSPHPSSGPLLPPRFYPRYVLPLAFGKYFASVSAHVSIWKVPVSYAHTVKATMPIWVVLLSRIIMKEKQSTKVYLSLIPIISGVLLATVTELSFDMWGLVSALAATLCFSLQNIFSKKVLRDSRIHHLRLLNILGCHAVFFMIPTWVLVDLSAFLVSSDLTYVYQWPWTLLLLAVSGFCNFAQNVIAFSILNLVSPLSYSVANATKRIMVITVSLIMLRNPVTSTNVLGMMTAILGVFLYNKTKYDANQQARKHLLPVTTADLSSKERHRSPLEKPHNGLLFPQHGDYQYGRNNILTDHFQYSRQSYPNSYSLNRYDV

SEQ ID NO: 39644 - protein, 4 aa, Homo sapiens
KLGL

SEQ ID NO: 39645 - protein, 25 aa, Homo sapiens
MLQFFVHFLSLVYLYREAQARSPEK

SEQ ID NO: 39646 - protein, 11 aa, Homo sapiens
MKKKRVSASCV

SEQ ID NO: 39647 - protein, 4 aa, Homo sapiens
MKDL

SEQ ID NO: 39648 - protein, 558 aa, Homo sapiens
MVKMAAAGGGGGGGRYYGGGSEGGRAPKRLKTDNAGDQHGGGGGGGGGAGAAGGGGGGENYDDPHKTPASPVVHIRGLIDGVVEADLVEALQEFGPISYVVVMPKKRQALVEFEDVLGACNAVNYAADNQIYIAGHPAFVNYSTSQKISRPGDSDDSRSVNSVLLFTILNPIYSITTDVLYTICNPCGPVQRIVIFRKNGVQAMVEFDSVQSAQRAKASLNGADIYSGCCTLKIEYAKPTRLNVFKNDQDTWDYTNPNLSGQGDPGSNPNKRQRQPPLLGDHPAEYGGPHGGYHSHYHDEGYGPPPPHYEGRRMGPPVGGHRRGPSRYGPQYGHPPPPPPPPEYGPHADSPVLMVYGLDQSKMNCDRVFNVFCLYGNVEKVKFMKSKPGAAMVEMADGYAVDRAITHLNNNFMFGQKLNVCVSKQPAIMPGQSYGLEDGSCSYKDFSESRNNRFSTPEQAAKNRIQHPSNVLHFFNAPLEVTEENFFEICDELGVKRPSSVKVFSGKSERSSSGLLEWESKSDALETLGFLNHYQMKNPNGPYPYTLKLCFSTAQHAS

SEQ ID NO: 39649 - protein, 288 aa, Homo sapiens
VPQPSGPPARKKFVIPLDEDEVPPGVAKPLFRSTQSLPTVDTSAQAAPQTYAEYAISQPLEGAGATCPTGSEPLAGETPNQALKPGAKSNSIIVSPRQRGNPVLKFVRNVPWEFGDVIPDYVLGQSTCALFLSLRYHNLHPDYIHGRLQSLGKNFALRVLLVQVDVKDPQQALKELAKMCILADCTLILAWSPEEAGRYLETYKAYEQKPADLLMEKLEQDFVSRVTECLTTVKSVNKTDSQTLLTTFGSLEQLIAASREDLALCPGLGPQKARRLFDVLHEPFLKVP

SEQ ID NO: 39650 - protein, 121 aa, Homo sapiens
VTIMSLLNKPKSEMTPEELQKREEEEFNTGPLSVLTQSVKNNTQVLINCRNNKKLLGRVKAFDRHCNMVLENVKEMWTEVPKSGKGKKKSKPVNKDRYISKMFLRGDSVIVVLRNPLIAGK

SEQ ID NO: 39651 - protein, 18 aa, Homo sapiens
IFSRIPALPPPAHEIPRI

SEQ ID NO: 39652 - protein, 302 aa, Homo sapiens
LSPFVAAMDNSGKEAEAMALLAEAERKVKNSQSFFSGLFGGSSKIEEACEIYARAANMFKMAKNWSAAGNAFCQAAQLHLQLQSKHDAATCFVDAGNAFKKADPQEAINCLMRAIEIYTDMGRFTIAAKHHISIAEIYETELVDIEKAIAHYEQSADYYKGEESNSSANKCLLKVAGYAALLEQYQKAIDIYEQVGTNAMDSPLLKYSAKDYFFKAALCHFCIDMLNAKLAVQKYEELFPAFSDSRECKLMKKLLEAHEEQNVDSYTESVKEYDSISRLDQWLTTMLLRIKKTIQGDEEDLR

SEQ ID NO: 39653 - protein, 189 aa, Homo sapiens
IMGVDIRHNKDRKVRRKEPKSQDIYLRLLVKLYRFLARRTNSTFNQVVLKRLFMSRTNRPPLSLSRMIRKMKLPGRENKTAVVVGTITDDVRVQEVPKLKVCALRVTSRARSRILRAGGKILTFDQLALDSPKGCGTVLLSGPRKGREVYRHFGKAPGTPHSHTKPYVRSKGRKFERARGRRASRGYKN

SEQ ID NO: 39654 - protein, 37 aa, Homo sapiens
LGGGGVAGAAAASGLGLLGRLLPGEQLRPCRLKNGRI

SEQ ID NO: 39655 - protein, 25 aa, Homo sapiens
VHYTGMLEDGKKFDSSRDRNKPLNF

SEQ ID NO: 39656 - protein, 278 aa, Homo sapiens
TPKSRALMAGLEVLFASAAPAITCRQDALVCFLHWEVVTHGYFGLGVGDQPGPNDKKSELLPAGWNNNKDLYVLRYEYKDGSRKLLVKAITVESSMILNVLEYGSQQVADLTLNLDDYIDAEHLGDFHRTYKNSEELRSRIVSGIITPIHEQWEKANVSSPHREFPPATAREVDPLRIPPHHPHTSRQPPWCDPLGPFVVGGEDLDPFGPRRGGMIVDPLRSGFPRALIDPSSGLPNRLPPGAVPPGARFDPFGPIGTSPPGPNPDHLPPPGYDDMYL

SEQ ID NO: 39657 - protein, 46 aa, Homo sapiens
MQVSAWIPPALWTPTWRSRRLNRPSRQPAGSFETSSLPSDASSLCR

SEQ ID NO: 39658 - protein, 257 aa, Homo sapiens
LAPRPFSPLLQLGADEARSWDFLLSPEEFNTNMDIRPNHTIYINNMNDKIKKEELKRSLYALFSQFGHVVDIVALKTMKMRGQAFVIFKELGSSTNALRQLQGFPFYGKPMRIQYAKTDSDIISKMRGTFADKEKKKEKKKAKTVEQTATTTNKKPGQGTPNSANTQGNSTPNPQVPDYPPNYILFLNNLPEETNEMMLSMLFNQFPGFKEVRLVPGRHDIAFVEFENDGQAGAARDALQGFKITPSHAMKITYAKK

SEQ ID NO: 39659 - protein, 54 aa, Homo sapiens
MDLTYVSLLLQEFGFPRSKVLKLTRKIDNVETSWALGAIFHYIDSLNRQKSPAS

SEQ ID NO: 39660 - protein, 165 aa, Homo sapiens
MVRKILNLRVFEDESGKHWSKSVMDKQYEILCVSQFTLQCVLKGNKPDFHLAMPTEQAEGFYNSFLEQLRKTYRPELIKDGKFGAYMQVHIQNDGPVTIELESPAPGTATSDPKQLSKLEKQQQRKEKTRAKGPSESSKERNTPRKEDRSASSGAEGDVSSEREP

SEQ ID NO: 39661 - protein, 167 aa, Homo sapiens
LFRFNNINLDPLTETYGIPFYLQYLAHWPEYFIVAEAPGGELMGYIMGKAEGSVAREEWHGHVTALSVAPEFRRLGLAAKLMELLEEISERKGGFFVDLFVRVSNQVAVNMYKQLGYSVYRTVIEYYSASNGEPDEDAYDMRKALSRDTEKKSIIPLPHPVRPEDIE

SEQ ID NO: 39662 - protein, 25 aa, Homo sapiens [sequence omitted]

SEQ ID NO: 39663 - protein, 115 aa, Homo sapiens
LANGALKVSVWSKVLRSDAAWEDKDEFLDVIYWFRQIIAVVLGVIWGVLPLRGFLGIAGFCLINAGVLYLYFSNYLQIDEEEYGGTWELTKEGFMTSFALFMVIWIIFYTAIHYD

SEQ ID NO: 39664 - protein, 802 aa, Homo sapiens
LRLLEPPESPSARTGRFAVCVSPTPPRLPPRSSLRADMSGDHLHNDSQIEADFRLNDSHKHKDKHKDREHRHKEHKKEKDREKSKHSNSEHKDSEKKHKEKEKTKHKDGSSEKHKDKHKDRDKEKRKEEKVRASGDAKIKKEKENGFSSPPQIKDEPEDDGYFVPPKEDIKPLKRPRDEDDADYKPKKIKTEDTKKEKKRKLEEEEDGKLKKPKNKDKDKKVPEPDNKKKKPKKEEEQKWKWWEEERYPEGIKWKFLEHKGPVFAPPYEPLPENVKFYYDGKVMKLSPKAEEVATFFAKMLDHEYTTKEIFRKNFFKDWRKEMTNEEKNIITNLSKCDFTQMSQYFKAQTEARKQMSKEEKLKIKEENEKLLKEYGFCIMDNHKERIANFKIEPPGLFRGRGNHPKMGMLKRRIMPEDIIINCSKDAKVPSPPPGHKWKEVRHDNKVTWLVSWTENIQGSIKYIMLNPSSRIKGEKDWQKYETARRLKKCVDKIRNQYREDWKSKEMKVRQRAVALYFIDKLALRAGNEKEEGETADTVGCCSLRVEHINLHPELDGQEYVVEFDFLGKDSIRYYNKVPVEKRVFKNLQLFMENKQPEDDLFDRLNTGILNKHLQDLMEGLTAKVFRTYNASITLQQQLKELTAPDENIPAKILSYNRANRAVAILCNHQRAPPKTFEKSMMNLQTKIDAKKEQLADARRDLKSAKADAKVMKDAKTKKVVESKKKAVQRLEEQLMKLEVQATDREENKQIALGTSKLNYLDPRITVAWCKKWGVPIEKIYNKTQREKFAWAIDMADEDYEF

SEQ ID NO: 39665 - protein, 346 aa, Homo sapiens
TDMPRVYIGRLSYNVREKDIQRFFSGYGRLLEVDLKNGYGFVEFEDSRDADDAVYELNGKELCGERVIVEHARGPRRDRDGYSYGSRSGGGGYSSRRTSGRDKYGPPVRTEYRLIVENLSSRCSWQDLKDFMRQAGEVTYADAHKERTNEGVIEFRSYSDMKRALDKLDGTEINGRNIRLIEDKPRTSHRRSYSGSRSRSRSRRRSRSRSRRSSRSRSRSISKSRSRSRSRSKGRSRSRSKGRKSRSKSKSKPKSDRGSHSHSRSRSKDEYEKSRSRSRSRSPKENGKGDIKSKSRSRSQSRSNSPLPVPPSKARSVSPPPKRATSRSRSRSRSKSRSRSRSSSRD

SEQ ID NO: 39666 - protein, 405 aa, Homo sapiens
LSALLALVLRARAGSQTPQTLLLPAAAFRRGETPRFKMSLFGTTSGFGTSGTSMFGSATTDNHNPMKDIEVTSSPDDSIGCLSFSPPTLPGNFLIAGSWANDVRCWEVQDSGQTIPKAQQMHTGPVLDVCWSDDGSKVFTASCDKTAKMWDLSSNQAIQIAQHDAPVKTIHWIKAPNYSCVMTGSWDKTLKFWDTRSSNPMMVLQLPERCYCADVIYPMAVVATAERGLIVYQLENQPSEFRRIESPLKHQHRCVAIFKDKQNKPTGFALGSIEGRVAIHYINPPNPAKDNFTFKCHRSNGTNTSAPQDIYAVNGIAFHPVHGTLATVGSDGRFSFWDKDARTKLKTSEQLDQPISACCFNHNGNIFAYASSYDWSKGHEFYNPQKKNYIFLRNAAEELKPRNKK

SEQ ID NO: 39667 - protein, 216 aa, Homo sapiens
MHGSQKDTTFTKIFVGGLPYHTTDASLRKYFEGFGDIEEAVVITDRQTGKSRGYGFVTMADRAAAERACKDPNPIIDGRKANVNLAYLGAKPRSLQTGFAIGVQQLHPTLIQRTYGLTPHYIYPPAIVQPSVVIPAAPVPSLSSPYIEYTPASPAYAQYPPATYDQYPYAASPATAASFVGYSYPAAVPQALSAAAPAGTTFVQYQAPQLQPDRMQ

SEQ ID NO: 39668 - protein, 590 aa, Homo sapiens
MAGAVPGAIMDEDYYGSAAEWGDEADGGQQEDDSGEGEDDAEVQQECLHKFSTRDYIMEPSIFNTLKRYFQAGGSPENVIQLLSENYTAVAQTVNLLAEWLIQTGVEPVQVQETVENHLKSLLIKHFDPRKADSIFTEEGETPAWLEQMIAHTTWRDLFYKLAEAHPDCLMLNFTVKLISDAGYQGEITSVSTACQQLEVFSRVLRTSLATILDGGEENLEKNLPEFAKMVCHGEHTYLFAQAMMSVLAQEEQGGSAVRRIAQEVQRFAQEKGHDASQITLALGTAASYPRACQALGAMLSKGALNPADITVLFKMFTSMDPPPVELIRVPAFLDLFMQSLFKPGARINQDHKHKYIHILAYAASVVETWKKNKRVSINKDELKSTSKAVETVHNLCCNENKGASELVAELSTLYQCIRFPVVAMGVLKWVDWTVSEPRYFQLQTDHTPVHLALLDEISTCHQLLHPQVLQLLVKLFETEHSQLDVMEQLELKKTLLDRMVHLLSRGYVLPVVSYIRKCLEKLDTDISLIRYFVTEVLDVIAPPYTSDFVQLFLPILENDSIAGTIKTEGEHDPVTEFIAHCKSNFIMVN

SEQ ID NO: 39669 - protein, 37 aa, Homo sapiens
IDDRVQSHILHLEHDLVHVTRKNHARQAGVRGLGHQS

SEQ ID NO: 39670 - protein, 136 aa, Homo sapiens
VGAMLSPEAERVLRYLVEVEELAEEVLADKRQIVDLDTKRNQNREGLRALQKDLSLSEDVMVCFGNMFIKMPHPETKEMIEKDQDHLDKEIEKLRKQLKVKVNRLFEAQGKPELKGFNLNPLNQDELKALKVILKG

SEQ ID NO: 39671 - protein, 8 aa, Homo sapiens
VVRRFFKS

SEQ ID NO: 39672 - protein, 186 aa, Homo sapiens
VTPGAGVMAATEPILAATGSPAAVPPEKLEGAGSSSAPERNCVGSSLPEASPPAPEPSSPNAAVPEAIPTPRAAASAALELPLGPAPVSVAPQAEAEARSTPGPAGSRLGPETFRQRFRQFRYQDAAGPREAFRQLRELSRQWLRPDIRTKEQIVEMLVQEQLLAILPEAARARRIRRRTDVRITG

SEQ ID NO: 39673 - protein, 11 aa, Homo sapiens
MAGLAGSLLPW

SEQ ID NO: 39674 - protein, 32 aa, Homo sapiens [sequence omitted]

SEQ ID NO: 39675 - protein, 437 aa, Homo sapiens
TSAASMSDKLPYKVADIGLAAWGRKALDIAENEMPGLMRMRERYSASKPLKGARIAGCLHMTVETAVLIETLVTLGAEVQWSSCNIFSTQDHAAAAIAKAGIPVYAWKGETDEEYLWCIEQTLYFKDGPLNMILDDGGDLTNLIHTKYPQLLPGIRGISEETTTGVHNLYKMMANGILKVPAINVNDSVTKSKFDNLYGCRESLIDGIKRATDVMIAGKVAVVAGYGDVGKGCAQALRGFGARVIITEIDPINALQAAMEGYEVTTMDEACQEGNIFVTTTGCIDIILGRHFEQMKDDAIVCNIGHFDVEIDVKWLNENAVEKVNIKPQVDRYRLKNGRRIILLAEGRLVNLGCAMGHPSFVMSNSFTNQVMAQIELWTHPDKYPVGVHFLPKKLDEAVAEAHLGKLNVKLTKLTEKQAQYLGMSCDGPFKPDHYRY

SEQ ID NO: 39676 - protein, 31 aa, Homo sapiens
ICLTKSMDNMTVRVPETVADARQSIDVGKTS

SEQ ID NO: 39677 - protein, 592 aa, Homo sapiens
ILSGLAVLGTRYSGWAVPRPGPRGLTVATEAAAAAAAAAAAAISSRTRAPQAPEGRNRRLEKMADDIDIEAMLEAPYKKDENKLSSANGHEERSKKRKKSKSRSRSHERKRSKSKERKRSRDRERKKSKSRERKRSRSKERRRSRSRSRDRRFRGRYRSPYSGPKFNSAIRGKIGLPHSIKLSRRRSRSKSPFRKDKSPVREPIDNLTPEERDARTVFCMQLAARIRPRDLEEFFSTVGKVRDVRMISDRNSRRSKGIAYVEFVDVSSVPLAIGLTGQRVLGVPIIVQASQAEKNRAAAMANNLQKGSAGPMRLYVGSLHFNITEDMLRGIFEPFGRIESIQLMMDSETGRSKGYGFITFSDSECAKKALEQLNGFELAGRPMKVGHVTERTDASSASSFLDSDELERTGIDLGTTGRLQLMARLAEGTGLQIPPAAQQALQMSGSLAFGAVAEFSFVIDLQTRLSQQTEASALAAAASVQPLATQCFQLSNMFNPQTEEEVGWDTEIKDDVIEECNKHGGVIHIYVDKNSAQGNVYVKCPSIAAAIAAVNALHGRWFAGKMITAAYVPLPTYHNLFPDSMTATQLLVPSRR

SEQ ID NO: 39678 - protein, 31 aa, Homo sapiens
MVRYIRRIQFMTMTLSPTLLDSQIRVTVTPQ

SEQ ID NO: 39679 - protein, 35 aa, Homo sapiens
IEKFDKSKLKKTETQEKNPLPSKETIEQEKQAGES

SEQ ID NO: 39680 - protein, 150 aa, Homo sapiens
RILLPSFSSFMSRVLQKDAEQESQMRAEIQDMKQELSTVNMMDEFARYARLERKINKMTDKLKTHVKARTAQLAKIKWVISVAFYVLQAALMISLIWKYYSVPVAVVPSKWITPLDRLVAFPTRVAGGVGITCWILVCNKVVAIVLHPFS

SEQ ID NO: 39681 - protein, 121 aa, Homo sapiens
KSAPAPKKGSKKAVTKAQKKDGRKRKRSRKESYSVYVYKVLKQVHPDTGISSKAMGIMNSFVNDIFERIAGEASRLPHYNKRSTITSREIQTAVRLLLPGELAKHAVSEGTKAVTKYTSAK

SEQ ID NO: 39682 - protein, 9 aa, Homo sapiens
MYLSVGGLC

SEQ ID NO: 39683 - protein, 121 aa, Homo sapiens; identical to SEQ ID NO: 39681

SEQ ID NO: 39684 - protein, 105 aa, Homo sapiens
IPSVAAKMMCGAPSATQPATAETQHIADQVRSQLEEKENKKFPVFKAVSFKSQVVAGTNYFIKVHVGDEDFVHLRVFQSLPHENKPLTLSNYQTNKAKHDELTYF

SEQ ID NO: 39685 - protein, 44 aa, Homo sapiens
MPPCPARTTPPRAVQPPPRHPSRPSSVPQSHIATEAPTGSCPRS

SEQ ID NO: 39686 - protein, 57 aa, Homo sapiens
VNPLFEKRPKNFGIGQDIQPKRDLTHFVKWPRYIRLQRQRAILYKRLKVPPAINQFT

SEQ ID NO: 39687 - protein, 19 aa, Homo sapiens
MCIIFFKFDPRPVSKNAYR

SEQ ID NO: 39688 - protein, 155 aa, Homo sapiens
KMAASRRLMKELEEIRKCGMKNFRNIQVDEANLLTWQGLIVPDNPPYDKGAFRIEINFPAEYPFKPPKITFKTKIYHPNIDEKGQVCLPVISAENWKPATKTDQVIQSLIALVNDPQPEHPLRADLAEEYSKDRKKFCKNAEEFTKKYGEKRPVD

SEQ ID NO: 39689 - protein, 10 aa, Homo sapiens
LRPVQQLQGG

SEQ ID NO: 39690 - protein, 192 aa, Homo sapiens
LNMNPQIRNPMKAMYPGTFYFQFKNLWEANDRNETWLCFTVEGIKRRSVVSWKTGVFRNQVDSETHCHAERCFLSWFCDDILSPNTKYQVTWYTSWSPCPDCAGEVAEFLARHSNVNLTIFTARLYYFQYPCYQEGLRSLSQEGVAVEIMDYEDFKYCWENFVYNDNEPFKPWKGLKTNFRLLKRRLRESLQ

SEQ ID NO: 39691 - protein, 1145 aa, Homo sapiens
LSRAMDDSGELGGLETMETLTELGDELTLGDIDEMLQFVSNQVGEFPDLFSEQLCSSFPGSGGSGSSSGSSGSSSSSSNGRGSSSGAVDPSVQRSFTQVTLPSFSPSAASPQAPTLQVKVSPTSVPTTPRATPILQPRPQPQPQPQTQLQQQTVMITPTFSTTPQTRIIQQPLIYQNAATSFQVLQPQVQSLVTSSQVQPVTIQQQVQTVQAQRVLTQTANGTLQTLAPATVQTVAAPQVQQVPVLVQPQIIKTDSLVLTTLKTDGSPVMAAVQNPALTALTTPIQTAALQVPTLVGSSGTILTTMPVMMGQEKVPIKQVPGGVKQLEPPKEGERRTTHNIIEKRYRSSINDKIIELKDLVMGTDAKMHKSGVLRKAIDYIKYLQQVNHKLRQENMVLKLANQKNKLLKGIDLGSLVDNEVDLKIEDFNQNVLLMSPPASDSGSQAGFSPYSIDSEPGSPLLDDAKVKDEPDSPPVALGMVDRSRILLCVLTFLCLSFNPLTSLLQWGGAHDSDQHPHSGSGRSVLSFESGSGGWFDWMMPTLLLWLVNGVIVLSVFVKLLVHGEPVIRPHSRSSVTFWRHRKQADLDLARGDFAAAAGNLQTCLAVLGRALPTSRLDLACSLSWNVIRYSLQKLRLVRWLLKKVFQCRRATPATEAGFEDEAKTSARDAALAYHRLHQLHITGKLPAGSACSDVHMALCAVNLAECAEEKIPPSTLVEIHLTAAMGLKTRCGGKLGFLASYFLSRAQSLCGPEHSAVPDSLRWLCHPLGQKFFMERSWSVKSAAKESLYCAQRNPADPIAQVHQAFCKNLLERAIESLVKPQAKKKAGDQEEESCEFSSALEYLKLLHSFVDSVGVMSPPLSRSSVLKSALGPDIICRWWTSAITVAISWLQGDDAAVRSHFTKVERIPKALEVTESPLVKAIFHACRAMHASLPGKADGQQSSFCHCERASGHLWSSLNVSGATSDPALNHVVQLLTCDLLLSLRTALWQKQASASQAVGETYHASGAELAGFQRDLGSLRRLAHSFRPAYRKVFLHEATVRLMAGASPTRTHQLLEHSLRRRTTQSTKHGEVDAWPGQRERATAILLACRHLPLSFLSSPGQRAVLLAEAARTLEKVGDRRSCNDCQQMIVKLGGGTAIAAS

SEQ ID NO: 39692 - protein, 9 aa, Homo sapiens
MDPFHEKFL

SEQ ID NO: 39693 - protein, 320 aa, Homo sapiens
LPERSGVCQVVSIMFSFNMFDHPIPRVFQNRFSTQYRCFSVSMLAGPNDRSDVEKGGKIIMPPSALDQLSRLNITYPMLFKLTNKNSDRMTHCGVLEFVADEGICYLPHWMMQNLLLEEGGLVQVESVNLQVATYSKFQPQSPDFLDITNPKAVLENALRNFACLTTGDVIAINYNEKIYELRVMETKPDKAVSIIECDMNVDFDAPLGYKEPERQVQHEESTEGEADHSGYAGELGFRAFSGSGNRLDGKKKGVEPSPSPIKPGDIKRGIPNYEFKLGKITFIRNSRPLVKKVEEDEAGGRFVAFSGEGQSLRKKGRKP

SEQ ID NO: 39694 - protein, 46 aa, Homo sapiens
MHHLKPQSQVIFITFPSGMPPVLKPTTTPVEEQPCHQNRAKNGSPK

SEQ ID NO: 39695 - protein, 801 aa, Homo sapiens
LAALSVAVMPAGPVQAVPPPPPVPTEPKQPTEEEASSKEDSAPSKPVVGIIYPPPEVRNIVDKTASFVARNGPEFEARIRQNEINNPKFNFLNPNDPYHAYYRHKVSEFKEGKAQEPSAAIPKVMQQQQQTTQQQLPQKVQAQVIQETIVPKEPPPEFEFIADPPSISAFDLDVVKLTAQFVARNGRQFLTQLMQKEQRNYQFDFLRPQHSLFNYFTKLVEQYTKILIPPKGLFSKLKKEAENPREVLDQVCYRVEWAKFQERERKKEEEEKEKERVAYAQIDWHDFVVVETVDFQPNEQGNFPPPTTPEELGARILIQERYEKFGESEEVEMEVESDEEDDKQEKAEEPPSQLDQDTQVQDMDEGSDDEEEGQKVPPPPETPMPPPLPPTPDQVIVRKDYDPKASKPLPPAPAPDEYLVSPITGEKIPASKMQEHMRIGLLDPRWLEQRDRSIREKQSDDEVYAPGLDIESSLKQLAERRTDIFGVEETAIGKKIGEEEIQKPEEKVTWDGHSGSMARTQQAAQANITLQEQIEAIHKAKGLVPEDDTKEKIGPSKPNEIPQQPPPPSSATNIPSSAPPITSVPRPPTMPPPVRTTVVSAVPVMPRPPMASVVRLPPGSVIAPMPPIIHAPRINVVPMPPSAPPIMAPRPPPMIVPTAFVPAPPVAPVPAPAPMPPVHPPPPMEDEPTSKKLKTEDSLMPEEEFLRRNKGPVSIKVQVPNMQDKTEWKLNGQVLVFTLPLTDQVSVIKVKIHEATGMPAGKQKLQYEGIFIKDSNSLAYYNMANGAVIHLALKERGGRKK

SEQ ID NO: 39696 - protein, 404 aa, Homo sapiens
VMSHRKFSAPRHGSLGFLPRKRSSRHRGKVKSFPKDDPSKPVHLTAFLGYKAGMTHIVREVDRPGSKVNKKEVVEAVTIVETPPMVVVGIVGYVETPRGLRTFKTVFAEHISDECKRRFYKNWHKSKKKAFTKYCKKWQDEDGKKQLEKDFSSMKKYCQVIRVIAHTQMRLLPLRQKKAHLMEIQVNGGTVAEKLDWARERLEQQVPVNQVFGQDEMIDVIGVTKGKGYKGVTSRWHTKKLPRKTHRGLRKVACIGAWHPARVAFSVARAGQKGYHHRTEINKKIYKIGQGYLIKDGKLIKNNASTDYDLSDKSINPLGGFVHYGEVTNDFVMLKGCVVGTKKRVLTLRKSLLVQTKRRALEKIDLKFIDTTSKFGHGRFQTMEEKKAFMGPLKKDRIAKEEGA

SEQ ID NO: 39697 - protein, 61 aa, Homo sapiens
LKFLTRTRSTVAESVSQQILRQNRGRKACDRPVAKTKKKKAEGTVFTEEDFQKFQQEYFGS

SEQ ID NO: 39698 - protein, 129 aa, Homo sapiens
KMAGSGVRQATSTASTFVKPIFSRDMNEAKRRVRELYRAWYREVPNTVHQFQLDITVKMGRDKVREMFMKNAHVTDPRVVDLLVIKGKIELEETIKVWKQRTHVMRFFHETEAPRPKDFLSKFYVGHDP

SEQ ID NO: 39699 - protein, 198 aa, Homo sapiens
LHSGTVPARSGRTMARGAALALLLFGLLGVLVAAPDGGFDLSDALPDNENKKPTAIPKKPSAGDDFDLGDAVVDGENDDPRPPNPPKPMPNPNPNHPSSSGSFSDADLADGVSGGEGKGGSDGGGSHRKEGEEADAPGVIPGIVGAVVVAVAGAISSFIAYQKKKLCFKENAEQGEVDMESHRNANAEPAVQRTLLEK

SEQ ID NO: 39700 - protein, 71 aa, Homo sapiens
IRSWMGYELPFDRHDWIINRCGTEVRYVIDYYDGGEVNKDYQFTILDVRPALDSLSAVWDRMKVAWWRWTS

SEQ ID NO: 39701 - protein, 21 aa, Homo sapiens
MSLFIARLYMMLCKTWIRRLM

SEQ ID NO: 39702 - protein, 41 aa, Homo sapiens
ISPLLPRTPQMLPMCSSELAPLLLSLACLDALLHVVVAHGC

SEQ ID NO: 39703 - protein, 28 aa, Homo sapiens
TPAAPSPAAAAFRYTLLPVTPGPGMHPG

SEQ ID NO: 39704 - protein, 58 aa, Homo sapiens
LVPPASVCPGCEKTSVSCGYAMVSARWFILELDLFKTDKCWYFIFYKWTIISFLKTTT

SEQ ID NO: 39705 - protein, 23 aa, Homo sapiens
RVAAGLGFGSLRSWRRRDPGNRH

SEQ ID NO: 39706 - protein, 592 aa, Homo sapiens
LNLSAFKLVIMMKLRHKNKKPGEGSKGHKKISWPYPQPAKQNGKKATSKVPSAPHFVHPNDHANREAELKKKWVEEMREKQQAAREQERQKRRTIESYCQDVLRRQEEFEHKEEVLQELNMFPQLDDEATRKAYYKEFRKVVEYSDVILEVLDARDPLGCRCFQMEEAVLRAQGNKKLVLVLNKIDLVPKEVVEKWLDYLRNELPTVAFKASTQHQVKNLNRCSVPVDQASESLLKSKACFGAENLMRVLGNYCRLGEVRTHIRVGVVGLPNVGKSSLINSLKRSRACSVGAVPGITKFMQEVYLDKFIRLLDAPGIVPGPNSEVGTILRNCVHVQKLADPVTPVETILQRCNLEEISNYYGVSGFQTTEHFLTAVAHRLGKKKKGGLYSQEQAAKAVLADWVSGKISFYIPPPATHTLPTHLSAEIVKEMTEVFDIEDTEQANEDTMECLATGESDELLGDTDPLEMEIKLLHSPMTKIADAIENKTTVYKIGDLTGYCTNPNRHQMGWAKRNVDHRPKSNSMVDVCSVDRRSVLQRIMETDPLQQGQALASALKNKKKMQKRADKIASKLSDSMMSALDLSGNADDGVGD

SEQ ID NO: 39707 - protein, 36 aa, Homo sapiens
KESQKDRKNPLPPSVGVVDKKEETQPPMALKKEGIR

SEQ ID NO: 39708 - protein, 94 aa, Homo sapiens
IVLEKVGVEAKQPNSAIRKCVRVQLIKNGKKITAFVPNDGCLNFIEENDEVLVAGFGRKGHAVGDIPGVRFKVVKVANVSLLALYKGKKERPRS

SEQ ID NO: 39709 - protein, 22 aa, Homo sapiens
IKHSKSRDSFLKRMNENDQRKK

SEQ ID NO: 39710 - protein, 80 aa, Homo sapiens
IKKFVIRNIVEAAAVRDISEVSVFDAYVLPKLYVKLHYCVSCAIHSKVVRNRSREACKDRTPPPRFRPAGAAPRPPPKPM

SEQ ID NO: 39711 - protein, 97 aa, Homo sapiens
LAPKQQLYCRSSSFTFTMFPLVKSALNRLQVRSIQQTMARQSHQKRTPDFHDKYGNAVLASGATFCIVTWTYVATQVGIEWNLSPVGRVTPKEWRNQ

SEQ ID NO: 39712 - protein, 431 aa, Homo sapiens
LTESPTSLPSCISKMSLSNKLTLDKLDVKGKRVVMRVDFNVPMKNNQITNNQRIKAAVPSIKFCLDNGAKSVVLMSHLGRPDGVPMPDKYSLEPVAVELKSLLGKDVLFLKDCVGPEVEKACANPAAGSVILLENLRFHVEEEGKGKDASGNKVKAEPAKIEAFRASLSKLGDVYVNDAFGTAHRAHSSMVGVNLPQKAGGFLMKKELNYFAKALESPERPFLAILGGAKVADKIQLINNMLDKVNEMIIGGGMAFTFLKVLNNMEIGTSLFDEEGAKIVKDLMSKAEKNGVKITLPVDFVTADKFDENAKTGQATVASGIPAGWMGLDCGPESSKKYAEAVTRAKQIVWNGPVGVFEWEAFARGTKALMDEVVKATSRGCITIIGGGDTATCCAKWNTEDKVSHVSTGGGASLELLEGKVLPGVDALSNI

SEQ ID NO: 39713 - protein, 14 aa, Homo sapiens
LAFGPGKSGAGLRG

SEQ ID NO: 39714 - protein, 24 aa, Homo sapiens
MKGGNFGGRSSGPYDGGGQYFAKP

SEQ ID NO: 39715 - protein, 238 aa, Homo sapiens
LLRHRLPPPEQSARAPAGSVMATRSPGVVISDDEPGYDLDLFCIPNHYAEDLERVFIPHGLIMDRTERLARDVMKEMGGHHIVALCVLKGGYKFFADLLDYIKALNRNSDRSIPMTVDFIRLKSYCNDQSTGDIKVIGGDDLSTLTGKNVLIVEDIIDTGKTMQTLLSLVRQYNPKMVKVASLLVKRTPRSVGYKPDFVGFEIPDKFVVGYALDYNEYFRDLNHVCVISETGKAKYKA

SEQ ID NO: 39716 - protein, 43 aa, Homo sapiens
KECLSVWNIKFQTLQTSKELPQGTSGQLWYYGENVFMLRGKSL

SEQ ID NO: 39717 - protein, 388 aa, Homo sapiens
MAQYKGAASEAGRAMHLMKKREKQREQMEQMKQRIAEENIMKSNIDKKFSAHYDAVEAELKSSTVGLVTLNDMKAKQEALVKEREKQLAKKEQSKELQMKLEKLREKERKKEAKRKISSLSFTLEEEEEGGEEEEEAAMYEEEMEREEITTKKRKLGKNPDVDTSFLPDRDREEEENRLREELRQEWEAKQEKIKSEEIEITFSYWDGSGHRRTVKMRKGNTMQQFLQKALEILRKDFSELRSAGVEQLMYIKEDLIIPHVSPFSPSTRSGCSTLGFGSGWWGQCAQAGGVGRGRDGPSRRRFPALGSQHHSFYDFIVTKARGKSGPLFNFDVHDDVRLLSDATVEKDESHAGKVVLRSWYEKNKHIFPASRWEPYDPEKKWDKYTIR

SEQ ID NO: 39718 - protein, 192 aa, Homo sapiens [sequence omitted]

SEQ ID NO: 39719 - protein, 212 aa, Homo sapiens
VLNDYLADKSYIEGYVPSQADVAVFEAVSSPLPADLCHALRWYNHIKSYEKEKASLPGVKKALGKYGPADVEDTTGSGATDSKDDDDIDLFGSDDEEESEEAKRLREERLAQYESKKAKKPALVAKSSILLDVKPWDDETDMAKLEERVRSIQADGLVWGSSKLVPVGYGIKKLQIQCVVEDDKVGTDMLEEQITAFEDYVQSMDVAAFNKI

SEQ ID NO: 39720 - protein, 150 aa, Homo sapiens [sequence omitted]

SEQ ID NO: 39721 - protein, 44 aa, Homo sapiens
KRFLEKFKPGKWMIQYNNLNLKTPVPSDIDISRSCKPKPIGKLA

SEQ ID NO: 39722 - protein, 22 aa, Homo sapiens
LLSATMPTDVLEVTKKFMRDPI

SEQ ID NO: 39723 - protein, 21 aa, Homo sapiens
LLEQCGEFPTRMSMIGCDFRS

SEQ ID NO: 39724 - protein, 61 aa, Homo sapiens
VQREKANGTTVHVGIHPSKVVITRLKLDKDRKNIRERKAKSCQVGKQKGKYKEETIEKMQE

SEQ ID NO: 39725 - protein, 20 aa, Homo sapiens
LNRLEQTQKSKPVFSESLSD

SEQ ID NO: 39726 - protein, 5 aa, Homo sapiens
MLWSF

SEQ ID NO: 39727 - protein, 621 aa, Homo sapiens
RSRIAVAEMFRCGGLAAGALKQKLVPLVRTVCVRSPRQRNRLPGNLFQRWHVPLELQMTRQMASSGASGGKIDNSVLVLIVGLSTVGAGAYAYKTMKEDEKRYNERISGLGLTPEQKQKKAALSASEGEEVPQDKAPSHVPFLLIGGGTAAFAAARSIRARDPGARVLIVSEDPELPYMRPPLSKELWFSDDPNVTKTLRFKQWNGKERSIYFQPPSFYVSAQDLPHIENGGVAVLTGKKVVQLDVRDNMVKLNDGSQITYEKCLIATGGTPRSLSAIDRAGAEVKSRTTLFRKIGDFRSLEKISREVKSITIIGGGFLGSELACALGRKARALGTEVIQLFPEKGNMGKILPEYLSNWTMEKVRREGVKVMPNAIVQSVGVSSGKLLIKLKDGRKVETDHIVAAVGLEPNVELAKTGGLEIDSDFGGFRVNAELQARSNIWVAGDAACFYDIKLGRRRVEHHDHAVVSGRLAGENMTGAAKPYWHQSMFWSDLGPDVGYEAIGLVDSSLPTVGVFAKATAQDNPKSATEQSGTGIRSESETESEASEITIPPSTPAVPQAPVQGEDYGKGVIFYLRDKVVVGIVLWNIFNRMPIARKIIKDGEQHEDLNEVAKLFNIHED

SEQ ID NO: 39728 - protein, 433 aa, Homo sapiens
LADAGAMAATDIARQVGEGCRTVPLAGHVGFDSLPDQLVNKSVSQGFCFNILCVGETGLGKSTLMDTLFNTKFEGEPATHTQPGVQLQSNTYDLQESNVRLKLTIVSTVGFGDQINKEDSYKPIVEFIDAQFEAYLQEELKIRRVLHTYHDSRIHVCLYFIAPTGHSLKSLDLVTMKKLDSKVNIIPIIAKADAISKSELTKFKIKITSELVSNGVQIYQFPTDDESVAEINGTMNAHLPFAVIGSTEELKIGNKMMRARQYPWGTVQVENEAHCDFVKLREMLIRVNMEDLREQTHTRHYELYRRCKLEEMGFKDTDPDSKPFSLQETYEAKRNEFLGELQKKEEEMRQMFVQRVKEKEAELKEAEKELHEKFDRLKKLHQDEKKKLEDKKKSLDDEVNAFKQRKTAAELLQSQGSQAGGSQTLKRDKEKKN

SEQ ID NO: 39729 - protein, 5 aa, Homo sapiens
IVVCS

SEQ ID NO: 39730 - protein, 54 aa, Homo sapiens
LLAMSSHKTFRIKRFLAKKQKQNRPIPQWIRMKTGNKIRYNSKRRHWRRTKLGL

SEQ ID NO: 39731 - protein, 875 aa, Homo sapiens
MADGAAAGAGGSPSLRELRARMVAAANEIAKERRKQDVVNRVATHSSNIRSTFKPVIDGSMLKNDIKQRLARERREEKRRQQDANKETQLLEKERKTKLQYEKQMEERQRKLKERKEKEEQRRIAAEEKRHQKDEAQKEKFTAILYRTLERRRLADDYQQKRWSWGGSAMANSESKTANKRSASTEKLEQGTSALIRQMPLSSAGLQNSVAKRKTDKERSSSLNRRDSNLHSSTDKEQAERKPRVTGVTNYVMQYVTVPLRKCTSDELRAVMFPMSTMKIPPQTKVEESPLEKVETPPKASVDAPPQVNVEVFCNTSMEASPKAGVGMAPEVSTDSFPVVSVDVSPVVSTYDSEMSMDASPELSIEALPKVDLETVPKVSIVASPEASLEAPPEVSLEALPEVSVEAAPEGSLEAPPKGSAEVAPKESVKGSPKESMEASPEAMVKASPKTSLEASMEASPKAKARDAPKKSEMDKQALIPIAKKRLSSYTECYKWSSSPENACGLPSPISTNRQIQKNCPPSPLPLISKQSPQTSFPYKIMPIQHTLSVQSASSTVKKKKETVSKTTNRCEALSQRHMIYEESGNKSTAGIMNAEAATKILTELRRLAREQREKEEEERQREEMQQRVIKKSKDMAKEAVGGQAEDHLKLKDGQQQNETKKKKGWLDQEDQEAPLQKGDAKIKAQEEADKRKKEHERIMLQNLQERLERKKRIEEIMKRTRKTDVNASKVTETSSHDIYEEAEADNEESDKDSLNEMFPSAILNGTGSPTKFKMPFNNAKKMTHKLVFLEDGTSQVRKEPKTYFNGDLKNFRQKSMKDTSIQEVVSRPSSKRMTSHTTKTRKADETNTTSRSSAQTKSEGFHDILPKSSDTFRQ

SEQ ID NO: 39732 - protein, 252 aa, Homo sapiens
MSSSRGPLPVKRGPPPRSGGPPPKRSAPSGPVRSSSGMGGRAPVSRGRDSYGGPPRREPLPSRRDVYLSPRDDGYSTKDSYSSRDYPSSRDTRDYAPPPRDYTYRDYGHSSSRDDYPSRGYSDRDGYGRDRDYSDHPSGGSYRDSYESYGNSRSAPPTRGPPPSYGGSSRYDDYSSSRDGYGGSRDSYSSSRSDLYSSGRDRVGRQERGLPPSMERGYPPPRDSYSSSSRGAPRGGGRGGSRSDRGGGRSRY

SEQ ID NO: 39733 - protein, 244 aa, Homo sapiens
LGPASPAAVMNIRNARPEDLMNMQHCNLLCLPENYQMKYYFYHGLSWPQLSYIAEDENGKIVGYVLAKMEEDPDDVPHGHITSLAVKRSHRRLGLAQKLMDQASRAMIENFNAKYVSLHVRKSNRAALHLYSNTLNFQISEVEPKYYADGEDAYAMKRDLTQMADELRRHLELKEKGRHVVLGAIENKVESKGNSPPSSGEACREEKGLAAEDSGGDSKDLSEVSETTESTDVKDSSEASDSAS

SEQ ID NO: 39734 - protein, 147 aa, Homo sapiens
ITAMPKNKGKGGKNRRRGKNENESEKRELVFKEDGQEYAQVIKMLGNGRLEALCFDGVKRLCHIRGKLRKKVWINTSDIILVGLRDYQDNKADVILKYNADEARSLKAYGELPEHAKINETDTFGPGDDDEIQFDDIGDDDEDIDDI

SEQ ID NO: 39735 - protein, 25 aa, Homo sapiens
LSALLDGKNVNAGGHKLGLGLEFQA

SEQ ID NO: 39736 - protein, 521 aa, Homo sapiens
MLQPSSSPLWGKLRVDIKAYLGSAIQLVSCLSETTVLAAVLRHISVLVPCFLTFPKQCRMLLKRMVIVWSTGEESLRVLAFLVLSRVCRHKKDTFLGPVLKQMYITYVRNCKFTSPGALPFISFMQWTLTELLALEPGVAYQHAFLYIRQLAIHLRNAMTTRKKETYQSVYNWQYVHCLFLWCRVLSTAGPSEALQPLVYPLAQVIIGCIKLIPTARFYPLRMHCIRALTLLSGSSGAFIPVLPFILEMFQQVDFNRKPGRMSSKPINFSVILKLSNVNLQEKAYRDGLVEQLYDLTLEYLHSQAHCIGFPELVLPVVLQLKSFLRECKVANYCRQVQQLLGKVQENSAYICSRRQRVSFGVSEQQAVEAWEKLTREEGTPLTLYYSHWRKLRDREIQLEISGKERLEDLNFPEIKRRKMADRKDEDRKQFKDLFDLNSSEEDDTEGFSERGILRPLSTRHGVEDDEEDEEEGEEDSSNSEGEWSWDGDPDAEAGLAPGELQQLAQGPEDELEDLQLSEDD

SEQ ID NO: 39737 - protein, 254 aa, Homo sapiens
MAAAGSRKRRLAELTVDEFLASGFDSESESESENSPQAETREAREAARSPDKPGGSPSASRRKGRASEHKDQLSRLKDRDPEFYKFLQENDQSLLNFSDSDSSEEEEGPFHSLPDVLEEASEEEDGAEEGEDGDRVPRGLKGKKNSVPVTVAMVERWKQAAKQRLTPKLFHEVVQAFRAAVATTRGDQESAEANKFQVTDSAAFNALVTFCIRDLIGCLQKLLFGKVAKDSSSKCGPKETSLRQLVVPGRPQRC

SEQ ID NO: 39738 - protein, 792 aa, Homo sapiens [sequence omitted]

SEQ ID NO: 39739 - protein, 294 aa, Homo sapiens
MLSTTVIGCVKTLVPCCLYQHKARLSYPPNFLMTMLFVGLMRFATVVLGLVSLKNVAVSFAETVKSSAPIFTVIMSRMILGEYTGLLVNLSLIPVMGGLALCTATEISFNVLGFSAALSTNIMDCLQNVFSKKLLSGDKYRFSAPELQFYTSAAAVAMLVPARVFFTDVPVIGRSGKSFSYNQDVVLLLLTDGVLFHLQSVTAYALMGKISPVTFSVASTVKHALSIWLSVIVFGNKITSLSAVGTALVTVGVLLYNKARQHQQEALQSLAAATGRAPDDTVEPLLPQDPRQHP

SEQ ID NO: 39740 - protein, 626 aa, Homo sapiens
MTCLIKGCNFVLKNIPHEAFVYQKDSDPEFRFQTNHPHIFPYLLVNIGSGVSIVKVETEDRFEWVGGSSIGGGTFWGLGALLTKTKKFDELLHLASRGQHSNVDMLVRDVYGGAHQTLGLSGNLIASSFGKSATADQEFSKEDMAKSLLHMISNDIGQLACLHARLHSLDRVYFGGFFIRGHPVTMRTITYSINFFSKGEVQALFLRHEGYLGAIGAFLKGAEQDNPNQYSWGENYAGSSGLMSASPELGPAQRARSGTFDLLEMDRLERPLVDLPLLLDPPSYVPDTVDLTDDALARKYWLTCFEEALDGVVKRAVASQPDSVDAAERAEKFRQKYWNKLQTLRQQPFAYGTLTVRSLLDTREHCLNEFNFPDPYSKVKQRENGVALRCFPGVVRSLDALGWEERQLALVKGLLAGNVFDWGAKAVSAVLESDPYFGFEEAKRKLQERPWLVDSYSEWLQRLKGPPHKCALIFADNSGIDIILGVFPFVRELLLRGTEVILACNSGPALNDVTHSESLIVAERIAGMDPVVHSALQEERLLLVQTGSSSPCLDLSRLDKGLAALVRERGADLVVIEGMGRAVHTNYHAALRCESLKLAVIKNAWLAERLGGRLFSVIFKYEVPAE

SEQ ID NO: 39741 - protein, 488 aa, Homo sapiens
MTADKDKDKDKEKDRDRDRDREREKRDKARESENSRPRRSCTLEGGAKNYAESDHSEDEDNDNNSATAEESTKKNKKKPPKKKSRYERTDTGEITSYITEDDVVYRPGDCVYIESRRPNTPYFICSIQDFKLVHNSQACCRSPTPALCDPPACSLPVASQPPQHLSEAGRGPVGSKRDHLLMNVKWYYRQSEVPDSVYQHLVQDRHNENDSGRELVITDPVIKNRELFISDYVDTYHAAALRGKCNISHFSDIFAAREFKARVDSFFYILGYNPETRRLNSTQGEIRVGPSHQAKLPDLQPFPSPDGDTVTQHEELVWMPGVNDCDLLMYLRAARSMAAFAGMCDGGSTEDGCVAASRDDTTLNALNTLHESGYDAGKALQRLVKKPVPKLIEKCWTEDEVVSRNQHLPCALGHRATGVSVCDLPAAQGKQKLQSCRMAVRGSARQEDGALQPLNCTERLDFIKIRLHRCRERLSNFHGKKGEIDSYS

SEQ ID NO: 39742 - protein, 260 aa, Homo sapiens
MRDPTYRPLKQELQGLDYCKPTRLDLLLDMPPVSYDVQLLHSWNNNDRSLNVFVKEDDKLIFHRHPVAQSTDAIRGKVGYTRGLHVWQITWAMRQRGTHAVVGVATADAPLHSVGYTTLVGNNHESWGWDLGRNRLYHDGKNQPSKTYPAFLEPDETFIVPDSFLVALDMDDGTLSFIVDGQYMGVAFRGLKGKKLYPVVSAVWGHCEIRMRYLNGLDPEPLPLMDLCRRSVRLALGRERLGEIHTLPLPASLKAYLLYQ

SEQ ID NO: 39743 - protein, 614 aa, Homo sapiens
MGLPTDNGHDSDQVFEFNGTQAVRIPDGVVSVSPKEPFTISVWMRHGPFGRKKETILCSSDKTDMNRHHYSLYVHGCRLIFLFRQDPSEEKKYRPAEFHWKLNQVCDEEWHHYVLNVEFPSVTLYVDGTSHEPFSVTEDYPLHPSKIETQLVVGACWQGGDLHMTQFFRGNLAGLTLRSGKLADKKVIDCLYTCKEGLDLQVLEDSGRGVQIQAHPSQLVLTLEGEDLGELDKAMQHISYLNSRQFPTPGIRRLKITSTIKCFNEATCISVPPVDGYVMVLQPEEPKISLSGVHHFARAASEFESSEGVFLFPELRIISTITREVEPEGDGAEDPTVQESLVSEEIVHDLDTCEVTVEGEELNHEQESLEVDMARLQQKGIEVSSSELGMTFTGVDTMASYEEVLHLLRYRNWHARSLLDRKFKLICSELNGRYISNEFKVEVNVIHTANPMEHANHMAAQPQFVHPEHRSFVDLSGHNLANPHPFAVVPSTATVVIVVCVSFLVFMIILGVFRIRAAHRRTMRDQDTGKENEMDWDDSALTITVNPMETYEDQHSSEEEEEEEEEEESEDGEEEDDITSAESESSEEEEGEQGDPQNATRQQQLEWDDSTLSY

SEQ ID NO: 39744 - protein, 1741 aa, Homo sapiens
MQGNSTSIINPKNPKEAPKSFSFDYSYWSHTSPEDPCFASQNRVYNDIGKEMLLHAFEGYNVCIFAYGQTGAGKSYTMMGKQEESQAGIIPQLCEELFEKINDNCNEEMSYSVEVSYMEIYCERVRDLLNPKNKGNLRVREHPLLGPYVEDLSKLAVTSYTDIADLMDAGNKARTVAATNMNETSSRSHAVFTIVFTQKKHDNETNLSTEKVSKISLVDLAGSERADSTGAKGTRLKEGANINKSLTTLGKVISALAEVSKKKKKTDFIPYRDSVLTWLLRENLGGNSRTAMVAALSPADINYDETLSTLRYADRAKQIKCNAVINEDPNAKLVRELKEEVTRLKDLLRAQGLGDIIDTSMGSLTSSPSSCSLSSQVGLTSVTSIQERIMSTPGGEEAIERLKESEKIIAELNETWEEKLRKTEAIRMEREALLAEMGVAIREDGGTLGVFSPKKTPHLVNLNEDPLMSECLLYYIKDGITRVGQADAERRQDIVLSGAHIKEEHCIFRSERSNSGEVIVTLEPCERSETYVNGKRVSQPVQLRSGNRIIMGKNHVFRFNHPEQARAEREKTPSAETPSEPVDWTFAQRELLEKQGIDMKQEMEKRLQEMEILYKKEKEEADLLLEQQRLDYESKLQALQKQVETRSLAAETTEEEEEEEEVPWTQHEFELAQWAFRKWKSHQFTSLRDLLWGNAVYLKEANAISVELKKKVQFQFVLLTDTLYSPLPPELLPTEMEKTHEDRPFPRTVVAVEVQDLKNGATHYWSLEKLKQRLDLMREMYDRAGEMASSAQDESETTVTGSDPFYDRFHWFKLVGSSPIFHGCVNERLADRTPSPTFSTADSDITELADEQQDEMEDFDDEAFVDDAGSDAGTEEGSDLFSDGHDPFYDRSPWFILVGRAFVYLSNLLYPVPLIHRVAIVSEKGEVRGFLRVAVQAIAADEEAPDYGSGIRQSGTAKISFDNEYFNQSDFSSVAMTRSGLSLEELRIVEGQGQSSEVITPPEEISRINDLDLKSSTLLDGKMVMEGFSEEIGNHLKLGSAFTFRVTVLQASGILPEYADIFCQFNFLHRHDEAFSTEPLKNNGRGSPLAFYHVQNIAVEITESFVDYIKTKPIVFEVFGHYQQHPLHLQGQELNSPPQPCRRFFPPPMPLSKPVPATKLNTMSKTSLGQSMSKYDLLVWFEISELEPTGEYIPAVVDHTAGLPCQGTFLLHQGIQRRITVTIIHEKGSELHWKDVRELVVGRIRNKPEVDEAAVDAILSLNIISAKYLKSSHNSSRTFYRFEAVWDSSLHNSLLLNRVTPYGEKIYMTLSAYLELDHCIQPAVITKDVCMVFYSRDAKISPPRSLRSLFGSGYSKSPDSNRVTGIYELSLCKMSDTGSPGMQRRRRKILDTSVAYVRGEENLAGWRPRGDSLILEHQWELEKLELLHEVEKTRHFLLLRERLGDSIPKSLSDSLSPSLSSGTLSTSTSISSQISTTTFESAITPSESSGYDSGDIESLVDREKELATKCLQLLTHTFNREFSQVHGSVSDCKLSDISPIGRDPSESSFSSATLTPSSTCPSLVDSRSNSLDQKTPEANSRASSPCPEFEQFQIVPAVETPYLARAGKNEFLNLVPDIEEIRPSSVVSKKGYLHFKEPLYSNWAKHFVVVRRPYVFIYNSDKDPVERGIINLSTAQVEYSEDQQAMVKTPNTFAVCTKHRGVLLQALNDKDMNDWLYAFNPLLAGTIRSKLSRRCPSQSKY

SEQ ID NO: 39745 - protein, 1124 aa, Homo sapiens
MQGNSTSIINPKNPKEAPKSFSFDYSYWSHTSPEDPCFASQNRVYNDIGKEMLLHAFEGYNVCIFAYGQTGAGKSYTMMGKQEESQAGIIPQLCEELFEKINDNCNEEMSYSVEVSYMEIYCERVRDLLNPKNKGNLRVREHPLLGPYVEDLSKLAVTSYTDIADLMDAGNKARTVAATNMNETSSRSHAVFTIVFTQKKHDNETNLSTEKVSKISLVDLAGSERADSTGAKGTRLKEGANINKSLTTLGKVISALAEVSKKKKKTDFIPYRDSVLTWLLRENLGGNSRTAMVAALSPADINYDETLSTLRYADRAKQIKCNAVINEDPNAKLVRELKEEVTRLKDLLRAQGLGDIIDTSMGSLTSSPSSCSLSSQVGLTSVTSIQERIMSTPGGEEAIERLKESEKIIAELNETWEEKLRKTEAIRMEREALLAEMGVAIREDGGTLGVFSPKKTPHLVNLNEDPLMSECLLYYIKDGITRVGQADAERRQDIVLSGAHIKEEHCIFRSERSNSGEVIVTLEPCERSETYVNGKRVSQPVQLRSGNRIIMGKNHVFRFNHPEQARAEREKTPSAETPSEPVDWTFAQRELLEKQGIDMKQEMEKRLQEMEILYKKEKEEADLLLEQQRLDADSDSGDDSDKRSCEESWKLITSLREKLPPSKLQTIVKKCGLPSSGKKREPIKMYQIPQRRRLSKDSKWVTISDLKIQAVKEICYEVALNDFRHSRQEIEALAIVKMKELCAMYGKKDPNERDSWRAVARDVWDTVGVGDEKIEDVMATGKGSTDVDDLKVHIDKLEDILQEVKKQNNMKDEEIKVLRNKMLKMEKVLPLIGSQEQKSPGSHKAKEPVGAGVSSTSENNVSKGDNGELAKEERVSQLMNGDPAFRRGRLRWMRQEQIRFKNLQQQEITKQLRRQNVPHRFIPPENRKPRFPFKSNPKHRNSWSPGTHIIITEDEVIELRIPKDDEARKGNKEESQEKGGKGAFKDPQFPWGSQGMRSQDHIQVSKQHINNQQQPPQLRWRSNSLNNGQPKSTRCQASASAESLNSHSGHPTADVQTFQAKRHIHQHRQSYCNYNTGGQLEGNAATSYQKQTDKPSHCSQFVTPPRMRRQFSAPNLKAGRETTV

SEQ ID NO: 39746 - protein, 85 aa, Homo sapiens
MCCASACATWCWTTARPSAESTCPMSPTRPTRSAPTSACSWRTPGSLASWLAWRSLLCASVCPLPPSLSCPSRGSPASRCWWRTS

SEQ ID NO: 39747 - protein, 971 aa, Homo sapiens
MVRKAIYGPNVISIPVKSYPQLLVDEALNPYYGFQAFSIALWLADHYYWYALCIFLISSISICLSLYKTRKQSQTLRDMVKLSMRVCVCRPGGEEEWVDSSELVPGDCLVLPQEGGLMPCDAALVAGECMVNESSLTGESIPVLKTALPEGLGPYCAETHRRHTLFCGTLILQARAYVGPHVLAVVTRTGFCTAKGGLVSSILHPRPINFKFYKHSMKFVAALSVLALLGTIYSIFILYRNRVPLNEIVIRALDLVTVVVPPALPAAMTVCTLYAQSRLRRQGIFCIHPLRINLGGKLQLVCFDKTGTLTEDGLDVMGVVPLKGQAFLPLVPEPRRLPVGPLLRALATCHALSRLQDTPVGDPMDLKMVESTGWVLEEEPAADSAFGTQVLAVMRPPLWEPQLQAMEEPPVPVSVLHRFPFSSALQRMSVVVAWPGATQPEAYVKGSPELVAGLCNPETVPTDFAQMLQSYTAAGYRVVALASKPLPTVPSLEAAQQLTRDTVEGDLSLLGLLVMRNLLKPQTTPVIQALRRTRIRAVMVTGDNLQTAVTVARGCGMVAPQEHLIIVHATHPERGQPASLEFLPMESPTAVNGVKDPDQAASYTVEPDPRSRHLALSGPTFGIIVKHFPKLLPKVLVQGTVFARMAPEQKTELVCELQKLQYCVGMCGDGANDCGALKAADVGISLSQAEASVVSPFTSSMASIECVPMVIREGRCSLDTSFSVFKYMALYSLTQFISVLILYTINTNLGDLQFLAIDLVITTTVAVLMSRTGPALVLGRVRPPGALLSVPVLSSLLLQMVLVTGVQLGGYFLTLAQPWFVPLNRTVAAPDNLPNYENTVVFSLSSFQYLILAAAVSKGAPFRRPLYTNVPFLVALALLSSVLVGLVLVPGLLQGPLALRNITDTGFKLLLLGLVTLNFVGAFMLESVLDQCLPACLRRLRPKRASKKRFKQLERELAEQPWPPLPAGPLR

SEQ ID NO: 39748 - protein, 24 aa, Homo sapiens
MSESELGRKWDRCLADAVVKIESW

SEQ ID NO: 39749 - protein, 53 aa, Homo sapiens
MSESELGRKWDRCLADAVVKIEMGFHHVAQAGLELRVQTIHLPWPPNVPGLQA

SEQ ID NO: 39750 - protein, 1584 aa, Homo sapiens
MNSQPQTRSPFFQRPQIQPPRATIPNSSPSIRPGAQTPTAVYQANQHIMMVNHLPMPYPVPQGPQYCIPQYRHSGPPYVGPPQQYPVQPPGPGPFYPGPGPGDFPNAYGTPFYPSQPVYQSAPIIVPTQQQPPPAKREKKTIRIRDPNQGGKDITEEIMSGGGSRNPTPPIGRPTSTPTPPQLPSQVPEHSPVVYGTVESAHLAASTPVTAASDQKQEEKPKPDPVLKSPSPVLRLVLSGEKKEQEGQTSETTAIVSIAELPLPPSPTTVSSVARSTIAAPTSSALSSQPIFTTAIDDRCELSSPREDTIPIPSLTSCTETSDPLPTNENDDDICKKPCSVAPNDIPLVSSTNLINEINGVSEKLSATESIVEIVKQEVLPLTLELEILENPPEEMKLECIPAPITPSTVPSFPPTPPTPPASPPHTPVIVPAAATTVSSPSAAITVQRVLEEDESIRTCLSEDAKEIQNKIEVEADGQTEEILDSQNLNSRRSPVPAQIAITVPKTWKKPKDRTRTTEEMLEAELELKAEEELSIDKVLESEQDKMSQGFHPERDPSDLKKVKAVEENGEEAEPVRNGAESVSEGEGIDANSGSTDSSGDGVTFPFKPESWKPTDTEGKKQYDREFLLDFQFMPACIQKPEGLPPISDVVLDKINQPKLPMRTLDPRILPRGPDFTPAFADFGRQTPGGRGVPLLNVGSRRSQPGQRREPRKIITVSVKEDVHLKKAENAWKPSQKRDSQADDPENIKTQELFRKVRSILNKLTPQMFNQLMKQVSGLTVDTEERLKGVIDLVFEKAIDEPSFSVAYANMCRCLVTLKVPMADKPGNTVNFRKLLLNRCQKEFEKDKADDDVFEKKQKELEAASAPEERTRLHDELEEAKDKARRRSIGNIKFIGELFKLKMLTEAIMHDCVVKLLKNHDEESLECLCRLLTTIGKDLDFEKAKPRMDQYFNQMEKIVKERKTSSRIRFMLQDVIDLRLCNWVSRRADQGPKTIEQIHKEAKIEEQEEQRKVQQLMTKEKRRPGVQRVDEGGWNTVQGAKNSRVLDPSKFLKITKPTIDEKIQLVPKAQLGSWGKGSSGGAKASETDALRSSASSLNRFSALQPPAPSGSTPSTPVEFDSRRTLTSRGSMGREKNDKPLPSATARPNTFMRGGSSKDLLDNQSQEEQRREMLETVKQLTGGVDVERNSTEAERNKTRESAKPEISAMSAHDKAALSEEELERKSKSIIDEFLHINDFKEAMQCVEELNAQGLLHVFVRVGVESTLERSQITRDHMGQLLYQLVQSEKLSKQDFFKGFSETLELADDMAIDIPHIWLYLAELVTPMLKEGGISMRELTIEFSKPLLPVGRAGVLLSEILHLLCKQMSHKKVGALWREADLSWKDFLPEGEDVHNFLLEQKLDFIESDSPCSSEALSKKELSAEELYKRLEKLIIEDKANDEQIFDWVEANLDEIQMSSPTFLRALMTAVCKAAIIADSSTFRVDTAVIKQRVPILLKYLDSDTEKELQALYALQASIVKLDQPANLLRMFFDCLYDEEVISEDAFYKWESSKDPAEQNGKGVALKSVTAFFTWLREAEEESEDN

SEQ ID NO: 39751 - protein, 464 aa, Homo sapiens
MAGSQAPVTFEDMAMYLTREEWRPLDAAQRDLYRDVMQENYGNVVSLDFEIRSENEVNPKQEISEDVQFGTTSERPAENAEENPESEEGFESGDRSERQWGDLTAEEWVSYPLQPVTDLLVHKEVHTGIRYHICSHCGKAFSQISDLNRHQKTHTGDRPYKCYECGKGFSRSSHLIQHQRTHTGERPYDCNECGKSFGRSSHLIQHQTIHTGEKPHKCNECGKSFCRLSHLIQHQRTHSGEKPYECEECGKSFSRSSHLAQHQRTHTGEKPYECNECGRGFSERSDLIKHYRVHTGERPYKCDECGKNFSQNSDLVRHRRAHTGEKPYHCNECGENFSRISHLVQHQRTHTGEKPYECNACGKSFSRSSHLITHQKIHTGEKPYECNECWRSFGERSDLIKHQRTHTGEKPYECVQCGKGFTQSSNLITHQRVHTGEKPYECTECEKSFSRSSALIKHKRVHTD

SEQ ID NO: 39752 - protein, 69 aa, Homo sapiens
MKAKEGRNVYSSSRYDDYDRYRRSRSRSYERRRSRSRSFDYNYRRSYSPRNSRPTGRPRRSRSHSDNDR

SEQ ID NO: 39753 - protein, 28 aa, Homo sapiens
MRFVLQTGKKQGLCPLLTPSHSAFTVGS

SEQ ID NO: 39754 - protein, 470 aa, Homo sapiens [sequence omitted]

SEQ ID NO: 39755 - protein, 5 aa, Homo sapiens
MEMPL

SEQ ID NO: 39756 - protein, 144 aa, Homo sapiens
MSYGPLDMYRNPGPSGPQLRDFSSIIQTCSGNIQRISQATAQIKNLMSQLGTKQDSSKLQENLQQLQHSTNQLAKETNELLKELGSLPLPLSTSEQRQQRLQKERLMNDFSAALNNFQAVQRRVSEKEKESIARARAGSRLSVS

SEQ ID NO: 39757 - protein, 87 aa, Homo sapiens
MKLFAELEIKRKEREAKEMHERKRQREEEIEAQEKAKREREWQKNFEESRDGRVDSWRNFQANTKGKKEKKNRTFLRPPKVKMEQRE

SEQ ID NO: 39758 - protein, 381 aa, Homo sapiens
MQRRDDPAARMSRSSGRSGSMDPSGAHPSVRQTPSRQPPLPHRSRGGGGGSRGGARASPATQPPPLLPPSATGPDATVGGPAPTPLLPPSATASVKMEPENKYLPELMAEKDSLDPSFTHAMQLLTAEIEKIQKGDSKKDDEENYLDLFSHKNMKLKERVLIPVKQYPKFNFVGKILGPQGNTIKRLQEETGAKISVLGKGSMRDKAKEEELRKGGDPKYAHLNMDLHVFIEVFGPPCEAYALMAHAMEEVKKFLVPDMMDDICQEQFLELSYLNGVPEPSRGRGVPVRGRGAAPPPPPVPRGRGVGPPRGALVRGTPVRGAITRGATVTRGVPPPPTVRGAPAPRARTAGIQRIPLPPPPAPETYEEYVRNLNNVPFPST

SEQ ID NO: 39759 - protein, 167 aa, Homo sapiens
MAQEEEDVRDYNLTEEQKAIKAKYPPVNRKYEYLDHTADVQLHAWGDTLEEAFEQCAMAMFGYMTDTGTVEPLQTVEVETQGDDLQSLLFHFLDEWLYKFSADEFFIPREVKVLSIDQRNFKLRSIGWGEEFSLSKHPQGTEVKAITYSAMQVYNEENPEVFVIIDI

SEQ ID NO: 39760 - protein, 44 aa, Homo sapiens
MAQEEEDVRDYNLTEEQKAIKAKYPPVNRKYELDCITQSMNILL

SEQ ID NO: 39761 - protein, 407 aa, Homo sapiens
MAEPRFNNPYFWPPPPTMPSQLDNLVLINKIKEQLMAEKIRPPHLPPTSASSQQPLLVPPAPAESSQAVMSLPKLQQVPGLHPQAVPQPDVALHARPATSTVTGLGLSTRTPSVSTSESSAGAGTGTGTSTPSTPTTTSQSRLIASSPTLISGITSPPLLDSIKTIQGHGLLGPPKSERGRKKIKAENPGGPPVLVVPYPILASGETAKEGKTYRCKVCPLTFFTKSEMQIHSKSHTEAKPHKCPHCSKSFANASYLAQHLRIHLGVKPYHCSYCDKSFRQLSHLQQHTRIHTGDRPYKCPHPGCEKAFTQLSNLQSHQRQHNKDKPYKCPNCYRAYSDSASLQIHLSAHAIKHAKAYCCSMCGRAYTSETYLMKHMSKHTVVEHLVSHHSPQRTESPGIPVRISLI

SEQ ID NO: 39762 - protein, 201 aa, Homo sapiens
MYQKERETPPRFAQHGTFEYEYSQRWKSLDEMEKQQREQVEKNMKDAKDKLESEMEDAYHEHQANLLRQDLMRRQEELRRMEELHNQEMQKRKEMQLRQEEERRRREEEMMIRQREMEEQMRRQREESYSRMGYMDPRERDMRMGGGGAMNMGDPYGSGGQKFPPLGGGGGIGYEANPGVPPATMSGSMMGSDMVRMIDVG

SEQ ID NO: 39763 - protein, 1512 aa, Homo sapiens [sequence omitted]

SEQ ID NO: 39764 - protein, 835 aa, Homo sapiens
MGKPIKLLANCFQVEIPKIDVYLYEVDIKPDKCPRRVNREVVDSMVQHFKVTIFGDRRPVYDGKRSLYTANPLPVATTGVDLDVTLPGEGGKDRPFKVSIKFVSRVSWHLLHEVLTGRTLPEPLELDKPISTNPVHAVDVVLRHLPSMKYTPVGRSFFSAPEGYDHPLGGGREVWFGFHQSVRPAMWKMMLNIDVSATAFYKAQPVIQFMCEVLDIHNIDEQPRPLTDSHRVKFTKEIKGLKVEVTHCGTMRRKYRVCNVTRRPASHQTFPLQLENGQTVERTVAQYFREKYTLQLKYPHLPCLQVGQEQKHTYLPLEVCNIVAGQRCIKKLTDNQTSTMIKATARSAPDRQEEISRLVRSANYETDPFVQEFQFKVRDEMAHVTGRVLPAPMLQYGGRNRTVATPSHGVWDMRGKQFHTGVEIKMWAIACFATQRQCREEILKGFTDQLRKISKDAGMPIQGQPCFCKYAQGADSVEPMFRHLKNTYSGLQLIIVILPGKTPVYAEVKRVGDTLLGMATQCVQVKNVIKTSPQTLSNLCLKINVKLGGINNILVPHQRPSVFQQPVIFLGADVTHPPAGDGKKPSIAAVVGSMDAHPSRYCATVRVQRPRQEIIQDLASMVRELLIQFYKSTRFKPTRIIFYRDGVSEGQFRQVLYYELLAIREACISLEKDYQPGITYIVVQKRHHTRLFCADRTERVGRSGNIPAGTTVDTDITHPYEFDFYLCSHAGIQGTSRPSHYHVLWDDNCFTADELQLLTYQLCHTYVRCTRSVSIPAPAYYAHLVAFRARYHLVDKEHDSAEGSHVSGQSNGRDPQALAKAVQIHQDTLRTMYFA

SEQ ID NO: 39765 - protein, 358 aa, Homo sapiens [sequence omitted]

SEQ ID NO: 39766 - protein, 348 aa, Homo sapiens
MLLHTEYSLLSLLHTQDGVVHHHGLFQDRTCEIVEDTESSRMVKKMKKRICLVLDCLCAHDFSDKTADLINLQHYVIKEKRLSERETVVIFYDVVRVVEALHQKNIVHRDLKLGNMVLNKRTHRITITNFCLGKHLVSEGDLLKDQRGSPAYISPDVLSGRPYRGKPSDMWALGVVLFTMLYGQFPFYDSIPQELFRKIKAAEYTIPEDGRVSENTVCLIRKLLVLDPQQRLAAADVLEALSAIIASWQSLSSLSGPLQVVPDIDDQMSNADSSQEAKVTEECSQYEFENYMRQQLLLAEEKSSIHDARSWVPKRQFGSAPPVRRLGHDAQPMTSLDTAILAQRYLRK

SEQ ID NO: 39767 - protein, 363 aa, Homo sapiens [sequence omitted]

SEQ ID NO: 39768 - protein, 190 aa, Homo sapiens
MHNKAAPPQIPDTRRELAELVKRKQELAETLANLERQIYAFEGSYLEDTQMYGNIIRGWDRYLTNQKNSNSKNDRRNRKFKEAERLFSKSSVTSAAAVSALAGVQDQLIEKREPGSGTESDTSPDFHNQENEPSQEDPEDLDGSVQGVKPQKAASSTSSGSHHSSHKKRKNKNRHRMNVSPKTGWHQLHL

SEQ ID NO: 39769 - protein, 189 aa, Homo sapiens
MHNKAAPPQIPDTRRELAELVKRKQELAETLANLERQIYAFEGSYLEDTQMYGNIIRGWDRYLTNQKNSNSKNDRRNRKFKEAERLFSKSSVTSAAAVSALAGVQDQLIEKREPGSGTESDTSPDFHNQENEPSQEDPEDLDGSVQGVKPQKAASSTSSGSHHSSHKKRKNKNRHRIDLKLNKKPRADY

SEQ ID NO: 39770 - protein, 179 aa, Homo sapiens
MHNKAAPPQIPDTRRELAELVKRKQELAETLANLERQIYAFEGSYLEDTQMYGNIIRGWDRYLTNQKNSNSKNDRRNRKFKEAERLFSKSSVTSAAAVSALAGVQDQLIEKREPGSGTESDTSPDFHNQENEPSQEDPEDLDGSVQGVKPQKAASSTSSGSHHSSHKKRKNKNRHRYVY

SEQ ID NO: 39771 - protein, 137 aa, Homo sapiens
MYGNIIRGWDRYLTNQKNSNSKNDRRNRKFKEAERLFSKSSVTSAAAVSALAGVQDQLIEKREPGSGTESDTSPDFHNQENEPSQEDPEDLDGSVQGVKPQKAASSTSSGSHHSSHKKRKNKNRHRSVAGIPPPQLP

SEQ ID NO: 39772 - protein, 118 aa, Homo sapiens
MVSSHVERVFQIYEQHADTVGIDAVLQPSAVSPSVADMLEWLQDIERHYRKSKVPEEKVSSFVYPVGRLGKHTSFAQGLGPNFKRRTPRSCTRYPIECFLLPGRVRKLCVSGDHGYHS

SEQ ID NO: 39773 - protein, 266 aa, Homo sapiens
MSEKRRRLDARNPLKQETALSRLPFPRGNQGLLQKAEAGRARWLTPVIPALWKTEAGGSPEQKMTQDRPLLAVQEALKKCFPVVEEQQGLWQSALRDCQPLLSSLSNLAEQLQAAQNLRFEDVPALRAFPDLKERLRRKQLVAGDIVLDKLGERLAILLKVRDMVSSHVERVFQIYEQHADTVGIDAVLQPSAVSPSVADMLEWLQDIERHYRKSYLKRKYLLSSIQWGDLANIQALPKAWDRISKDEHQDLVQDILLNVSFFLEE

SEQ ID NO: 39774 - protein, 308 aa, Homo sapiens [sequence omitted]

SEQ ID NO: 39775 - protein, 1879 aa, Homo sapiens
MLGLVAGAHGDSKPVFIKVPEDQTGLSGGVASFVCQATGEPKPRITWMKKGKKVSSQRFEVIEFDDGAGSVLRIQPLRVQRDEAIYECTATNSLGEINTSAKLSVLEEEQLPPGFPSIDMGPQLKVVEKARTATMLCAAGGNPDPEISWFKDFLPVDPATSNGRIKQLRSGALQIESSEESDQGKYECVATNSAGTRYSAPANLYVRVRRVAPRFSIPPSSQEVMPGGSVNLTCVAVGAPMPYVKWMMGAEELTKEDEMPVGRNVLELSNVVRSANYTCVAISSLGMIEATAQVTVKALPKPPIDLVVTETTATSVTLTWDSGNSEPVTYYGIQYRAAGTEGPFQEVDGVATTRYSIGGLSPFSEYAFRVLAVNSIGRGPPSEAVRARTGEQAPSSPPRRVQARMLSASTMLVQWEPPEEPNGLVRGYRVYYTPDSRRPPNAWHKHNTDAGLLTTVGSLLPGITYSLRVLAFTAVGDGPPSPTIQVKTQQGVPAQPADFQAEVESDTRIQLSWLLPPQERIIMYELVYWAAEDEDQQHKVTFDPTSSYTLEDLKPDTLYRFQLAARSDMGVGVFTPTIEARTAQSTPSAPPQKVMCVSMGSTTVRVSWVPPPADSRNGVITQYSVAYEAVDGEDRGRHVVDGISREHSSWDLVGLEKWTEYRVWVRAHTDVGPGPESSPVLVRTDEDVPSGPPRKVEVEPLNSTAVHVYWKLPVPSKQHGQIRGYQVTYVRLENGEPRGLPIIQDVMLAEAQETTISGLTPETTYSVTVAAYTTKGDGARSKPKIVTTTGAVPGRPTMMISTTAMNTALLQWHPPKELPGELLGYRLQYCRADEARPNTIDFGKDDQHFTVTGLHKGTTYIFRLAAKNRAGLGEEFEKEIRTPEDLPSGFPQNLHVTGLTTSTTELAWDPPVLAERNGRIISYTVVFRDINSQQELQNITTDTRFTLTGLKPDTTYDIKVRAWTSKGSGPLSPSIQSRTMPVEQVFAKNFRVAAAMKTSVLLSWEVPDSYKSAVPFKILYNGQSVEVDGHSMRKLIADLQPNTEYSFVLMNRGSSAGGLQHLVSIRTAPDLLPHKPLPASAYIEDGRFDLSMPHVQDPSLVRWFYIVVVPIDRVGGSMLTPRWSTPEELELDELLEAIEQGGEEQRRRRRQAERLKPYVAAQLDVLPETFTLGDKKNYRGFYNRPLSPDLSYQCFVLASLKEPMDQKRYASSPYSDEIVVQVTPAQQQEEPEMLWVTGPVLAVILIILIVIAILLFKRKRTHSPSSKDEQSIGLKDSLLAHSSDPVEMRRLNYQTPGMRDHPPIPITDLADNIERLKANDGLKFSQEYESIDPGQQFTWENSNLEVNKPKNRYANVIAYDHSRVILTSIDGVPGSDYINANYIDGYRKQNAYIATQGPLPETMGDFWRMVWEQRTATVVMMTRLEEKSRVKCDQYWPARGTETCGLIQVTLLDTVELATYTVRTFALHKSGSSEKRELRQFQFMAWPDHGVPEYPTPILAFLRRVKACNPLDAGPMVVHCSAGVGRTGCFIVIDAMLERMKHEKTVDIYGHVTCMRSQRNYMVQTEDQYVFIHEALLEAATCGHTEVPARNLYAHIQKLGQVPPGESVTAMELEFKLLASSKAHTSRFISANLPCNKFKNRLVNIMPYELTRVCLQPIRGVEGSDYINASFLDGYRQQKAYIATQGPLAESTEDFWRMLWEHNSTIIVMLTKLREMGREKCHQYWPAERSARYQYFVVDPMAEYNMPQYILREFKVTDARDGQSRTIRQFQFTDWPEQGVPKTGEGFIDFIGQVHKTKEQFGQDGPITVHCSAGVGRTGVFITLSIVLERMRYEGVVDMFQTVKTLRTQRPAMVQTEDQYQLCYRAALEYLGSFDHYAT

SEQ ID NO: 39776 - protein, 437 aa, Homo sapiens
MFSLEENKKSKGRRQPLSKLPRHHPLVLQECVSDDETSEQLTPEEEAEETEAWAKPLSQLWQNRPPNFEAEKEFNETMAQQAPHCAVCMIFQTYHQVEFGGFNQNCGNASDLAPQKQRTKPLIPEMCFTSTGCSTDINLSTPYLEEDGTSILVSCKKCSVRVHASCYGVPPAKASEDWMCSRCSANALEEDCCLCSLRGGALQRANDDRWVHVSCAVAILEARFVNIAERSPVDVSKIPLPRFKLKCIFCKKRRKRTAGCCVQCSHGRCPTAFHVSCAQAAGVMMQPDDWPFVVFITCFRHKIPNLERAKGALQSITAGQKVISKHKNGRFYQCEVVRLTTETFYEVNFDDGSFSDNLYPEDIVSQDCLQFGPPAEGEVVQVRWTDGQVYGAKFVASHPIQMYQVEFEDGSQLVVKRDDVYTLDEELPKRVKSRLVI

SEQ ID NO: 39777 - protein, 230 aa, Homo sapiens [sequence omitted]

SEQ ID NO: 39778 - protein, 723 aa, Homo sapiens [sequence omitted]

SEQ ID NO: 39779 - protein, 142 aa, Homo sapiens [sequence omitted]

SEQ ID NO: 39780 - protein, 83 aa, Homo sapiens [sequence omitted]

SEQ ID NO: 39781 - protein, 735 aa, Homo sapiens
MEEASPYSLLDICLNFLTTHLEKFCSARQDGTLCLQEPGVFPQEVADRLLRTMAFHGLLNDGTVGIFRGNQMRLKRACIRKAKISAVAFRKAFCHHKLVELDATGVNADITITDIISGLGSNKWIQQNLQCLVLNSLTLSLEDPYERCFSRLSGLRALSITNVLFYNEDLAEVASLPRLESLDISNTSITDITALLACKDRLKSLTMHHLKCLKMTTTQILDVVRELKHLNHLDISDDKQFTSDIALRLLEQKDILPNLVSLDVSGRKHVTDKAVEAFIQQRPSMQFVGLLATDAGYSEFLTGEGHLKVSGEANETQIAEALKRYSERAFFVREALFHLFSLTHVMEKTKPEILKLVVTGMRNHPMNLPVQLAASACVFNLTKQDLAAGMPVRLLADVTHLLLKAMEHFPNHQQLQKNCLLSLCSDRILQDVPFNRFEAAKLVMQWLCNHEDQNMQRMAVAIISILAAKLSTEQTAQLGTELFIVRQLLQIVKQKTNQNSVDTTLKFTLSALWNLTDESPTTCRHFIENQGLELFMRVLESFPTESSIQQKVLGLLNNIAEVQELHSELMWKDFIDHISSLLHSVEVEVSYFAAGIIAHLISRGEQAWTLSRSQRNSLLDDLHSAILKWPTPECEMVAYRSFNPFFPLLGCFTTPGVQLWAVWAMQHVCSKNPSRYCSMLIEEGGLQHLYNIKDHEHTDPHVQQIAVAILDSLEKHIVRHGRPPPCKKQPQARLN

SEQ ID NO: 39782 - protein, 527 aa, Homo sapiens [sequence omitted]

SEQ ID NO: 39783 - protein, 2606 aa, Homo sapiens
MGFSDPATIRKALRLAKNDINEAVALLTNERPGLDYGGYEPMDSGGGPSPGPGGGPRGDGGGDGGGGGPSRGGSTGGGGGFDPPPAYHEVVDAEKNDENGNCSGEGIEFPTTNLYELESRVLTDHWSIPYKREESLGKCLLASTYLARLGLSESDENCRRFMDRCMPEAFKKLLTSSAVHKWGTEIHEGIYNMLMLLIELVAERIKQDPIPTGLLGVLTMAFNPDNEYHFKNRMKVSQRNWAEVFGEGNMFAVSPVSTFQKEPHGWVVDLVNKFGELGGFAAIQAKLHSEDIELGAVSALIQPLGVCAEYLNSSVVQPMLDPVILTTIQDVRSVEEKDLKDKRLVSIPELLSAVKLLCMRFQPDLVTIVDDLRLDILLRMLKSPHFSAKMNSLKEVTKLIEDSTLSKSVKNAIDTDRLLDWLVENSVLSIALEGNIDQAQYCDRIKGIIELLGSKLSLDELTKIWKIQSGQSSTVIENIHTIIAAAAVKFNSDQLNHLFVLIQKSWETESDRVRQKLLSLIGRIGREARFETTSGKVLDVLWELAHLPTLPSSLIQQALEEHLTILSDAYAVKEAIKRSYIIKCIEDIKRPGEWSGLEKNKKDGFKSSQLNNPQFVWVVPALRQLHEITRSFIKQTYQKQDKSIIQDLKKNFEIVKLVTGSLIACHRLAAAVAGPGGLSGSTLVDGRYTYREYLEAHLKFLAFFLQEATLYLGWNRAKEIWECLVTGQDVCELDREMCFEWFTKGQHDLESDVQQQLFKEKILKLESYEITMNGFNLFKTFFENVNLCDHRLKRQGAQLYVEKLELIGMDFIWKIAMESPDEEIANEAIQLIINYSYINLNPRLKKDSVSLHKKFIADCYTRLEAASSALGGPTLTHAVTRATKMLTATAMPTVATSVQSPYRSTKLVIIERLLLLAERYVITIEDFYSVPRTILPHGASFHGHLLTLNVTYESTKDTFTVEAHSNETIGSVRWKIAKQLCSPVDNIQIFTNDSLLTVNKDQKLLHQLGFSDEQILTVKTSGSGTPSGSSADSSTSSSSSSSGVFSSSYAMEQEKSLPGVVMALVCNVFDMLYQLANLEEPRITLRVRKLLLLIPTDPAIQEALDQLDSLGRKKTLLSESSSQSSKSPSLSSKQQHQPSASSILESLFRSFAPGMSTFRVLYNLEVLSSKLMPTADDDMARSCAKSFCENFLKAGGLSLVVNVMQRDSIPSEVDYETRQGVYSICLQLARFLLVGQTMPTLLDEDLTKDGIEALSSRPFRNVSRQTSRQMSLCGTPEKSSYRQLSVSDRSSIRVEEIIPAARVAIQTMEVSDFTSTVACFMRLSWAAAAGRLDLVGSSQPIKESNSLCPAGIRNRLSSSGSNCSSGSEGEPVALHAGICVRQQSVSTKDSLIAGEALSLLVTCLQLRSQQLASFYNLPCVADFIIDILLGSPSAEIRRVACDQLYTLSQTDTSAHPDVQKPNQFLLGVILTAQLPLWSPTSIMRGVNQRLLSQCMEYFDLRCQLLDDLTTSEMEQLRISPATMLEDEITWLDNFEPNRTAECETSEADNILLAGHLRLIKTLLSLCGAEKEMLGSSLIKPLLDDFLFRASRIILNSHSPAGSAAISQQDFHPKCSTANSRLAAYEVLVMLADSSPSNLQIIIKELLSMHHQPDPALTKEFDYLPPVDSRSSSGFVGLRNGGATCYMNAVFQQLYMQPGLPESLLSVDDDTDNPDDSVFYQVQSLFGHLMESKLQYYVPENFWKIFKMWNKELYVREQQDAYEFFTSLIDQMDEYLKKMGRDQIFKNTFQGIYSDQKICKDCPHRYEREEAFMALNLGVTSCQSLEISLDQFVRGEVLEGSNAYYCEKCKEKRITVKRTCIKSLPSVLVIHLMRFGFDWESGRSIKYDEQIRFPWMLNMEPYTVSGMARQDSSSEVGENGRSVDQGGGGSPRKKVALTENYELVGVIVHSGQAHAGHYYSFIKDRRGCGKGKWYKFNDTVIEEFDLNDETLEYECFGGEYRPKVYDQTNPYTDVRRRYWNAYMLFYQRVSDQNSPVLPKKSRVSVVRQEAEDLSLSAPSSPEISPQSSPRPHRPNNDRLSILTKLVKKGEKKGLFVEKMPARIYQMVRDENLKFMKNRDVYSSDYFSFVLSLASLNATKLKHPYYPCMAKVSLQLAIQFLFQTYLRTKKKLRVDTEEWIATIEALLSKSFDACQWLVEYFISSEGRELIKIFLLECNVREVRVAVATILEKTLDSALFYQDKLKSLHQLLEVLLALLDKDVPENCKNCAQYFFLFNTFVQKQGIRAGDLLLRHSALRHMISFLLGASRQNNQIRRWSSAQAREFGNLHNTVALLVLHSDVSSQRNVAPGIFKQRPPISIAPSSPLLPLHEEVEALLFMSEGKPYLLEVMFALRELTGSLLALIEMVVYCCFCNEHFSFTMLHFIKNQLETAPPHELKNTFQLLHEILVIEDPIQVERVKFVFETENGLLALMHHSNHVDSSRCYQCVKFLVTLAQKCPAAKEYFKENSHHWSWAVQWLQKKMSEHYWTPQSNVSNETSTGKTFQRTISAQDTLAYATALLNEKEQSGSSNGSESSPANENGDRHLQQGSESPMMIGELRSDLDDVDP

SEQ ID NO: 39784 - protein, 436 aa, Homo sapiens [sequence omitted]

SEQ ID NO: 39785 - protein, 117 aa, Homo sapiens [sequence omitted]

SEQ ID NO: 39786 - protein, 221 aa, Homo sapiens
MRDQFFTTSSCAGRILLLDRGINGFEVQKQNCCWLLVTHKLCVKDDVIVALKKANGDATLKFEPFVLHVQCRQLQDAQILHSMAIDSGFRNSGITVGKRGKTMLAVRSTHGLEVPLSHKGKLMVTEEYIDFLLNVANQKMEENKKRIERFYNCLQHALERETMTNLHPKIKEKNNSSYIHKKKRNPEKTRAQCITKESDEELENDDDDDLGINVTIFPEDY

SEQ ID NO: 39787 - protein, 797 aa, Homo sapiens
MSAFRNHCPHLDSVGEITKEDLIQKSLGTCQDCKVQGPNLWACLENRCSYVGCGESQVDHSTIHSQETKHYLTVNLTTLRVWCYACSKEVFLDRKLGTQPSLPHVRQPHQIQENSVQDFKIPSNTTLKTPLVAVFDDLDIEADEEDELRARGLTGLKNIGNTCYMNAALQALSNCPPLTQFFLDCGGLARTDKKPAICKSYLKLMTELWHKSRPGSVVPTTLFQGIKTVNPTFRGYSQQDAQEFLRCLMDLLHEELKEQVMEVEEDPQTITTEETMEEDKSQSDVDFQSCESCSNSDRAENENGSRCFSEDNNETTMLIQDDENNSEMSKDWQKEKMCNKINKVNSEGEFDKDRDSISETVDLNNQETVKVQIHSRASEYITDVHSNDLSTPQILPSNEGVNPRLSASPPKSGNLWPGLAPPHKKAQSASPKRKKQHKKYRSVISDIFDGTIISSVQCLTCDRVSVTLETFQDLSLPIPGKEDLAKLHSSSHPTSIVKAGSCGEAYAPQGWIAFFMEYVKSWFWGPVVTLQDCLAAFFARDELKGDNMYSCEKCKKLRNGVKFCKVQNFPEILCIHLKRFRHELMFSTKISTHVSFPLEGLDLQPFLAKDSPAQIVTYDLLSVICHHGTASSGHYIAYCRNNLNNLWYEFDDQSVTEVSESTVQNAEAYVLFYRKSSEEAQKERRRISNLLNIMEPSLLQFYISRQWLNKFKTFAEPGPISNNDFLCIHGGVPPRKAGYIEDLVLMLPQNIWDNLYSRYGGGPAVNHLYICHTCQIEAEKIEKRRKTELEIFIRVKK

SEQ ID NO: 39788 - protein, 51 aa, Homo sapiens
MGQAVPAPTGAPPGGQPDYSAAWAEYYRQQAAYYAQTSPQGMPQHPPAPQV

SEQ ID NO: 39789 - protein, 505 aa, Homo sapiens
MLLENLTDNESENTNLKKKVFEKEAHIQELSCLFQSEKANTLKANRFSQSVKVVHERLQIQIHKREAENDKLKEYVKSLETKIAKWNLQSRMNKNEAIVMKEASRQKTVALKKASKVYKQRLDHFTGAIEKLTSQIRDQEAKLSETISASNAWKSHYEKIVIEKTELEVQIETMKKQIINLLEDLKKMEDHGKNSCEEILRKVHSIEYENETLNLENTKLKLRFPCRITESKNMNILIVLDMLCYISSEKTTLAALKDEVVSVENELSELQEVEKKQKTLIEMYKTQVQKLQEAAEIVKSRCENLLHKNNQITKTKNKNVEKMRGQMESHLKELERVCDSLTAAERRLHECQESLQCCKGKCADQEHTIRELQGQVDGNHNLLTKLSLEEENCLIQLKCENLQQKLEQMDAENKELEKKLANQEECLKHSNLKFKEKSAEYTALARQLEAALEEGRQKVAEEIEKMSSRESALQIKILDLETELRKKNEEQNQLVCKMNSDPETP

SEQ ID NO: 39790 - protein, 1302 aa, Homo sapiens
MDDLKINTDITGAKEELLDDNNFISDKESGVHKPKDCQTSFQKNNTLTLPEELSKDKSENALSGGQSSLFIHAGAPTVSSENFILPKGAAVNGPVSHSSLTKTSNMNKGSVSLTTGQPVDQPTTESCSTLKVAADLQLSTPQKASQHQVLFLLSDVAHAKNPTHSNKKLPTSASVGCDIQNSVGSNIKSDGTLINQVEVGEDGEDLLVKDDCVNTVTGISSGTDGFRSENDTNWDPQKEFIQFLMTNEETVDKAPPHSKIGLEKKRKRKMDVSKITRYTEDCFSDSNCVPNKSKMQEVDFLEQNEELQAVDSQKYALSKVKPESTDEDLESVDAFQHLIYNPDKCGEESSPVHTSTFLSNTLKKKCEESDSESPATFSTEEPSFYPCTKCNVNFREKKHLHRHMMYHLDGNSHFRHLNVPRPYACRECGRTFRDRNSLLKHMIIHQERRQKLMEEIRELKELQDEGRSARLQCPQCVFGTNCPKTFVQHAKTHEKDKRYYCCEECNFMAVTENELECHRGIAHGAVVKCPMVTSDIAQRKTQKKTFMKDSVVGSSKKSATYICKMCPFTTSAKSVLKKHTEYLHSSSCVDSFGSPLGLDKRKNDILEEPVDSDSTKTLTKQQSTTFPKNSALKQDVKRTFGSTSQSSSFSKIHKRPHRIQKARKSIAQSGVNMCNQNSSPHKNVTIKSSVDQKPKYFHQAAKEKSNAKANSHYLYRHKYENYRMIKKSGESYPVHFKKEEASSLNSLHLFSSSSNSHNNFISDPHKPDAKRPESFKDHRRVAVKRVIKESKKESSVGGEDLDSYPDFLHKMTVVVLQKLNSAEKKDSYETEDESSWDNVELGDYTTQAIEDETYSDINQEHVNLFPLFKSKVEGQEPGENATLSYDQNDGFYFEYYEDTGSNNFLHEIHDPQHLETADASLSKHSSVFHWTDLSLEKKSCPYCPATFETGVGLSNHVRGHLHRAGLSYEARHVVSPEQIATSDKMQHFKRTGTGTPVKRVRKAIEKSETTSEHTCQLCGGWFDTKIGLSNHVRGHLKRLGKTKWDAHKSPICVLNEMMQNEEKYEKILKALNSRRIIPRPFVAQKLASSDDFISQNVIPLEAYRNGLKTEALSVSASEEEGLNFLNEYDETKPELPSGKKNQSLTLIELLKNKRMGEERNSAISPQKIHNQTARKRFVQKCVLPLNEDSPLMYQPQKMDLTMHSALDCKQKKSRSRSGSKKKMLTLPHGADEVYILRCRFCGLVFRGPLSVQEDWIKHLQRHIVNANLPRTGAGMVEVTSLLKKPASITETSFSLLMAEAAS

SEQ ID NO: 39791 - protein, 236 aa, Homo sapiens
MLLEALDCILPPTRPTDKPLRLPLQDVYKIGGIGTVLVGRVETGILKPGMVVTFAPVSVTTEVKSVEMHHEALNEALPGDNMGFNVKNVSVKDVHRGNVAGDSKNDPPMEAAGFTAQVIILNHPGQISSGYAPVLDCHTAHIACKFAELKEKIDRRSGKKLEDGPKFLKSGDAAIADMVPGKPMCVESFSDYPPLGRFTVHDMRQTLAVGVIKAVDKKAAGAGKVTKSAQKAQKAK

SEQ ID NO: 39792 - protein, 677 aa, Homo sapiens
MREDHSFHVRYRMEASCLELALEGERLCKSGDCRAGVSFFEAAVQVGTEDLKTLSAIYSQLGNAYFYLHDYAKALEYHHHDLTLARTIGDQLGEAKASGNLGNTLKVLGNFDEAIVCCQRHLDISRELNDKVGEARALYNLGNVYHAKGKSFGCPGPQDVGEFPEEVRDALQAAVDFYEENLSLVTALGDRAAQGRAFGNLGNTHYLLGNFRDAVIAHEQRLLIAKEFGDKAAERRAYSNLGNAYIFLGEFETASEYYKKTLLLARQLKDRAVEAQSCYSLGNTYTLLQDYEKAIDYHLKHLAIAQELNDRIGEGRACWSLGNAYTALGNHDQAMHFAEKHLEISREVGDKSGELTARLNLSDLQMVLGLSYSTNNSIMSENTEIDSSLNGVRPKLGRRHSMENMELMKLTPEKVQNWNSEILAKQKPLIAKPSAKLLFVNRLKGKKYKTNSSTKVLQDASNSIDHRIPNSQRKISADTIGDEGFFDLLSRFQSNRMDDQRCCLQEKNCHTASTTTSSTPPKMMLKTSSVPVVSPNTDEFLDLLASSQSRRLDDQRASFSNLPGLRLTQNSQSVLSHLMTNDNKEADEDFFDILVKCQGSRLDDQRCAPPPATTKGPTVPDEDFFSLILRSQGKRMDEQRVLLQRDQNRDTDFGLKDFLQNNALLEFKNSGKKSADH

SEQ ID NO: 39793 - protein, 193 aa, Homo sapiens [sequence omitted]

SEQ ID NO: 39794 - protein, 216 aa, Homo sapiens [sequence omitted]

SEQ ID NO: 39795 - protein, 151 aa, Homo sapiens
MPMTLGYWNIRGLAHSIRLLLEYTDSSYEEKKYTMGDAPDYDRSQWLNEKFKLGLDFPNLPYLIDGTHKITQSNAILRYIARKHNLCGESEKEQIREDILENQFMDSRMQLAKLCYDPDFVSPPTPLPVSPSLLPVSPFPAEFVSKIDSFW

SEQ ID NO: 39796 - protein, 421 aa, Homo sapiens
MLFGMVTKFCSGHAPHFPMKKVLLLLWKTVLCTLGGFEELQSMKAEKRSILGLPPLPEDSIKVIRNMRAASPPASASDLIEQQQKRGRREHKALIKQDNLDAFNERDPYKADDSREEEEENDDDNSLEGETFPLERDEVMPPPLQHPQTDRLTCPKGLPWAPKVREKDIEMFLESSRSKFIGYTLGSDTNTVVGLPRPIHESIKTLKQHKYTSIAEVQAQMEEEYLRSPLSGGEEEVEQVPAETLYQGLLPSLPQYMIALLKILLAAAPTSKAKTDSINILADVLPEEMPTTVLQSMKLGVDVNRHKEVIVKAISAVLLLLLKHFKLNHVYQVPTGLSLLSCGLGPRALLLLQPTRTGALAFDPLELCMNVLRHGPSAKAFHPWRKEGKVPRAAPFFFFFFPVGFSLNTWPSTWCLPTAFL

SEQ ID NO: 39797 - protein, 962 aa, Homo sapiens
MNYNELTEIPYFGEPTSNITLLSLVHNIIPEINAQALQFYPALESLDLSSNIISEIKTSSFPRMQLKYLNLSNNRITTLEAGCFDNLSSSLLVVKLNRNRMSMIPPKIFKLPHLQFLELKRNRIKIVEGLTFQGLDSLRSLKMQRNGISKLKDGAFFGLNNMEELELEHNNLTRVNKGWLYGLRMLQQLYVSQNAIERISPDAWEFCQRLSELDLSYNQLTRLDESAFVGLSLLERLNLGDNRVTHIADGVFRFLSNLQTLDLRNNEISWAIEDASEAFAGLTSLTKLILQGNQIKSITKKAFIGLESLEHLDLNNNAIMSIQENAFSQTHLKELILNTSSLLCDCHLKWLLQWLVDNNFQHSVNVSCAHPEWLAGQSILNVDLKDFVCDDFLKPQIRTHPETIIALRGMNVTLTCTAVSSSDSPMSTVWRKDSEILYDVDTENFVRYWQQAGEALEYTSILHLFNVNFTDEGKYQCIVTNHFGSNYSQKAKLTVNEMPSFLKTPMDLTIRTGAMARLECAAEGHPAPQISWQKDGGTDFPAARERRMHVMPEDDVFFIANVKIEDMGIYSCMAQNTAGGLSANASLTVLETPSFIRPLEDKTVTRGETAVLQCIAGGSPAPRLNWTKDDGPLLVTERHFFAAANQLLIIVDAGLEDAGKYTCIMSNTLGTERGHIYLNVISSPNCDSSQSSIGHEDDGWTTVGIVIIVVVCCVVGTSLIWVIVIYHMRRKNEDYSITNTEELNLPADIPSYLSSQGTLSEPQEGYSNSEAGSHQQLMPPANGYIHKGTDGGTGTRVICSDCYDNANIYSRTREYCPYTYIAEEDVLDQTLSSLMVQMPKETYLVHPPQDTTALESLIPSANREPSAFPTNHERISEKKLPSTQMSGETLQRPVWNINRELGLPHPPFSQQPVHESPQLHQNEGLAGREPDCSASSMSCHRLQDHAFDFSRTRNIQDGSEGT

SEQ ID NO: 39798 - protein, 759 aa, Homo sapiens
MKLLQQQNDITGLSRQVKHVMNFTNWAIASGSSTALLYSKRLITFQLRHILKARCDPVPAANGAIRFHCDPTFWAKNVVNLGNLVIESKPAPGYTPNVVVGQVPPGTNHISKTPGQINLAQLRLQHMQQQVYAQKHQQLQQMRMQQPPAPVPTTTTTTQQHPRQAAPQMLQQQPPRLISVQTMQRGNMNCGAFQAHQMRLAQNAARIPGIPRHSGPQYSMMQPHLQRQHSNPGHAGPFPVVSVHNTTINPTSPTTATMANANRGPTSPSVTAIELIPSVTNPENLPSLPDIPPIQANVVPMMHSWYEFGAREKTQDQNVLEDAGSSSLDNLLSRYISGSHLPPQPTSTMNPSPGPSALSPGSSGLSNSHTPVRPPSTSSTGSRGSCGSSGRTAEKTSLSFKSDQVKVKQEPGTEDEICSFSGGVKQEKTEDGRRSACMLSSPESSLTPPLSTNLHLESELDALASLENHVKIEPADMNESCKQSGLSSLVNGKSPIRSLMHRSARIGGDGNNKDDDPNEDWCAVCQNGGDLLCCEKCPKVFHLTCHVPTLLSFPSGDWICTFCRDIGKPEVEYDCDNLQHSKKGKTAQGLSPVDQRKCERLLLYLYCHELSIEFQEPVPASIPNYYKIIKKPMDLSTVKKKLQKKHSQHYQIPDDFVADVRLIFKNCERFNEMMKVVQVYADTQEINLKADSEVAQAGKAVALYFEDKLTEIYSDRTFAPLPEFEQEEDDGEVTEDSDEDFIQPRRKRLKSDERPVHIK

SEQ ID NO: 39799 - protein, 123 aa, Homo sapiens
MRDQYMRTGEGFLCVFAINNSKSFADINLYREQIKRVKDSDDVPMVLVGNKCDLPTRTVDTKQAHELAKSYGIPFIETSAKTRQGVEDAFYTLVREIRQYRMKKLNSSDDGTQGCMGLPCVVM

SEQ ID NO: 39800 - protein, 2388 aa, Homo sapiens
MLGKATCRCASGFTGEDCQYSTSHPCFVSRPCLNGGTCHMLSRDTYECTCQVGFTGKECQWTDACLSHPCANGSTCTTVANQFSCKCLTGFTGQKCETDVNECDIPGHCQHGGTCLNLPGSYQCQCPQGFTGQYCDSLYVPCAPSPCVNGGTCRQTGDFTFECNCLPGFEGSTCERNIDDCPNHRCQNGGVCVDGVNTYNCRCPPQWTGQFCTEDVDECLLQPNACQNGGTCANRNGGYGCVCVNGWSGDDCSENIDDCAFASCTPGSTCIDRVASFSCMCPEGKAGLLCHLDDACISNPCHKGALCDTNPLNGQYICTCPQGYKGADCTEDVDECAMANSNPCEHAGKCVNTDGAFHCECLKGYAGPRCEMDINECHSDPCQNDATCLDKIGGFTCLCMPGFKGVHCELEINECQSNPCVNNGQCVDKVNRFQCLCPPGFTGPVCQIDIDDCSSTPCLNGAKCIDHPNGYECQCATGFTGVLCEENIDNCDPDPCHHGQCQDGIDSYTCICNPGYMGAICSDQIDECYSSPCLNDGRCIDLVNGYQCNCQPGTSGVNCEINFDDCASNPCIHGICMDGINRYSCVCSPGFTGQRCNIDIDECASNPCRKGATCINGVNGFRCICPEGPHHPSCYSQVNECLSNPCIHGNCTGGLSGYKCLCDAGWVGINCEVDKNECLSNPCQNGGTCDNLVNGYRCTCKKGFKGYNCQVNIDECASNPCLNQGTCFDDISGYTCHCVLPYTGKNCQTVLAPCSPNPCENAAVCKESPNFESYTCLCAPGWQGQRCTIDIDECISKPCMNHGLCHNTQGSYMCECPPGFSGMDCEEDIDDCLANPCQNGGSCMDGVNTFSCLCLPGFTGDKCQTDMNECLSEPCKNGGTCSDYVNSYTCKCQAGFDGVHCENNINECTESSCFNGGTCVDGINSFSCLCPVGFTGSFCLHEINECSSHPCLNEGTCVDGLGTYRCSCPLGYTGKNCQTLVNLCSRSPCKNKGTCVQKKAESQCLCPSGWAGAYCDVPNVSCDIAASRRGVLVEHLCQHSGVCINAGNTHYCQCPLGYTGSYCEEQLDECASNPCQHGATCSDFIGGYRCECVPGYQGVNCEYEVDECQNQPCQNGGTCIDLVNHFKCSCPPGTRGLLCEENIDDCARGPHCLNGGQCMDRIGGYSCRCLPGFAGERCEGDINECLSNPCSSEGSLDCIQLTNDYLCVCRSAFTGRHCETFVDVCPQMPCLNGGTCAVASNMPDGFICRCPPGFSGARCQSSCGQVKCRKGEQCVHTASGPRCFCPSPRDCESGCASSPCQHGGSCHPQRQPPYYSCQCAPPFSGSRCELYTAPPSTPPATCLSQYCADKARDGVCDEACNSHACQWDGGDCSLTMENPWANCSSPLPCWDYINNQCDELCNTVECLFDNFECQGNSKTCKYDKYCADHFKDNHCDQGCNSEECGWDGLDCAADQPENLAEGTLVIVVLMPPEQLLQDARSFLRALGTLLHTNLRIKRDSQGELMVYPYYGEKSAAMKKQRMTRRSLPGEQEQEVAGSKVFLEIDNRQCVQDSDHCFKNTDAAAALLASHAIQGTLSYPLVSVVSESLTPERTQLLYLLAVAVVIILFIILLGVIMAKRKRKHGSLWLPEGFTLRRDASNHKRREPVGQDAVGLKNLSVQVSEANLIGTGTSEHWVDDEGPQPKKVKAEDEALLSEEDDPIDRRPWTQQHLEAADIRRTPSLALTPPQAEQEVDVLDVNVRGPDGCTPLMLASLRGGSSDLSDEDEDAEDSSANIITDLVYQGASLQAQTDRTGEMALHLAARYSRADAAKRLLDAGADANAQDNMGRCPLHAAVAADAQGVFQILIRNRVTDLDARMNDGTTPLILAARLAVEGMVAELINCQADVNAVDDHGKSALHWAAAVNNVEATLLLLKNGANRDMQDNKEETPLFLAAREGSYEAAKILLDHFANRDITDHMDRLPRDVARDRMHHDIVRLLDEYNVTPSPPGTVLTSALSPVICGPNRSFLSLKHTPMGKKSRRPSAKSTMPTSLPNLAKEAKDAKGSRRKKSLSEKVQLSESSVTLSPVDSLESPHTYVSDTTSSPMITSPGILQASPNPMLATAAPPAPVHAQHALSFSNLHEMQPLAHGASTVLPSVSQLLSHHHIVSPGSGSAGSLSRLHPVPVPADWMNRMEVNETQYNEMFGMVLAPAEGTHPGIAPQSRPPEGKHITTPREPLPPIVTFQLIPKGSIAQPAGAPQPQSTCPPAVAGPLPTMYQIPEMARLPSVAFPTAMMPQQDGQVAQTILPAYHPFPASVGKYPTPPSQHSYASSNAAERTPSHSGHLQGEHPYLTPSPESPDQWSSSSPHSASDWSDVTTSPTPGGAGGGQRGPGTHMSEPPHNNMQVYA

SEQ ID NO: 39801 - protein, 784 aa, Homo sapiens
MQRFAPGLSCVTYAGDKEERACLQQDLKQESRFHVLLTTYEICLKDASFLKSFPWSVLVVDEAHRLKNQSSLLHKTLSEFSVVFSLLLTGTPIQNSLQELYSLLSFVEPDLFSKEEVGDFIQRYQDIEKESESGNELHKLLQPFLLRRVKAEVATELPKKTEVVIYHGMSALQKKYYKAILMKDLDAFENETAKKVKLQNILSQLRKCVDHPYLFDGVEPEPFEVGDHLTEASGKLHLLDKLLAFLYSGGHRVLLFSQMTQMLDILQDYMDYRGYSYERVDGSVRGEERHLAIKNFGQQPIFVFLLSTRAGGVGMNLTAADTVIFVDSDFNPQNDLQAAARAHRIGQNKSVKVIRLIGRDTVEEIVYRKAASKLQLTNMIIEGGHFTLGAQKPAADADLQLSEILKFGLDKLLASEGSTMDEIDLESILGETKDGQWVSDALPAAEGGSRDQEEGKNHMYLFEGKDYSKEPSKEDRKSFEQLVNLQKTLLEKASQEGRSLRNKGSVLIPGLVEGSTKRKRVLSPEELEDRQKKRQEAAAKRRRLIEEKKRQKEEAEHKKKMAWWESNNYQSFCLPSEESEPEDLENGEESSAELDYQDPDATSLKYVSGDVTHPQAGAEDALIVHCVDDSGHWGRGGLFTALEKRSAEPRKIYELAGKMKDLSLGGVLLFPVDDKESRNKGQDLLALIVAQHRDRSNVLSGIKMAALEEGLKKIFLAAKKKKASVHLPRIGHATKGFNWYGTERLIRKHLAARGIPTYIYYFPRSKSAVLHSQSSSSSSRQLVP

SEQ ID NO: 39802 - protein, 1060 aa, Homo sapiens
MLDRIYRFDTVIARIEALSIERLQKLLLEKDRLKFCIASMYRKNNDDSGAEIKAGNGTVDMSVLPDARYSALLQEDFAYSGFECWVENEDQIQEPHSCHGSEGPGNRPRRCRGCAALRVADSDYEAICKVPRKVARSISCGPSSRWSTSICTEEPALSEVGPPDLASTKVPPDGESMEEETPGSSVESLDASVQASPPQQKDEETERSAKELGKCDCCSDDQAPQHGCNHKLELALSMIKGLDYKPIQSPRGSRLPIPVKSSLPGAKPGPSMTDGVSSGFLNRSLKPLYKTPVSYPLELSDLQELWDDLCEDYLPLRVQPMTEELLKQQKLNSHETTITQQSVSDSHLAELQEKIQQTEATNKILQEKLNEMSYELKCAQESSQKQDGTIQNLKETLKSRERETEELYQVIEGQNDTMAKLREMLHQSQLGQLHSSEGTSPAQQQVALLDLQSALFCSQLEIQKLQRVVRQKERQLADAKQCVQFVEAAAHESEQQKEASWKHNQELRKALQQLQEELQNKSQQLRAWEAEKYNEIRTQEQNIQHLNHSLSHKEQLLQEFRELLQYRDNSDKTLEANEMLLEKLRQRIHDKAVALERAIDEKFSALEEKEKELRQLRLAVRERDHDLERLRDVLSSNEATMQSMESLLRAKGLEVEQLSTTCQNLQWLKEEMETKFSRWQKEQESIIQQLQTSLHDRNKEVEDLSATLLCKLGPGQSEIAEELCQRLQRKERMLQDLLSDRNKQVLEHEMEIQGLLQSVSTREQESQAAAEKLVQALMERNSELQALRQYLGGRDSLMSQAPISNQQAEVTPTGRLGKQTDQGSMQIPSRDDSTSLTAKEDVSIPRSTLGDLDTVAGLEKELSNAKEELELMAKKERESQMELSALQSMMAVQEEELQVQAADMESLTRNIQIKEDLIKDLQMQLVDPEDIPAMERLTQEVLLLREKVASVESQGQEISGNRRQQLLLMLEGLVDERSRLNEALQAERQLYSSLVKFHAHPESSERDRTLQVELEGAQVLRSRLEEVLGRSLERLNRLETLAAIGGGELESVRIHHKHAY

SEQ ID NO: 39803 - protein, 630 aa, Homo sapiens
MADGAPLAGVRGGLSDGEGPPGGRGEAQRRKEREELAQQYEAILRECGHGRFQWTLYFVLGLALMADGVEVFVVGFVLPSAEKDMCLSDSNKGMLGLIVYLGMMVGAFLWGGLADRLGRRQCLLISLSVNSVFAFFSSFVQGYGTFLFCRLLSGVGIGGSIPIVFSYFSEFLAQEKRGEHLSWLCMFWMIGGVYAAAMAWAIIPHYGWSFQMGSAYQFHSWRVFVLVCAFPSVFAIGALTTQPESPRFFLENGKHDEAWMVLKQVHDTNMRAKGHPERVFSVTHIKTIHQEDELIEIQSDTGTWYQRWGVRALSLGGQVWGNFLSCFGPEYRRITLMMMGVWFTMSFSYYGLTVWFPDMIRHLQAVDYASRTKVFPGERVEHVTFNFTLENQIHRGGQYFNDKFIGLRLKSVSFEDSLFEECYFEDVTSSNTFFRNCTFINTVFYNTDLFEYKFVNSRLINSTFLHNKEGCPLDVTGTGEGAYMVYFVSFLGTLAVLPGNIVSALLMDKIGRLRMLAGSSVMSCVSCFFLSFGNSESAMIALLCLFGGVSIASWNALDVLTVELYPSDKRTTAFGFLNALCKLAAVLGISIFTSFVGITKAAPILFASAALALGSSLALKLPETRGQVLQ

SEQ ID NO: 39804 - protein, 74 aa, Homo sapiens [sequence omitted]

SEQ ID NO: 39805 - protein, 119 aa, Homo sapiens
MESIQGEARRGGTMETDDHMGGIPARNSKGERLLLYIGIIDILQSYRFVKKLEHSWKALVHDGDTVSVHRPGFYAERFQRFMCNTVFKKIPCKWFLPIDCLLLPSGSLTPREQRAGHLW

SEQ ID NO: 39806 - protein, 1234 aa, Homo sapiens
MKTPDFDDLLAAFDIPDIDANEAIHSGPEENEGPGGPGKPEPGVGSESEDTAAASAGDGPGVPAQASDHGLPPPDISVVSVIVKNTVCPEQSEALAGGSAGDGAQAAGVTKEGPVGPHRMQNGFGSPEPSLPGTPHSPAPPSGGTWKEKGMEGKTPLDLFAHFGPEPGDHSDPLPPSAPSPTREGALTPPPFPSSFELAQENGPGMQPPVSSPPLGALKQESCSPHHPQVLAQQGSGSSPKATDIPASASPPPVAGVPFFKQSPGHQSPLASPKVPVCQPLKEEDDDEGPVDKSSPGSPQSPSSGAEAADEDSNDSPASSSSRPLKVRIKTIKTSCGNITRTVTQVPSDPDPPAPLAEGAFLAEASLLKLSPATPTSEGPKVVSVQLGDGTRLKGTVLPVATIQNASTAMLMAASVARKAVVLPGGTATSPKMIAKNVLGLVPQALPKADGRAGLGTGGQKVNGASVVMVQPSKTATGPSTGGGTVISRTQSSLVEAFNKILNSKNLLPAYRPNLSPPAEAGLALPPTGYRCLECGDAFSLEKSLARHYDRRSMRIEVTCNHCARRLVFFNKCSLLLHAREHKDKGLVMQCSHLVMRPVALDQMVGQPDITPLLPVAVPPVSGPLALPALGKGEGAITSSAITTVAAEAPVLPLSTEPPAAPATSAYTCFRCLECKEQCRDKAGMAAHFQQLGPPAPGATSNVCPTCPMMLPNRCSFSAHQRMHKNRPPHVCPECGGNFLQANFQTHLREACLHVSRRVGYRCPSCSVVFGGVNSIKSHIQTSHCEVFHKCPICPMAFKSGPSAHAHLYSQHPSFQTQQAKLIYKCAMCDTVFTHKPLLSSHFDQHLLPQRVSVFKCPSCPLLFAQKRTMLEHLKNTHQSGRLEETAGKGAGGALLTPKTEPEELAVSQGGAAPATEESSSSSEEEEVPSSPEPPRPAKRPRRELGSKGLKGGGGGPGGWTCGLCHSWFPERDEYVAHMKKEHGKSVKKFPCRLCERSFCSAPSLRRHVRVNHEGIKRVYPCRYCTEGKRTFSSRLILEKHVQVRHGLQLGAQSPGRGTTLARGSSARAQGPGRKRRQSSDSCSEEPDSTTPPAKSPRGGPGSGGHGPLRYRSSSSTEQSLMMGLRVEDGAQQCLDCGLCFASPGSLSRHRFISHKKRRGVGKASALGLGDGEEEAPPSRSDPDGGDSPLPASGGPLTCKVCGKSCDSPLNLKTHFRTHGMAFIRARQGAVGDN

SEQ ID NO: 39807 - protein, 110 aa, Homo sapiens [sequence omitted]

SEQ ID NO: 39808 - protein, 649 aa, Homo sapiens [sequence omitted]

SEQ ID NO: 39809 - protein, 54 aa, Homo sapiens
MEQRLFWKFEGAVVCVALIFACLVIIRQRQLDRKALEKVACSARSRSRSLIAPN

SEQ ID NO: 39810 - protein, 38 aa, Homo sapiens
MPVSALVQVSAEISLFCPNSPLTLISDRRGSSFTLCTS

SEQ ID NO: 39811 - protein, 219 aa, Homo sapiens
MAYGSLVFVLLFIFVKRQIMRFAMKSRRGPHVPVGHNAPKDLKEEIDIRLSRVQDIKYEPQLLADDDARLLQLETQGNQKIPFHSEGRHPRSLMGKNFRSYLLDLRNTSTPFKGVRKALIDTLLDGYETARYGTGVFGQNEYLRYQEALSELATAVKARIGSSQRHHQSAAKDLTQSPEVSPTTIQVTYLPSSQKSKRAKHFLELKSFKDNYNTLESTL

SEQ ID NO: 39812 - protein, 237 aa, Homo sapiens
MAYGSLVFVLLFIFVKRQIMRFAMKSRRGPHVPVGHNAPKDLKEEIDIRLSRVQDIKYEPQLLADDDARLLQLETQGNQSCYNYLYRMKALDAIRTSEIPFHSEGRHPRSLMGKNFRSYLLDLRNTSTPFKGVRKALIDTLLDGYETARYGTGVFGQNEYLRYQEALSELATAVKARIGSSQRHHQSAAKDLTQSPEVSPTTIQVTYLPSSQKSKRAKHFLELKSFKDNYNTLESTL

SEQ ID NO: 39813 - protein, 1078 aa, Homo sapiens
MTSVGTNRARGNWEQPQNQNQTQHKQRPQATAEQIRLAQMISDHNDADFEEKVKQLIDITGKNQDECVIALHDCNGDVNRAINVLLEGNPDTHSWEMVGKKKGVSGQKDGGQTESNEEGKENRDRDRDYSRRRGGPPRRGRGASRGRECMHGALSKPAVVRGQENGLDGTKSGGPSGRGTERGRRGRGRGRGGSGRRGGRFSAQGMGTFNPADYAEPANTDDNYGNSSGNTWNNTGHFEPDDGTSAWRTATEEWGTEDWNEDLSETKIFTASNVSSVPLPAENVTITAGQRIDLAVLLGKTPSTMENDSSNLDPSQAPSLAQPLVFSNSKQTAISQPASGNTFSHHSMVSMLGKGFGDVGEAKGGSTTGSQFLEQFKTAQALAQLAAQHSQSGSTTTSSWDMGSTTQSPSLVQYDLKNPSDSAVHSPFTKRQAFTPSSTMMEVFLQEKSPAVATSTAAPPPPSSPLPSKSTSAPQMSPGSSDNQSSSPQPAQQKLKQQKKKASLTSKIPALAVEMPGSADISGLNLQFGALQFGSEPVLSDYESTPTTSASSSQAPSSLYTSTASESSSTISSNQSQESGYQSGPIQSTTYTSQNNAQGPLYEQRSTQTRRYPSSISSSPQKDLTQAKNGFSSVQATQLQTTQSVEGATGSAVKSDSPSTSSIPPLNETVSAASLLTTTNQHSSSLGGLSHSEEIPNTTTTQHSSTLSTQQNTLSSSTSSGRTSTSTLLHTSVESEANLHSSSSTFSTTSSTVSAPPPVVSVSSSLNSGSSLGLSLGSNSTVTASTRSSVATTSGKAPPNLPPGVPPLLPNPYIMAPGLLHAYPPQVYGYDDLQMLQTRFPLDYYSIPFPTPTTPLTGRDGSLASNPYSGDLTKFGRGDASSPAPATTLAQPQQNQTQTHHTTQQTFLNPALPPGYSYTSLPYYTGVPGLPSTFQYGPAVFPVAPTSSKQHGVNVSVNASATPFQQPSGYGSHGYNTGVSVTSSNTGVPDISGSVYSKTQQSFEKQGFHSGTPAASFNLPSALGSGGPINPATAAAYPPAPFMHILTPHQQPHSQILHHHLQQDGQDILNFVDDQLGE

SEQ ID NO: 39814 - protein, 982 aa, Homo sapiens [sequence omitted]

SEQ ID NO: 39815 - protein, 253 aa, Homo sapiens
MTRDEDDDEEEEEEGGSWGRGNPRFHSPQHPPEEFGFGFSFSPGGGIRFHDNFGFDDLVRDFNSIFSDMGAWTLPSHPPELPGPESETPGERLREGQTLRDSMLKYPDSHQPRIFGGVLESDARSESPQPAPDWGSQRPFHRFDDVWPMDPHPRTREDNDLDSQVSQEGLGPVLQPQPKSYFKSISVTKITKPDGIVEERRTVVDSEGRTETTVTRHEADSSPRGDPESPRPPALDDAFSILDLFLGRWFRSR

SEQ ID NO: 39816 - protein, 905 aa, Homo sapiens
MAEIKEKICDYLFNVSDSSALNLAKNIGLTKARDINAVLIDMERQGDVYRQGTTPPIWHLTDKKRERMQIKRNTNSVPETAPAAIPETKRNAEFLTCNIPTSNASNNMVTTEKVENGQEPVIKLENRQEARPEPARLKPPVHYNGPSKAGYVDFENGQWATDDIPDDLNSIRAAPGEFRAIMEMPSFYSHGLPRCSPYKKLTECQLKNPISGLLEYAQFASQTCEFNMIEQSGPPHEPRFKFQVVINGREFPPAEAGSKKVAKQDAAMKAMTILLEEAKAKDSGKSEESSHYSTEKESEKTAESQTPTPSATSFFSGKSPVTTLLECMHKLGNSCEFRLLSKEGPAHEPKFQYCVAVGAQTFPSVSAPSKKVAKQMAAEEAMKALHGEATNSMASDNQPEGMISESLDNLESMMPNKVRKIGELVRYLNTNPVGGLLEYARSHGFAAEFKLVDQSGPPHEPKFVYQAKVGGRWFPAVCAHSKKQGKQEAADAALRVLIGENEKAERMGFTELPLTGSTFHDQIAMLSHRCFNTLTNSFQPSLLGRKILAAIIMKKDSEDMGVVVSLGTGNRCVKGDSLSLKGETVNDCHAEIISRRGFIRFLYSELMKYNSQTAKDSIFEPAKGGEKLQIKKTVSFHLYISTAPCGDGALFDKSCSDRAMESTESRHYPVFENPKQGKLRTKVENGEGTIPVESSDIVPTWDGIRLGERLRTMSCSDKILRWNVLGLQGALLTHFLQPIYLKSVTLGYLFSQGHLTRAICCRVTRDGSAFEDGLRHPFIVNHPKVGRVSIYDSKRQSGKTKETSVNWCLADGYDLEILDGTRGTVDGPRNELSRVSKKNIFLLFKKLCSFRYRRDLLRLSYGEAKKAARDYETAKNYFKKGLKDMGYGNWISKPQEEKNFYLCPV

SEQ ID NO: 39817 - protein, 286 aa, Homo sapiens
MAAPMELFCWSGGWGLPSVDLDSLAVLTYARFTGAPLKVHKISNPWQSPSGTLPALRTSHGEVISVPHKIITHLRKEVHTFWIDTKNYVEVTRKWYAEAMPFPLNFFLPGRMQRQYMERLQLLTGEHRPEDEEELEKELYREARECLTLLSQRLGSQKFFFGDAPASLDAFVFSYLALLLQAKLPSGKLQVHLRGLHNLCAYCTHILSLYFPWDGAEVPPQRQTPAGPETEEEPYRRRNQILSVLAGLAAMVGYALLSGIVSIQRATPARAPGTRTLGMAEEDEEE

SEQ ID NO: 39818 - protein, 516 aa, Homo sapiens
MAGSLTGLLLLQAVSWASGARPCIPKSFGYSSVVCVCNATYCDSFDPPTFPALGTFSRYESTRSGRRMELSMGPIQANHTGTGLLLTLQPEQKFQKVKGFGGAMTDAAALNILALSPPAQNLLLKSYFSEEGIGYNIIRVPMASCDFSIRTYTYADTPDDFQLHNFSLPEEDTKLKIPLIHRALQLAQRPVSLLASPWTSPTWLKTNGAVNGKGSLKGQPGDIYHQTWARYFVKFLDAYAEHKLQFWAVTAENEPSAGLLSGYPFQCLGFTPEHQRDFIARDLGPTLANSTHHNVRLLMLDDQRLLLPHWAKVVLTDPEAAKYVHGIAVHWYLDFLAPAKATLGETHRLFPNTMLFASEACVGSKFWEQSVRLGSWDRGMQYSHSIITNLLYHVVGWTDWNLALNPEGGPNWVRNFVDSPIIVDITKDTFYKQPMFYHLGHFSKFIPEGSQRVGLVASQKNDLDAVALMHPDGSAVVVVLNRSSKDVPLTIKDPAVGFLETISPGYSIHTYLWRRQ

SEQ ID NO: 39819 - protein, 667 aa, Homo sapiens [sequence omitted]

SEQ ID NO: 39820 - protein, 105 aa, Homo sapiens
MFHLLVAVDGINALWGRTTLKREDKSPIAPEELALVHNLRKMMKNDWHGGAIVSALSQTGSLFKPRKAYLPQELLGKVKSKENLFLLRLLSCLKKNIFINLCILT

SEQ ID NO: 39821 - protein, 244 aa, Homo sapiens
MGCLLFLLLWALLQAWGSAEVPQRLFPLRCLQISSFANSSWTRTDGLAWLGELQTHSWSNDSDTVRSLKPWSQGTFSDQQWETLQHIFRVYRSSFTRDVKEFAKMLRLSYPLELQVSAGCEVHPGNASNNFFHVAFQGKDILSFQGTSWEPTQEAPLWVNLAIQVLNQDKWTRETVQWLLNGTCPQFVSGLLESGKSELKKQGQPAFLTPCIPLQGSKRAFPFQGSHPFEHSKKRKAQEGLDKG

SEQ ID NO: 39822 - protein, 528 aa, Homo sapiens
MVWCLGLAVLSLVISQGADGRGKPEVVSVVGRAGESVVLGCDLLPPAGRPPLHVIEWLRFGFLLPIFIQFGLYSPRIDPDYVGRVRLQKGASLQIEGLRVEDQGWYECRVFFLDQHIPEDDFANGSWVHLTVNSPPQFQETPPAVLEVQELEPVTLRCVARGSPLPHVTWKLRGKDLGQGQGQVQVQNGTLRIRRVERGSSGVYTCQASSTEGSATHATQLLVLGPPVIVVPPKNSTVNASQDVSLACHAEAYPANLTYSWFQDNINVFHISRLQPRVRILVDGSLRLLATQPDDAGCYTCVPSNGLLHPPSASAYLTVLYPAQVTAMPPETPLPIGMPGVIRCPVRANPPLLFVSWTKDGKALQLDKFPGWSQGTEGSLIIALGNEDALGEYSCTPYNSLGTAGPSPVTRVLLKAPPAFIERPKEEYFQEVGRELLIPCSAQGDPPPVVSWTKVGRGLQGQAQVDSNSSLILRPLTKEAHGHWECSASNAVARVATSTNVYVLGPSVLTECTMTGCPWQCLWGLLTS

SEQ ID NO: 39823 - protein, 742 aa, Homo sapiens
MEGLGMDEGDGEGNILPIMQSIMQNLLSKDVLYPSLKEITEKYPEWLQSHRESLPPEQFEKYQEQHSVMCKICEQFEAETPTDSETTQKARFEMVLDLMQQLQDLGHPPKELAGEMLTWLFFCGSQWVYGPWLTYVGWLQQTSFKMSSKGSSTDGRTDLANGSLSSSPEEMSGAEEGRETSSGIEVEASDLSLSLTGDDGGPNRTSTESRGTDTESSGEDKDSDSMEDTGHYSINDENRVHDRSEEEEEEEEEEEEEQPRRRVQRKRANRDQDSSDDERALEDWVSSETSALPRPRWQALPALRERELGSSARFVYEACGARVFVQRFRLQHGLEGHTGCVNTLHFNQRGTWLASGSDDLKVVVWDWVRRQPVLDFESGHKSNVFQAKFLPNSGDSTLAMCARDGQVRVAELSATQCCKNTKRVAQHKGASHKLALEPDSPCTFLSAGEDAVVFTIDLRQDRPASKLVVTKEKEKKVGLYTIYVNPANTHQFAVGGRDQFVRIYDQRKIDENENNGVLKKFCPHHLVNSESKANITCLVYSHDGTELLASYNDEDIYLFNSSHSDGAQYVKRYKGHRNNATVKGVNFYGPKSEFVVSGSDCGHIFLWEKSSCQIIQFMEGDKGGVVNCLEPHPHLPVLATSGLDHDVKIWAPTAEASTELTGLKDVIKKNKRERDEDSLHQTDLFDSHMLWFLMHHLRQRRHHRRWREPGVGATDADSDESPSSSDTSDEEEGPDRVQCMPS

SEQ ID NO: 39824 - protein, 280 aa, Homo sapiens
MAQHHLWILLLCLQTWPEAAGKDSEIFTVNGILGESVTFPVNIQEPRQVKIIAWTSKTSVAYVTPGDSETAPVVTVTHRNYYERIHALGPNYNLVISDLRMEDAGDYKADINTQADPYTTTKRYNLQIYRRLGKPKITQSLMASVNSTCNVTLTCSVEKEEKNVTYNWSPLGEEGNVLQIFQTPEDQELTYTCTAQNPVSNNSDSISARQLCADIAMGFRTHHTGLLSVLAMFFLLVLILSSVFLFRLFKRRQGRIFPEGKMWKLTFSPPGTEAIYPRFS

SEQ ID NO: 39825 - protein, 137 aa, Homo sapiens
MLQAPRGRARAALRRLAVATRTMAGAPTVSLPELRSLLASGRARLFDVRSREEAAAGTIPGALNIPVSELESALQMEPAAFQALYSAEKPKLEDEHLVFFCQMGKRGLQATQLARSLGYTGARNYAGAYREWLEKES

SEQ ID NO: 39826 - protein, 32 aa, Homo sapiens
MSTMFADTLLIVFISVCTALLAEGESGYFSDV

SEQ ID NO: 39827 - protein, 315 aa, Homo sapiens [sequence omitted]

SEQ ID NO: 39828 - protein, 105 aa, Homo sapiens
MLPEKLRPLYNHPAGPRTVFFWAPIMKWGLVCAGLADMARPAEKLSTAQSAVLMATGFIWSRYSLVIIPKNWSLFAVNFFVGAAGASQLFRIWRYNQELKAKAHK

SEQ ID NO: 39829 - protein, 121 aa, Homo sapiens
MQGEDARYLKRKVKGGNIDVHPSEKALIVHYEVEATILGEMGDPMLGERKECQKIIRLKSLNANTDITSLARKVVEECKLIHPSKLNEVEQLLYYLQNRRDSLSGKDWEGSAGLLKREHDL

SEQ ID NO: 39830 - protein, 369 aa, Homo sapiens
MAQGWAGFSEEELRRLKQTKDPFEPQRRLPAKKSRQQLQREKALVEQSQKLGLQDGSTSLLPEQLLSAPKQRVNVQKPPFSSPTLPSHFTLTSPVGDGQPQGIESQPKELGLENSHDGHNNVEILPPKPDCKLEKKKVELQEKSRWEVLQQEQRLMEEKNKRKKALLAKAIAERSKRTQAETMKLKRIQKELQALDDMVSADIGILRNRIDQASLDYSYARKRFDRAEAEYIAAKLDIQRKTEIKEQLTEHLCTIIQQNELRKAKKLEELMQQLDVEADEETLELEVEVERLLHEQEVESRRPVVRLERPFQPAEESVTLEFAKENRKCQEQAVSPKVDDQCGNSSSIPFLSPNCPNQEGNDISAALAT

SEQ ID NO: 39831 - protein, 2764 aa, Homo sapiens
MPPPANLPSLKAENKGNDPNVNIVPKDGTGWASKQEQHEEEKTPEVPPAQPKPGVAAPPEVAPAPKSWASNKQGGQGDGIQVNSQFQQEFPSLQAAGDQEKKEKETNDDNYGPGPSLRPPNVACWRDGGKAAGSPSSSDQDEKLPGQDESTAGTSEQNDILKVVEKRIACGPPQAKLNGQQAALASQYRAMMPPYMFQQYPRMTYPPLHGPMRFPPSLSETNKGLRGRGPPPSWASEPERPSILSASELKELDKFDNLDAEADEGWAGAQMEVDYTEQLNFSDDDEQGSNSPKENNSEDQGSKASENNENKKETDEVSNTKSSSQIPAQPSVAKVPYGKGPSFNQERGTSSHLPPPPKLLAQQHPPPDRQAVPGRPGPFPSKQQVADEDEIWKQRRRQQSEISAAVERARKRREEEERRMEEQRKAACAEKLKRLDEKLGILEKQPSPEEIREREREKEREREKELEKEQEQEREKEREKDRERQQEKEKELEKEQEKQREMEKERKQEKEKELERQKEKEKELQKMKEQEKECELEKEREKLEEKIEPREPNLEPMVEKQESENSCNKEEEPVFTRQDSNRSEKEATPVVHETEPESGSQPRPAVLSGYFKQFQKSLPPRFQRQQEQMKQQQWQQQQQQGVLPQTVPSQPSSSTVPPPPHRPLYQPMQPHPQHLASMGFDPRWLMMQSYMDPRMMSGRPAMDIPPIHPGMIPPKPLMRRDQMEGSPNSSESFEHIARSARDHAISLSEPRMLWGSDPYPHAEPQQATTPKATEEPEDVRSEAALDQEQITAAYSVEHNQLEAHPKADFIRESSEAQVQKFLSRSVEDVRPHHTDANNQSACFEAPDQKTLSAPQEERISAVESQPSRKRSVSHGSNHTQKPDEQRSEPSAGIPKVTSRCIDSKEPIERPEEKPKKEGFIRSSEGPKPEKVYKSKSETRWGPRPSSNRREEVNDRPVRRSGPIKKPVLRDMKEEREQRKEKEGEKAEKVTEKVVVKPEKTEKKDLPPPPPPPQPPAPIQPQSVPPPIQPEAEKFPSTETATLAQKPSQDTEKPLEPVSTVQVEPAVKTVNQQTMAAPVVKEEKQPEKVISKDLVIERPRPDSRPAVKKESTLPPRTYWKEARERDWFPDQGYRGRGRGEYYSRGRSYRGSYGGRGRGGRGHTRDYPQYRDNKPRAEHIPSGPLRQREESETRSESSDFEVVPKRRRQRGSETDTDSEIHESASDKDSLSKGKLPKREERPENKKPVKPHSSFKPDNHVRIDNRLLEKPYVRDDDKAKPGFLPKGEPTRRGRGGTFRRGGRDPGGRPSRPSTLRRPAYRDNQWNPRQSEVPKPEDGEPPRRHEQFIPIAADKRPPKFERKFDPARERPRRQRPTRPPRQDKPPRFRRLREREAASKSNEVVAVPTNGTVNNVAQEPVNTLGDISGNKTPDLSNQNSSDQANEEWETASESSDFNERRERDEKKNADLNAQTVVKVGENVLPPKREIAKRSFSSQRPVDRQNRRGNNGPPKSGRNFSGPRNERRSGPPSKSGKRGPFDDQPAGTTGVDLINGSSAHHQEGVPNGTGQKNSKDSTGKKREDPKPGPKKPKEKVDALSQFDLNNYASVVIIDDHPEVTVIEDPQSNLNDDGFTEVVSKKQQKRLQDEERRKKEEQVIQVWNKKNANEKGRSQTSKLPPRFAKKQATGIQQAQSSASVPPLASAPLPPSTSASVPASTSAPLPATLTPVPASTSAPVPASTLAPVLASTSAPVPASPLAPVSASASVSASVPASTSAAAITSSSAPASAPAPTPILASVSTPASVTILASASIPILASALASTSAPTPAPAASSPAAPVITAPTIPASAPTASVPLAPASASAPAPAPTPVSAPNPAPPAPAQTQAQTHKPVQNPLQTTSQSSKQPPPSIRLPSAQTPNGTDYVASGKSIQTPQSHGTLTAELWDNKVAPPAVLNDISKKLGPISPPQPPSVSAWNKPLTSFGSAPSSEGAKNGQESGLEIGTDTIQFGAPASNGNENEVVPVLSEKSADKIPEPKEQRQKQPRAGPIKAQKLPDLSPVENKEHKPGPIGKERSLKNRKVKDAQQVEPEGQEKPSPATVRSTDPVTTKETKAVSEMSTEIGTMISVSSAEYGTNAKESVTDYTTPSSSLPNTVATNNTKMEDTLVNNVPLPNTLPLPKRETIQQSSSLTSVPPTTFSLTFKMESARKAWENSPNVREKGSPVTSTAPPIATGVSSSASGPSTANYNSFSSASMPQIPVASVTPTASLSGAGTYTTSSLSTKSTTTSDPPNICKVKPQQLQTSSLPSASHFSQLSCMPSLIAQQQQNPQVYVSQSAAAQIPAFYMDTSHLFNTQHARLAPPSLAQQQGFQPGLSQPTSVQQIPIPIYAPLQGQHQAQLSLGAGPAVSQAQELFSSSLQPYRSQPAFMQSSLSQPSVVLSGTAIHNFPTVQHQELAKAQSGLAFQQTSNTQPIPILYEHQLGQASGLGGSQLIDTHLLQARANLTQASNLYSGQVQQPGQTNFYNTAQSPSALQQVTVPLPASQLSLPNFGSTGQPLIALPQTLQPPLQHTTPQAQAQSLSRPAQVSQPFRGLIPAGTQHSMIATTGKMSEMELKAFGSGIDIKPGTPPIAGRSTTPTSSPFRATSTSPNSQSSKMNSIVYQKQFQSAPATVRMTQPFPTQFAPQAKQRAEVLQSTQRFFSEQQQSKQIGGGKAQKVDSDSSKPPETLTDPPGVCQEKVEEKPPPAPSIATKPVRTGPIKPQAIKTEETKS

SEQ ID NO: 39832 - protein, 693 aa, Homo sapiens
MSTEIGTMISVSSAEYGTNAKESVTDYTTPSSSLPNTVATNNTKMEDTLVNNVPLPNTLPLPKRETIQQSSSLTSVPPTTFSLTFKMESARKAWENSPNVREKGSPVTSTAPPIATGVSSSASGPSTANYNSFSSASMPQIPVASVTPTASLSGAGTYTTSSLSTKSTTTSDPPNICKVKPQQLQTSSLPSASHFSQLSCMPSLIAQQQQNPQVYVSQSAAAQIPAFYMDTSHLFNTQHARLAPPSLAQQQGFQPGLSQPTSVQQIPIPIYAPLQGQHQAQLSLGAGPAVSQAQELFSSSLQPYRSQPAFMQSSLSQPSVVLSGTAIHNFPTVQHQELAKAQSGLAFQQTSNTQPIPILYEHQLGQASGLGGSQLIDTHLLQARANLTQASNLYSGQVQQPGQTNFYNTAQSPSALQQVNYGMVTVPLPASQLSLPNFGSTGQPLIALPQTLQPPLQHTTPQAQAQSLSRPAQVSQPFRGLIPAGTQHSMIATTGKMSEMELKAFGSGIDIKPGTPPIAGRSTTPTSSPFRATSTSPNSQSSKMNSIVYQKQFQSAPATVRMTQPFPTQFAPQILSQPNLVPPLVRAPHTNTFPAPVQRPPMALASQMPPPLTTGLMSHARLPHVARGPCGSLSGVRGNQAQAALKAEQDMKKRAVGRGLSHKTFGPRCWQSREQRFFSPRNGSSLNSNRANR

SEQ ID NO: 39833 - protein, 223 aa, Homo sapiens
MDEGLLAPHWLLGTGLASSLIGYVLFDLIDGGEGRKKSGQTRWADLKSALVFITFTYGFSPVLKTLTESVSTDTIYAMSVFMLLGHLIFFDYGANAAIVSSTLSLNMAIFASVCLASRLPRSLHAFIMVTFAIQIFALWPMLQKKLKACTPRSYVGVTLLFAFSAVGGLLSISAVGAVLFALLLMSISCLCPFYLIRLQLFKENIHGPWDEAEIKEDLSRFLS

SEQ ID NO: 39834 - protein, 1094 aa, Homo sapiens [sequence omitted]

SEQ ID NO: 39835 - protein, 554 aa, Homo sapiens [sequence omitted]

SEQ ID NO: 39836 - protein, 21 aa, Homo sapiens
MSLLGLGTRRKQDIFTRKTKY

SEQ ID NO: 39837 - protein, 253 aa, Homo sapiens [sequence omitted]

SEQ ID NO: 39838 - protein, 77 aa, Homo sapiens [sequence omitted]

SEQ ID NO: 39839 - protein, 889 aa, Homo sapiens
MSREEKQKLGNQVLEMFDHAYGNYMEHAYPADELMPLTCRGRVRGQEPSRGDVDDALGKFSLTLIDSLDTLVVLNKTKEFEDAVRKVLRDVNLDNDVVVSVFETNIRVLGGLLGGHSLAIMLKEKGEYMQWYNDELLQMAKQLGYKLLPAFNTTSGLPYPRINLKFGIRKPEARTGTETDTCTACAGTLILEFAALSRFTGATIFEEYARKALDFLWEKRQRSSNLVGVTINIHTGDWVRKDSGVGAGIDSYYEYLLKAYVLLGDDSFLERFNTHYDAIMRYISQPPLLLDVHIHKPMLNARTWMDALLAFFPGLQVLKGDIRPAIETHEMLYQVIKKHNFLPEAFTTDFRVHWAQHPLRPEFAESTYFLYKATGDPYYLEVGKTLIENLNKYARVPCGFAAMKDVRTGSHEDRMDSFFLAEMFKYLYLLFADKEDIIFDIEDYIFTTEAHLLPLWLSTTNQSISKKNTTSEYTELDDSNFDWTCPNTQILFPNDPLYAQSIREPLKNVVDKSCPRGIIRVEESFRSGAKPPLRARDFMATNPEHLEILKKMGVSLIHLKDGRVQLVQHAIQAASSIDAEDGLRFMQEMIELSSQQQKEQQLPPRAVQIVSHPFFGRVVLTAGPAQFGLDLSKHKETRGFVASSKPSNGCSELTNPEAVMGKIALIQRGQCMFAEKARNIQNAGAIGGIVIDDNEGSSSDTAPLFQMAGDGKDTDDIKIPMLFLFSKEGSIILDAIREYEEVEVLLSDKAKDRDPEMENEEQPSSENDSQNQSGEQISSSSQEVDLVDQESSEENSLNSHPESLSLADMDNAASISPSEQTSNPTENHETTNLNGECTDLDNQLQEQSETEEDSNPNVSWGKKVQPIDSILADWNEDIEAFEMMEKDEL

SEQ ID NO: 39840 - protein, 730 aa, Homo sapiens [sequence omitted]

SEQ ID NO: 39841 - protein, 207 aa, Homo sapiens
MFLAVQHDCRPMDKSAGSGHKSEEKREKMKRTLLKDWKTRLSYFLQNSSTPGKPKTGKKSKQQAFIKPSPEEAQLWSEAFDELLASKYGLAAFRAFLKSEFCEENIEFWLACEDFKKTKSPQKLSSKARKIYTDFIEKEAPKEINIDFQTKTLIAQNIQEATSGCFTTAQKRVYSLMENNSYPRFLESEFYQDLCKKPQITTEPHAT

SEQ ID NO: 39842 - protein, 667 aa, Homo sapiens [sequence omitted]

SEQ ID NO: 39843 - protein, 1469 aa, Homo sapiens
MRKTFIVPAIKPFDHYDFSRAKIACNLAWLVAKAFGTENVPEELQEPFYTDQYDQEHIKPPVVNLLLSAELYCRAGSLILKSDAAKPLLGHDAVIQALAQKGLYVTDQEKLVTERDLHKKPIQMSAHLAMIDTLMMAYTVEMVSIEKVIACAQQYSAFFQATDLPYDIEDAVMYWINKVNEHLKDIMEQEQKLKEHHTVEAPGGQKARYRKEQTLLKQLPCIPLVENLLKDGTDGCALAALIHFYCPDVVRLEDICLKETMSLADSLYNLQLIQEFCQEYLNQCCHFTLEDMLYAASSIKSNYLVFMAELFWWFEVVKPSFVQPRVVRPQGAEPVKDMPSIPVLNAAKRNVLDSSSDFPSSGEGATFTQSHHHLPSRYSRPQAHSSASGGIRRSSSMSYVDGFIGTWPKEKRSSVHGVSFDISFDKEDSVQRSTPNRGITRSISNEGLTLNNSHVSKHIRKNLSFKPINGEEEAESIEEELNIDSHSDLKSCVPLNTNELNSNENIHYKLPNGALQNRILLDEFGNQIETPSIEEALQIIHDTEKSPHTPQPDQIANGFFLHSQEMSILNSNIKLNQSSPDNVTDTKGALSPITDNTEVDTGIHVPSEDIPETMDEDSSLRDYTVSLDSDMDDASKFLQDYDIRTGNTREALSPCPSTVSTKSQPGSSASSSSGVKMTSFAEQKFRKLNHTDGKSSGSSSQKTTPEGSELNIPHVVAWAQIPEETGLPQGRDTTQLLASEMVHLRMKLEEKRRAIEAQKKKMEAAFTKQRQKMGRTAFLTVVKKKGDGISPLREEAAGAEDEKVYTDRAKEKESQKTDGQRSKSLADIKESMENPQAKWLKSPTTPIDPEKQWNLASPSEETLNEGEILEYTKSIEKLNSSLHFLQQEMQRLSLQQEMLMQMREQQSWVISPPQPSPQKQIRDFKPSKQAGLSSAIAPFSSDSPRPTHPSPQSSNRKSASFSVKSQRTPRPNELKITPLNRTLTPPRSVDSLPRLRRFSPSQVPIQTRSFVCFGDDGEPQLKESKPKEEVKKEELESKGTLEQRGHNPEEKEIKPFESTVSEVLSLPVTETVCLTPNEDQLNQPTEPPPKPVFPPTAPKNVNLIEVSLSDLKPPEKADVPVEKYDGESDKEQFDDDQKVCCGFFFKDDQKAENDMAMKRAALLEKRLRREKETQLRKQQLEAEMEHKKEETRRKTEEERQKKEDERARREFIRQEYMRRKQLKLMEDMDTVIKPRPQVVKQKKQRPKSIHRDHIESPKTPIKGPPVSSLSLASLNTGDNESVHSGKRTPRSESVEGFLSPSRCGSRNGEKDWENASTTSSVASGTEYTGPKLYKEPSAKSNKHIIQNALAHCCLAGKVNEGQKKKILEEMEKSDANNFLILFRDSGCQFRSLYTYCPETEEINKLTGIGPKSITKKMIEGLYKYNSDRKQFSHIPAKTLSASVDAITIHSHLWQTKRPVTPKKLLPTKA

SEQ ID NO: 39844 - protein, 176 aa, Homo sapiens
MSKKVTPASTQCVRFPFPSTVVCKKNLDSTTVAVHGEEIYCKSCYGKKYGPKGYGYGQGAGTLSTDKGESLGIKHEEAPGHRPTTNPNASKFAQKIGGSERCPRCSQAVYAAEKVIGAGKSWHKACFRCAKCGKGLESTTLADKDGEIYCKGCYAKNFGPKGFGFGQGAGALVHSE

SEQ ID NO: 39845 - protein, 508 aa, Homo sapiens [sequence omitted]

SEQ ID NO: 39846 - protein, 933 aa, Homo sapiens
MVAEGVNKEAKQPAKKKRKKGLRIKGKRRRKKLILAKKFSKDLGSGRPVADAPALLASNDPEQDEESLFESNIEKQIYLPSTRAKTSIVWHFFHVDPQYTWRAICNLCEKSVSRGKPGSHLGTSTLQRHLQARHSPHWTRANKFGVASGEEDFTLDVSLSPSSGSNGSFEYIPTDPLDDNRMGKKHDKSASDALRAERGRFLIKSNIVKHALIPGTRAKTSAVWNFFYTDPQHISRAVCNICKRSVSRGRPGSHLGTSTLQRHLQATHPIHWAVANKDSGAVANGLDEAETERSDLLSDTLHGEKSTGSQDLTAEDLSDSDSDEPMLEVENRSESPIPVAEQGTLMRAQERETTCCGNPVSSHISQAIIQMIVEDMHPYNYFSTPAFQRFMQIVAPDYRLPSETYFFTKAVPQLYDCVREKIFLTLENVQSQKIHLTVDIWTHDPSTDYFIVTVHWVSLETASFLNNGRIPDFRKWAVLCVTGLAKDCLITNILQELNDQIGLWLSPNFLIPSFIVSDNSSNVVHAIKDGGFTHVPCFLHCLNMVIQDFFCEHKSIENMLVAARKTCHHFSHSVKARQILQEFQNDHQLPWKNLKQDETGHWISTFYMLKWLLEHCYSVHHSLGRASGVVLTSLQWTLMTYVCDILKPFEEATQKVSVKTAGLNQVLPLIHHLLLSLQKLREDFQVRGITQALNLVDSLSLKLETDTLLSAMLKSKPCILATLLDPCFKNSLEDFFPQGADLETYKQFLAEEVCNYMESSPEICQIPTSEASCPSVTVGADSFTSSLKEGTSSSGSVDSSAVDNVALGSKSFMFPSAVAVVDEYFKEKYSEFSGGDDPLIYWQRKISIWPALTQVAIQYLSCPMCSWQSECIFTKNSHFHPKQIMSLDFDNIEQLMFLKMNLKNVNYDYSTLVLSWDPEQNEVVQSSEKEILP

SEQ ID NO: 39847 - protein, 29 aa, Homo sapiens
MLLCLLQLAAPLCSYSITIRFYLFWLNTP

SEQ ID NO: 39848 - protein, 907 aa, Homo sapiens [sequence omitted]

SEQ ID NO: 39849 - protein, 409 aa, Homo sapiens [sequence omitted]

SEQ ID NO: 39850 - protein, 779 aa, Homo sapiens [sequence omitted]

SEQ ID NO: 39851 - protein, 1408 aa, Homo sapiens
MQPHSEYSASLCPNHSPVYQTTCCLQPSPSFCLHHPWPDHFQHQPVQQHIANIRPSRPFKLPKSYAALIADWPVVVLGMCTMFIVVCALVGVLVPELPDFSDPLLGFEPRGTAIGQRLVTWNNMVKNTGYKATLANYPFKYADEQAKSHRDDRWSDDHYEREKREVDWNFHKDSFFCDVPSDRYSRVVFTSSGGETLWNLPAIKSMCNVDNSRIRSHPQFGDLCQRTTAASCCPSWTLGNYIAILNNRSSCQKIVERDVSHTLKLLRTCAKHYQNGTLGPDCWDMAARRKDQLKCTNVPRKCTKYNAVYQILHYLVDKDFMTPKTADYATPALKYSMLFSPTEKGESMMNIYLDNFENWNSSDGVTTITGIEFGIKHSLFQDYLLMDTVYPAIAIVIVLLVMCVYTKSMFITLMTMFAIISSLIVSYFLYRVVFHFEFFPFMNLTALIILVGIGADDAFVLCDVWNYTKFDKPHAETSETVSITLQHAALSMFVTSFTTAAAFYANYVSNITAIRCFGVYAGTAILVNYVLMVTWLPAVVVLHERYLLNIFTCFKKPQQQIYDNKSCWTVACQKCHKVLFAISEASRIFFEKVLPCIVIKFRYLWLFWFLALTVGGAYIVCINPKMKLPSLELSEFQVFRSSHPFERYDAEYKKLFMFERVHHGEELHMPITVIWGVSPEDNGNPLNPKSKGKLTLDSSFNIASPASQAWILHFCQKLRNQTFFYQTDEQDFTSCFIETFKQWMENQDCDEPALYPCCSHWSFPYKQEIFELCIKRAIMELERSTGYHLDSKTPGPRFDINDTIRAVVLEFQSTYLFTLAYEKMHQFYKEVDSWISSELSSAPEGLSNGWFVSNLEFYDLQDSLSDGTLIAMGLSVAVAFSVMLLTTWNIIISLYAIISIAGTIFVTVGSLVLLGWELNVLESVTISVAVGLSVDFAVHYGVAYRLAPDPDREGKVIFSLSRVGSAMAMAALTTFVAGAMMMPSTVLAYTQLGTFMMLIMCISWAFATFFFQCMCRCLGPQGTCGQIPLPKKLQCSAFSHALSTSPSDKGQSKTHTINAYHLDPRGPKSELEHEFYELEPLASHSCTAPEKTTYEETHICSEFFNSQAKNLGMPVHAAYNSELSKSTESDAGSALLQPPLEQHTVCHFFSLNQRCSCPDAYKHLNYGPHSCQQMGDCLCHQCSPTTSSFVQIQNGVAPLKATHQAVEGFVHPITHIHHCPCLQGRVKPAGMQNSLPRNFFLHPVQHIQAQEKIGKTNVHSLQRSIEEHLPKMAEPSSFVCRSTGSLLKTCCDPENKQRELCKNRDVSNLESSGGTENKAGGKVELSLSQTDASVNSEHFNQNEPKVLFNHLMGEAGCRSCPNNSQSCGRIVRVKCNSVDCQMPNMEANVPAVLTHSELSGESLLIKTL

SEQ ID NO: 39852 - protein, 883 aa, Homo sapiens
MKPRPAGFVDNKLKQRVIQYLTSNKCGKYVDIGVLASDLQRVYSIDYGRRKRNAFRIQVEKVFSIISSEKELKNLTELEDEHLAKRARQGEEDNEYTESYSDDDSSMEDYPDPQSANHMNSSLLSLYRKGNPDSVSNTPEMEQRETTSSTPRISSKTGSIPLKTPAKDSEGGWFIDKTPSVKKDSFFLDLSCEKSNPKKPITEIQDSKDSSLLESDMKRKGKLKNKGSKRKKEDLQEVDGEIEAVLQKKAKARGLEFQISNVKFEDVGGNDMTLKEVCKMLIHMRHPEVYHHLGVVPPRGVLLHGPPGCGKTLLAHAIAGAECSGMITAHCSFDFSGSNDPPASASQELDLPILKVAAPEIVSGVSGESEQKLRELFEQAVSNAPCIIFIDEIDAITPKREVASKDMERRIVAQLLTCMDDLNNVAATARVLVIGATNRPDSLDPALRRAGRFDREICLGIPDEASRERILQTLCRKLRLPQAFDFCHLAHLTPGFVGADLMALCREAAMCAVNRVLMKLQEQQKKNPEMEDLPSKGVQEERLGTEPTSETQDELQRLLGLLRDQDPLSEEQMQGLCIELNDFIVALSSVQPSAKREGFVTVPNVTWADIGALEDIREELTMAILAPVRNPDQFKALGLVTPAGVLLAGPPGCGKTLLAKAVANESGLNFISVKGPELLNMYVGESERAVRQVFQRAKNSAPCVIFFDEVDALCPRRSDRETGASVRVVNQLLTEMDGLEARQQVFIMAATNRPDIIDPAILRPGRLDKTLFVGLPPPADRLAILKTITKNGTKPPLDADVNLEAIAGDLRCDCYTGADLSALVREASICALRQEMARQKSGNEKGELKVSHKHFEEAFKKVRSSISKKDQIMYERLQESLSR

SEQ ID NO: 39853 - protein, 1754 aa, Homo sapiens
MSGEVRLRQLEQFILDGPAQTNGQCFSVETLLDILICLYDECNNSPLRREKNILEYLEWAKPFTSKVKQMRLHREDFEILKVIGRGAFGEVAVVKLKNADKVFAMKILNKWEMLKRAETACFREERDVLVNGDNKWITTLHYAFQDDNNLYLVMDYYVGGDLLTLLSKFEDRLPEDMARFYLAEMVIAIDSVHQLHYVHRDIKPDNILMDMNGHIRLADFGSCLKLMEDGTVQSSVAVGTPDYISPEILQAMEDGKGRYGPECDWWSLGVCMYEMLYGETPFYAESLVETYGKIMNHKERFQFPAQVTDVSENAKDLIRRLICSREHRLGQNGIEDFKKHPFFSGIDWDNIRNCEAPYIPEVSSPTDTSNFDVDDDCLKNSETMPPPTHTAFSGHHLPFVGFTYTSSCVLSDRSCLRVTAGPTSLDLDVNVQRTLDNNLATEAYERRIKRLEQEKLELSRKLQESTQTVQALQYSTVDGPLTASKDLEIKNLKEEIEKLRKQVTESSHLEQQLEEANAVRQELDDAFRQIKAYEKQIKTLQQEREDLNKELVQASERLKNQSKELKDAHCQRKLAMQEFMEINERLTELHTQKQKLARHVRDKEEEVDLVMQKVESLRQELRRTERAKKELEVHTEALAAEASKDRKLREQSEHYSKQLENELEGLKQKQISYSPGVCSIEHQQEITKLKTDLEKKSIFYEEELSKREGIHANEIKNLKKELHDSEGQQLALNKEIMILKDKLEKTRRESQSEREEFESEFKQQYEREKVLLTEENKKLTSELDKLTTLYENLSIHNQQLEEEVKDLADKKESVAHWEAQITEIIQWVSDEKDARGYLQALASKMTEELEALRNSSLGTRATDMPWKMRRFAKLDMSARLELQSALDAEIRAKQAIQEELNKVKASNIITECKLKDSEKKNLELLSEIEQLIKDTEELRSEKGIEHQDSQHSFLAFLNTPTDALDQFETDPVENTYVWNPSVKFHIQSRSTSPSTSSEAEPVKTVDSTPLSVHTPTLRKKGCPGSTGFPPKRKTHQFFVKSFTTPTKCHQCTSLMVGLIRQGCSCEVCGFSCHITCVNKAPTTCPVPPEQTKGPLGIDPQKGIGTAYEGHVRIPKPAGVKKGWQRALAIVCDFKLFLYDIAEGKASQPSVVISQVIDMRDEEFSVSSVLASDVIHASRKDIPCIFRVTASQLSASNNKCSILMLADTENEKNKWVGVLSELHKILKKNKFRDRSVYVPKEAYDSTLPLIKTTQAAAIIDHERIALGNEEGLFVVHVTKDEIIRVGDNKKIHQIELIPNDQLVAVISGRNRHVRLFPMSALDGRETDFYKLSETKGCQTVTSGKVRHGALTCLCVAMKRQVLCYELFQSKTRHRKFKEIQVPYNVQWMAIFSEQLCVGFQSGFLRYPLNGEGNPYSMLHSNDHTLSFIAHQPMDAICAVEISSKEYLLCFNSIGIYTDCQGRRSRQQELMWPANPSSCCYNAPYLSVYSENAVDIFDVNSMEWIQTLPLKKVRPLNNEGSLNLLGLETIRLIYFKNKMAEGDELVVPETSDNSRKQMVRNINNKRRYSFRVPEEERMQQRREMLRDPEMRNKLISNPTNFNHIAHMGPGDGIQILKDLPMNPRPQESRTVFSGSVSIPSITKSRPEPGRSMSASSGLSARSSAQNGSALKREFSGGSYSAKRQPMPSPSEGSLSSGGMDQGSDAPARDFDGEDSDSPRHSTASNSSNLSSPPSPASPRKTKSLSLESTDRGSWDP

SEQ ID NO: 39854 - protein, 59 aa, Homo sapiens [sequence omitted]

SEQ ID NO: 39855 - protein, 126 aa, Homo sapiens
MAAGPEPPEWEPRWRKALRGKENKGSVEIMRKDLNDARDLHGQAESAAAVWKGHVMDRRKKALTDYKKLRAFFVEEEEHFLQEAEKEEGLPEDELADPTERFRSLLQAVSELEKKHRNLGLSMLLQ

SEQ ID NO: 39856 - protein, 565 aa, Homo sapiens [sequence omitted]

SEQ ID NO: 39857 - protein, 87 aa, Homo sapiens
MSRSSYNLVPRYIPQKQSEDMHAFVTEVAYKMELLQIENMVLSPWTLIVAVLLQNRPSMDFDALVEKTLWLKGLTQAFGGFLIWPGM

SEQ ID NO: 39858 - protein, 400 aa, Homo sapiens [sequence omitted]

SEQ ID NO: 39859 - protein, 425 aa, Homo sapiens
MSKRKRKRSVQEGENPDDGVRGSPPEDYRLGQVASSLFRGEHHSRGGTGRLASLFSSLEPQIQPVYVPVPKQTIKKTKRNEEEESTSQIERPLSQEPAKKVKAKKKHTNAEKKLADRESALASADLEEEIHQKQGQKRKNSQPGVKVADRKILDDTEDTVVSQRKKIQINQEEERLKNERTVFVGNLPVTCNKKKLKSFFKEYGQIESVRFRSLIPAEGTLSKKLAAIKRKIHPDQKNINAYVVFKEESAATQALKRNGAQIADGFRIRVDLASETSSRDKRSVFVGNLPYKVEESAIEKHFLDCGSIMAVRIVRDKMTGIGKGFGYVLFENTDSVHLALKLNNSELMGRKLRVMRSVNKEKFKQQNSNPRLKNVSKPKQGLNFTSKTAEGHPKSLFIGEKAVLLKTKKKGQKKSGRPKKQRKQK

SEQ ID NO: 39860 - protein, 426 aa, Homo sapiens
MRHLLQHPTLSQRVLVKFIIGAHGCEVPVEDREDPYSCKLLNITNPVLNQEIEAFSLSEDTSSGLPEDRVVSVSFRVLYPIVITSLGVFYDANDVGFQRNITVKLYQAEQEEALFIARFSPPSCGVQVNKLWYKPVEQFILPESFEGTIVWESQDLHGLVSRNLHKVTVNDGGGVLRVITAGEGALPHEFLEGVEGVAGGFIYTIQEGDALLHNLHSRPQRLIDHIRNLHEEDALLKEESSIYDDIVFVDVVDTYRNVPAKLLNFYRWTVETTSFNLLLKTDDDCYIDLEAVFNRIVQKNLDGPNFWWGNFRLNWAVDRTGKWQELEYPSPAYPAFACGSGYVISKDIVKWLASNSGRLKTYQGEDVSMGIWMAAIGPKRYQDSLWLCEKTCETGMLSSPQYSPWELTELWKLKERCGDPCRCQAR

SEQ ID NO: 39861 - protein, 3763 aa, Homo sapiens [sequence omitted]

SEQ ID NO: 39862 - protein, 218 aa, Homo sapiens
METPPWDPARNDSLPPTLTPAVPPYVKLGLTVVYTVFYALLFVFIYVQLWLVLRYRHKRLSYQSVFLFLCLFWASLRTVLFSFYFKDFVAANSLSPFVFWLLYCFPVCLQFFTLTLMNLYFTQGSSVCQVTAIGVTVILLYTSRACYNLFILSFSQNKSVHSFDYDWYNVSDQVSGGAEEVSPDQGLLVSSRHWFQDPRKYQNLDAQVPDIKWCSICI

SEQ ID NO: 39863 - protein, 331 aa, Homo sapiens
MGKGVSKPVEPINKTIAPVLVSKKLNVTEQEKIDKLMIEMDGTENKSKFGANAILGVSLAACKASAVEKGVPLYHHIADLSGNSKVILPVPVFNVINGSSHAVTKLAMQEFMVLPVGAANFREAMPIGAEVYHSLKNVIKEKYGKDATGVGDGGAFAPNILENKEGLELLKTAIGKAGYTDKVIVSMDVEASEFFRSGKYDLEFKFLDDPTRYISPDCLADLYKSFIKNYPVVSTEDPFDQDDWGAWQKFTASAGIQVVEDDLRVTNPKRTASAVNEKKCNCLLLKVNQIRSVTESLQACKLAQANGWCVMVPHHSGETENTFITDLVVGL

SEQ ID NO: 39864 - protein, 316 aa, Homo sapiens [sequence omitted]

SEQ ID NO: 39865 - protein, 358 aa, Homo sapiens [sequence omitted]

SEQ ID NO: 39866 - protein, 1235 aa, Homo sapiens
MVLDGGMGTMIQREKLNEEHFRGQEFKDHARPLKGNNDILSITQPDVIYQIHKEYLLAGADIIETNTFSSTSIAQADYGLEHLAYRMNMCSAGVARKAAEEVTLQTGIKRFVAGALGPTNKTLSVSPSVERPDYRNITFDELVEAYQEQAKGLLDGGVDILLIETIFDTANAKAALFALQNLFEEKYAPRPIFISGTIVDKSGRTLSGQTGEGFVISVSHGEPLCIGLNCALGAAEMRPFIEIIGKCTTAYVLCYPNAGLPNTFGDYDETPSMMAKHLKDFAMDGLVNIVGGCCGSTPDHIREIAEAVKNCKPRVPPATAFEGHMLLSGLEPFRIGPYTNFVNIGERCNVAGSRKFAKLIMAGNYEEALCVAKVQVEMGAQVLDVNMDDGMLDGPSAMTRFCNLIASEPDIAKVPLCIDSSNFAVIEAGLKCCQGKCIVNSISLKEGEDDFLEKARKIKKYGAAMVVMAFDEEGQATETDTKIRVCTRAYHLLVKKLGFNPNDIIFDPNILTIGTGMEEHNLYAINFIHATKVIKETLPGARISGGLSNLSFSFRGMEAIREAMHGVFLYHAIKSGMDMGIVNAGNLPVYDDIHKELLQLCEDLIWNKDPEATEKLLRYAQTQGTGGKKVIQTDEWRNGPVEERLEYALVKGIEKHIIEDTEEARLNQKKYPRPLNIIEGPLMNGMKIVGDLFGAGKMFLPQVIKSARVMKKAVGHLIPFMEKEREETRVLNGTVEEEDPYQGTIVLATVKGDVHDIGKNIVGVVLGCNNFRVIDLGVMTPCDKILKAALDHKADIIGLSGLITPSLDEMIFVAKEMERLAIRIPLLIGGATTSKTHTAVKIAPRYSAPVIHVLDASKSVVVCSQLLDENLKDEYFEEIMEEYEDIRQDHYESLKERRYLPLSQARKSGFQMDWLSEPHPVKPTFIGTQVFEDYDLQKLVDYIDWKPFFDVWQLRGKYPNRGFPKIFNDKTVGGEARKVYDDAHNMLNTLISQKKLRARGVVGFWPAQSIQDDIHLYAEAAVPQAAEPIATFYGLRQQAEKDSASTEPYYCLSDFIAPLHSGIRDYLGLFAVACFGVEELSKAYEDDGDDYSSIMVKALGDRLAEAFAEELHERVRRELWAYCGSEQLDVADLRRLRYKGIRPAPGYPSQPDHTEKLTMWRLADIEQSTGIRLTESLAMAPASAVSGLYFSNLKSKYFAVGKISKDQVEDYALRKNISVAEVEKWLGPILGYDTD

SEQ ID NO: 39867 - protein, 1330 aa, Homo sapiens
MAPENKVADWLAQNNPPQMLWERTEEDSKSIKSDVPVYLKRLKGNKHDDGTQSDSENAGAHRRCSKRATLEEHLRRHHSEHKKLQKVQATEKHQDQAVVSQTAFMIAFFDEDNPRKRRSYSFTQSAGILCQETTYSTPHTKLEKAKSPTADAKVVSLSLQTSSAHHRGGHGVPHGKLLKQKSEEPSVSIPFLQTALLRSSGSLGHRPSQEMDKMLKNQATSATSEKDNDDDQSDKGTYTIELENPNSEEVEARKMIDKVFGVDDNQDYNRPVINEKHKDLIKDWALSSAAAVMEERKPLTTSGFHHSEEGTSSSGSKRWVSQWASLAANHTRHDQEERIMEFSAPLPLENETEISESGMTVRSTGSATSLASQGERRRRTLPQLPNEEKSLESHRAKVVTQRSEIGEKQDTELQEKETPTQVYQKDKQDADRPLSKMNRAVNGETLKTGGDNKTLLHLGSSAPGKEKSETDKETSLVKQTLAKLQQQEQREEAQWTPTKLSSKNVSGQTDKCREETFKQESQPPEKNSGHSTSKGDRVAQSESKRRKAEEILKSQTPKGGDKKESSKSLVRQGSFTIEKPSPNIPIELIPHINKQTSSTPSSLALTSASRIRERSESLDPDSSMDTTLILKDTEAVMAFLEAKLREDNKTDEGPDTPSYNRDNSISPESDVDTASTISLVTGETERKSTQKRKSFTSLYKDRCSTGSPSKDVTKSSSSGAREKMEKKTKSRSTDVGSRADGRKFVQSSGRIRQPSVDLTDDDQTSSVPHSAISDIMSSDQETYSCKPHGRTPLTSADEHVHSKLEGSKVTKSKTSPVVSGSSSKSTTLPRPRPTRTSLLRRARLGEASDSELADADKASVASEVSTTSSTSKPPTGRRNISRIDLLAQPRRTRLGSLSARSDSEATISRSSASSRTAEAIIRSGARLVPSDKFSPRIRANSISRLSDSKVKSMTSAHGSASVNSRWRRFPTDYASTSEDEFGSNRNSPKHTRLRTSPALKTTRLQSAGSAMPTSSSFKHRIKEQEDYIRDWTAHREEIARISQDLALIAREINDVAGEIDSVTSSGTAPSTTVSTAATTPGSAIDTREEVGDLHGEMHKLVDRVFDESLNFRKIPPLVHSKTPEGNNGRSGDPRPQAAEPPDHLTITRRRTWSRDEVMGDNLLLSSVFQFSKKIRQSIDKTAGKIRILFKDKDRNWDDIESKLRAESEVPIVKTSSMEISSILQELKRVEKQLQAINAMIDPDGTLEALNNMGFPSAMLPSPPKQKSSPVNNHHSPGQTPTLGQPEARALHPAAVSAAAEFENAESEADFSIHFNRFNPDGEEEDVTVQE

SEQ ID NO: 39868 - protein, 615 aa, Homo sapiens
MSPLRSLEHEETNMPTMHDLVHTINDQSQYIHHLEAEVKFCKEELSGMKNKIQVVVLENEGLQQQLKSQRQEETLREQTLLDASGNMHNSWITTGEDSGVGETSKRPFSHDNADFGKAASAGEQLELEKLKLTYEEKCEIEESQLKFLRNDLAEYQRTCEDLKEQLKHKEFLLAANTCNRVGGLCLKCAQHEAVLSQTHTNVHMQTIERLVKERDDLMSALVSVRSSLADTQQREASAYEQVKQVLQISEEANFEKTKALIQCDQLRKELERQAERLEKELASQQEKRAIEKDMMKKEITKEREYMGSKMLILSQNIAQLEAQVEKVTKEKISAINQLEEIQSQLASREMDVTKVCGEMRYQLNKTNMEKDEAEKEHREFRAKTNRDLEIKDQEIEKLRIELDESKQHLEQEQQKAALAREECLRLTELLGESEHQLHLTRQEKDSIQQSFSKEAKAQALQAQQREQELTQKIQQMEAQHDKTENEQYLLLTSQNTFLTKLKEECCTLAKKLEQISQKTRSEIAQLSQEKRYTYDKLGKLQRRNEELEEQCVQHGRVHETMKQRLRQLDKHSQATAQQLVQLLSKQNQLLLERQSLSEEVDRLRTQLPSMPQSDC

SEQ ID NO: 39869 - protein, 275 aa, Homo sapiens
MDVQTDSPSLSVTAGKDHMEELLCSAEATLALHTQSSETAGSPSGPDSSEDACEDDSRLQLAQTEACQDVARIEGIAEDPKVFLSSKSKTEPLISPGCDRIPPALISEGKYSQAQRKELRLPLRDASEALPTDQLENNELNELQQPDLTDSDGKSPQAQADSDGSENVLCGNNQISDLGILLPEVCMAPEEKGDKDDQLNKETEDYLNSLLEGCLKDTEDSLSYEDNQDDDSDLLQDLSPEEASYSLQENLPSDESCLSLDDLAKRIEIAEVNQR

SEQ ID NO: 39870 - protein, 388 aa, Homo sapiens
MLENYRNLVSLIGIAVSKPDLITCLEQRNEPWNVKKHETVARHPVSSHFTQDLLPEHGIKDSFQKVILRRYGSYGIENLQLKKDWESVGESKVQKECCNGLNQSLSTTHTKIFQFNKCVKVFSKSSNLNRHKIRHTGEISSNCKECDNSFYISSVLTPLQRIHTAEKSYKCKQCGKAFRHCSCFLEHETIHNEEKHYKCKECGKVFKSFTSLSNHIIIHTGKKLYKCEECGKAFNHSSNHAKHKKIHTGQKPHKCEECGKAFNWFSYLTLHKRIHTGEKPYKCDECGKAFNQCSNLTKHKRIHTGEKPYKCEECGKAFNRCSHLTEHKRIHTGEKPYKCEECGKVFISCSSLSNHKRIHTREKCYKSEECGKTFNHCSDLNVPEKIHT

SEQ ID NO: 39871 - protein, 251 aa, Homo sapiens
MHNAAREMVFVAEQGVMADKNRLDPTWQEMLNHATCKVNEAEEERLRGEREHQRVTRLCQQAEARVQALQKTLRRAIGKSRPYFELKAQFSQILEEHKAKVTELEQQVAQAKTRYSVALRNLEQISEQIHARRRGGLPPHPLGPRRSSPVGAEAGPEDMEDGDSGIEGAEGAGLEEGSSLGPGPAPDTDTLSLLSLRTVASDLQKCDSVEHLRGLSDHVSLDGQELGTRSGGRRGSDGGARGGRHQRSVSL

SEQ ID NO: 39872 - protein, 951 aa, Homo sapiens [sequence omitted]

SEQ ID NO: 39873 - protein, 481 aa, Homo sapiens
MVGLPARGKTYISKKLTRYLNWIGVPTKVFNVGEYRREAVKQYSSYNFFRPDNEEAMKVRKQCALAALRDVKSYLAKEGGQIAVFDATNTTRERRHMILHFAKENDFKAFFIESVCDDPTVVASNIMEVKISSPDYKDCNSAEAMDDFMKRISCYEASYQPLDPDKCDRDLSLIKVIDVGRRFLVNRVQDHIQSRIVYYLMNIHVQPRTIYLCRHGENEHNLQGRIGGDSGLSSRGKKFASALSKFVEEQNLKDLRVWTSQLKSTIQTAEALRLPYEQWKALNEIDAGVCEELTYEEIRDTYPEEYALREQDKYYYRYPTGESYQDLVQRLEPVIMELERQENVLVICHQAVLRCLLAYFLDKSAEEMPYLKCPLHTVLKLTPVAYGCRVESIYLNVESVCTHRERSEDAKKGPNPLMRRNSVTPLASPEPTKKPRINSFEEHVASTSAALPSCLPPEVPTQLPGQNMKGSRSSADSSRKH

SEQ ID NO: 39874 - protein, 528 aa, Homo sapiens [sequence omitted]

SEQ ID NO: 39875 - protein, 437 aa, Homo sapiens
MELVWGTKSSPGLSDTIFCRWTQGFVFSESEGSALEQFEGGPCAVIAPVQAFLLKKLLFSSEKSSWRDCSEEEQKELLCHTLCDILESACCDHSGSYCLVSWLRGKTTEETASISGSPAESSCQVEHSSALAVEELGFERFHALIQKRSFRSLPELKDAVLDQYSMWGNKFGVLLFLYSVLLTKGIENIKNEIEDASEPLIDPVYGHGSQSLINLLLTGHAVSNVWDGDRECSGMKLLGIHEQAAVGFLTLMEALRYCKVGSYLKSPKFPIWIVGSETHLTVFFAKDMALVAPEAPSEQARRVFQTYDPEDNGFIPDSLLEDVMKALDLVSDPEYINLMKNKLDPEGLGIILLGPFLQEFFPDQGSSGPESFTVYHYNGLKQSNYNEKVMYVEGTAVVMGFEDPMLQTDDTPIKRCLQTKWPYIELLWTTDRSPSLN

SEQ ID NO: 39876 - protein, 317 aa, Homo sapiens [sequence omitted]

SEQ ID NO: 39877 - protein, 949 aa, Homo sapiens
MEPIVLQSVPHDRYNKTCYICDEQGRESKAATGACMTCNKHGCRQAFHVTCAQFAGLLCEEEGNGADNVQYCGYCKYHFSKLKKSKRGSNRSYDQSLSDSSSHSQDKHHEKEKKKYKEKDKHKQKHKKQPEPSPALVPSLTVTTEKTYTSTSNNSISGSLKRLEDTTARFTNANFQEVSAHTSSGKDVSETRGSEGKGKKSSAHSSGQRGRKPGGGRNPGTTVSAASPFPQGSFSGTPGSVKSSSGSSVQSPQDFLSFTDSDLRNDSYSHSQQSSATKDVHKGESGSQEGGVNSFSTLIGLPSTSAVTSQPKSFENSPGDLGNSSLPTAGYKRAQTSGIEEETVKEKKRKGNKQSKHGPGRPKGNKNQENVSHLSVSSASPTSSVASAAGSITSSSLQKSPTLLRNGSLQSLSVGSSPVGSEISMQYRHDGACPTTTFSELLNAIHNGIYNSNDVAVSFPNVVSGSGSSTPVSSSHLPQQSSGHLQQVGALSPSAVSSAAPAVATTQANTLSGSSLSQAPSHMYGNRSNSSMAALIAQSENNQTDQDLGDNSRNLVGRGSSPRGSLSPRSPVSSLQIRYDQPGNSSLENLPPVAASIEQLLERQWSEGQQFLLEQGTPSDILGMLKSLHQLQVENRRLEEQIKNLTAKKERLQLLNAQLSVPFPTITANPSPSHQIHTFSAQTAPTTDSLNSSKSPHIGNSFLPDNSLPVLNQDLTSSGQSTSSSSALSTPPPAGQSPAQQGSGVSGVQQVNGVTVGALASGMQPVTSTIPAVSAVGGIIGALPGNQLAINGIVGALNGVMQTPVTMSQNPTPLTHTTVPPNATHPMPATLTNSASGLGLLSDQQRQILIHQQQFQQLLNSQQLTPEQHQAFLYQLMQHHHQQHHQPELQQLQIPGPTQIPINNLLAGTQAPPLHTATTNPFLTIHGDNASQKVARLSDKTGPVAQEKS

SEQ ID NO: 39878 - protein, 61 aa, Homo sapiens
MHRTTRIKITELNPHLMCVLCGGYFIDATTIIECLHSCKYRALALFCIMRISQFDLEFENC

SEQ ID NO: 39879 - protein, 1957 aa, Homo sapiens
MATRRTGLSEGDGDKLKACEVSKNKDGKEQSETVSLSEDETFSWPGPKTVTLKRTSQGFGFTLRHFIVYPPESAIQFSYKDEENGNRGGKQRNRLEPMDTIFVKQVKEGGPAFEAGLCTGDRIIKVNGESVIGKTYSQVIALIQNSDTTLELSVMPKDEDILQVLQFTKDVTALAYSQDAYLKGNEAYSGNARNIPEPPPICYPWLPSAPSAMAQPVEISPPDSSLSKQQTSTPVLTQPGRAYRMEIQVPPSPTDVAKSNTAVCVCNESVRTVIVPSEKVVDLLSNRNNHTGPSHRTEEVRYGVSEQTSLKTVSRTTSPPLSIPTTHLIHQPAGSRSLEPSGILLKSGNYSGHSDGISSSRSQAVEAPSVSVNHYSPNSHQHIDWKNYKTYKEYIDNRRLHIGCRTIQERLDSLRAASQSTTDYNQVVPNRTTLQGRRRSTSHDRVPQSVQIRQRSVSQERLEDSVLMKYCPRSASQGALTSPSVSFSNHRTRSWDYIEGQDETLENVNSGTPIPDSNGEKKQTYKWSGFTEQDDRRGICERPRQQEIHKSFRGSNFTVAPSVVNSDNRRMSGRGVGSVSQFKKIPPDLKTLQSNRNFQTTCGMSLPRGISQDRSPLVKVRSNSLKAPSTHVTKPSFSQKSFVSIKDQRPVNHLHQNSLLNQQTWVRTDSAPDQQVETGKSPSLSGASAKPAPQSSENAGTSDLELPVSQRNQDLSLQEAETEQSDTLDNKEAVILREKPPSGRQTPQPLRHQSYILAVNDQETGSDTTCWLPNDARREVHIKRMEERKASSTSPPGDSLASIPFIDEPTSPSIDHDIAHIPASAVISASTSQVPSIATVPPCLTTSAPLIRRQLSHDHESVGPPSLDAQPNSKTERSKSYDEGLDDYREDAKLSFKHVSSLKGIKIADSQKSSEDSGSRKDSSSEVFSDAAKEGWLHFRPLVTDKGKRVGGSIRPWKQMYVVLRGHSLYLYKDKREQTTPSEEEQPISVNACLIDISYSETKRKNVFRLTTSDCECLFQAEDRDDMLAWIKTIQESSNLNEEDTGVTNRDLISRRIKEYNNLMSKAEQLPKTPRQSLSIRQTLLGAKSEPKTQSPHSPKEESERKLLSKDDTSPPKDKGTWRKGIPSIMRKTFEKKPTATGTFGVRLDDCPPAHTNRYIPLIVDICCKLVEERGLEYTGIYRVPGNNAAISSMQEELNKGMADIDIQDDKWRDLNVISSLLKSFFRKLPEPLFTNDKYADFIEANRKEDPLDRLKTLKRLIHDLPEHHYETLKFLSAHLKTVAENSEKNKMEPRNLAIVFGPTLVRTSEDNMTHMVTHMPDQYKIVETLIQHHDWFFTEEGAEEPLTTVQEESTVDSQPVPNIDHLLTNIGRTGVSPGDVSDSATSDSTKSKGSWGSGKDQYSRELLVSSIFAAASRKRKKPKEKAQPSSSEDELDNVFFKKENVEQCHNDTKEESKKESETLGRKQKIIIAKENSTRKDPSTTKDEKISLGKESTPSEEPSPPHNSKHNKSPTLSCRFAILKESPRSLLAQKSSHLEETGSDSGTLLSTSSQASLARFSMKKSTSPETKHSEFLANVSTITSDYSTTSSATYLTSLDSSRLSPEVQSVAESKGDEADDERSELISEGRPVETDSESEFPVFPTALTSERLFRGKLQEVTKSSRRNSEGSELSCTEGSLTSSLDSRRQLFSSHKLIECDTLSRKKSARFKSDSGSLGDAKNEKEAPSLTKVFDVMKKGKSTGSLLTPTRGESEKQEPTWKTKIADRLKLRPRAPADDMFGVGNHKVNAETAKRKSIRRRHTLGGHRDATEISVLNFWKVHEQSGERESELSAVNRLKPKCSAQDLSISDWLARERLRTSTSDLSRGEIGDPQTENPSTREIATTDTPLSLHCNTGSSSSTLASTNRPLLSIPPQSPDQINGESFQNVSKNASSAANAQPHKLSETPGSKAEFHPCL

SEQ ID NO: 39880 - protein, 38 aa, Homo sapiens
MDEDVLHPEEPHHRLLLRFTDDTFDPELAATIDNAGIT

SEQ ID NO: 39881 - protein, 839 aa, Homo sapiens
MADRSGKIIPGQVYIEVEYDYEYEAKDRKIVIKQGERYILVKKTNDDWWQVKPDENSKAFYVPAQYVKEVTRKALMPPVKQVAGLPNNSTKIMQSLHLQRSTENVNKLPELSSFGKPSSSVQGTGLIRDANQNFGPSYNQGQTVNLSLDLTHNNGKFNNDSHSPKVSSQNRTRSFGHFPGPEFLDVEKTSFSQEQSCDSAGEGSERIHQDSESGDELSSSSTEQIRATTPPNQGRPDSPVYANLQELKISQSALPPLPGSPAIQINGEWETHKDSSGRCYYYNRGTQERTWKPPRWTRDASISKGDFQNPGDQELLSSEENYYSTSYSQSDSQCGSPPRGWSEELDERGHTLYTSDYTNEKWLKHVDDQGRQYYYSADGSRSEWELPKYNASSQQQREIIKSRSLDRRLQEPIVLTKWRHSTIVLDTNDKESPTASKPCFPENESSPSSPKHQDTDQEKYGLLNVTKIAENGKKVRKNWLSSWAVLQGSSLLFTKTQGSSTSWFGSNQSKPEFTVDLKGATIEMASKDKSSKKNVFELKTRQGTELLIQSDNDTVINDWFKVLSSTINNQAVETDEGIEEEIPDSPGIEKHDKEKEQKDPKKLRSFKVSSIDSSEQKKTKKNLKKFLTRRPTLQAVREKGYIKDQVFGSNLANLCQRENGTVPKFVKLCIEHVEEHGLDIDGIYRVSGNLAVIQKLRFAVNHDEKLDLNDSKWEDIHVITGALKMFFRELPEPLFTFNHFNDFVNAIKQEPRQRVAAVKDLIRQLPKPNQDTMQILFRHLRRVIENGEKNRMTYQSIAIVFGPTLLKPEKETGNIAVHTVYQNQIVELILLELSSIFGR

SEQ ID NO: 39882 - protein, 134 aa, Homo sapiens [sequence omitted]

SEQ ID NO: 39883 - protein, 414 aa, Homo sapiens [sequence omitted]

SEQ ID NO: 39884 - protein, 402 aa, Homo sapiens
MLENYGNLVSVGLLSSKPKLITQLEQGAEPWTEVREAPSGTHAVEDYWFETKMSALKQSTSEASVLGERTKSVMMEKGLDWEGRSSTEKNYKCKECGKVFKYNSSFISHQRNHTSEKPHKCKECGIAFMNSSSLLNHHKVHAGKQPYRCIECGKFLKKHSTFINHQRIHSREKPHKCIECGKTFRKNSILLSHQRIHTGQKPYKCNDCGKAFAQNAALTRHERIHSGEKPFKCNKCGRAFRDNSTVLEHQKIHTGEKPYQCNECGKAFRKSSTLISHQRMHTGEKPYHCSKCGKSFRYSSSFAGHQKTHSGNKPYQCRDCGKAFTKSSTLTGHQRIHTGEKPYHCKKCGKAFRHSSGLVEHQRLHTGEKPYKCNECGKAFPRSSALKQHKKIHNKERAMKCS

SEQ ID NO: 39885 - protein, 16 aa, Homo sapiens
MLEAGQGGSAASSEPT

SEQ ID NO: 39886 - protein, 1465 aa, Homo sapiens
MAIKQESGGDGEVEEYLSFRSVGDGLSTSAVGCASAAPRRGPALLHIDRHQIQAVEPSAQALELQGLGVDVYDQDVLEQGVLQQVDNAIHEASRASQLVDVEKEYRSVLDDLTSCTTSLRQINKIIEQLSPQAATSRDINRKLDSVKRQKYNKEQQLKKITAKQKHLQAILGGAEVKIELDHASLEEDAEPGPSSLGSMLMPVQETAWEELIRTGQMTPFGTQIPQKQEKKPRKIMLNEASGFEKYLADQAKLSFERKKQGCNKRAARKAPAPVTPPAPVQNKNKPNKKARVLSKKEERLKKHIKKLQKRALQFQGKVGLPKARRPWESDMRPEAEGDSEGEESEYFPTEEEEEEEDDEVEGAEADLSGDGTDYELKPLPKGGKRQKKVPVQEIDDDFFPSSGEEAEAASVGEGGGGGRKVGRYRDDGDEDYYKQRLRRWNKLRLQDKEKRLKLEDDSEESDAEFDEGFKVPGFLFKKLFKYQQTGVRWLWELHCQQAGGILGDEMGLGKTIQIIAFLAGLSYSKIRTRGSNYRFEGLGPTVIVCPTTVMHQWVKEFHTWWPPFRVAILHETGSYTHKKEKLIRDVAHCHGILITSYSYIRLMQDDISRYDWHYVILDEGHKIRNPNAAVTLACKQFRTPHRIILSGSPMQNNLRELWSLFDFIFPGKLGTLPVFMEQFSVPITMGGYSNASPVQVKTAYKCACVLRDTINPYLLRRMKSDVKMSLSLPDKNEQVLFCRLTDEQHKVYQNFVDSKEVYRILNGEMQIFSGLIALRKICNHPDLFSGGPKNLKGLPDDELEEDQFGYWKRSGKMIVVESLLKIWHKQGQRVLLFSQSRQMLDILEVFLRAQKYTYLKMDGTTTIASRQPLITRYNEDTSIFVFLLTTRVGGLGVNLTGANRVVIYDPDWNPSTDTQARERAWRIGQKKQVTVYRLLTAGTIEEKIYHRQIFKQFLTNRVLKDPKQRRFFKSNDLYELFTLTSPDASQSTETSAIFAGTGSDVQTPKCHLKRRIQPAFGADHDVPKRKKFPASNISVNDATSSEEKSEAKGAEVNAVTSNRSDPLKDDPHMSSNVTSNDRLGEETNAVSGPEELSVISGNGECSNSSGTGKTSMPSGDESIDEKLGLSYKRERPSQAQTEAFWENKQMENNFYKHKSKTKHHSVAEEETLEKHLRPKQKPKNSKHCRDAKFEGTRIPHLVKKRRYQKQDSENKSEAKEQSNDDYVLEKLFKKSVGVHSVMKHDAIMDGASPDYVLVEAEANRVAQDALKALRLSRQRCLGAVSGVPTWTGHRGISGAPAGKKSRFGKKRNSNFSVQHPSSTSPTEKCQDGIMKKEGKDNVPEHFSGRAEDADSSSGPLASSSLLAKMRARNHLILPERLESESGHLQEASALLPTTEHDDLLVEMRNFIAFQAHTDGQASTREILQEFESKLSASQSCVFRELLRNLCTFHRTSGGEGIWKLKPEYC

SEQ ID NO: 39887 - protein, 1033 aa, Homo sapiens
MAIKQESGGDGEVEEYLSFRSVGDGLSTSAVGCASAAPRRGPALLHIDRHQIQAVEPSAQALELQGLGVDVYDQDVLEQGVLQQVDNAIHEASRASQLVDVEKEYRSVLDDLTSCTTSLRQINKIIEQLSPQAATSRDINRKLDSVKRQKYNKEQQLKKITAKQKHLQAILGGAEVKIELDHASLEEDAEPGPSSLGSMLMPVQETAWEELIRTGQMTPFGTQIPQKQEKKPRKIMLNEASGFEKYLADQAKLSFERKKQGCNKRAARKAPAPVTPPAPVQNKNKPNKKARVLSKKEERLKKHIKKLQKRALQFQGKVGLPKARRPWESDMRPEAEGDSEGEESEYFPTEEEEEEEDDEVEGAEADLSGDGTDYELKPLPKGGKRQKKVPVQEIDDDFFPSSGEEAEAASVGEGGGGGRKVGRYRDDGDEDYYKQRLSPKMPRTLSLHEITDLLETDDSIEASAIVIQPPENATAPVSDEESGDEEGGTINNLPGSLLHTAAYLIQDGSDAESDSDDPSYAPKDDSPDEVPSTFTVQQPPPSRRRKMTKILCKWKKADLTVQPVAGRVTAPPNDFFTVMRTPTEILELFLDDEVIELIVKYSNLYACSKGVHLGLTSSEFKCFLGIIFLSGYVSVPRRRMFWEQRTDVHNVLVSAAMRRDRFETIFSNLHVADNANLDPVDKFSKLRPLISKLNERCMKFVPNETYFSFDEFMVPYFGRHGCKQFIRGKPIRFGYKFWCGATCLGYICWFQPYQGKNPNTKHEEYGVGASLVLQFSEALTEAHPGQYHFVFNNFFTSIALLDKLSSMGHQATGTVRKDHIDRVPLESDVALKKKERGTFDYRIDGKGNIVCRWNDNSVVTVASSGAGIHPLCLVSRYSQKLKKKIQVQQPNMIKVYNQFMGGVDRADENIDKYRASIRGKKWYSSPLLFCFELVLQNAWQLHKTYDEKPVDFLEFRRRVVCHYLETHGHPPEPGQKGRPQKRNIDSRYDGINHVIVKQGKQTRCAECHKNTTFRCEKCDVALHVKCSVEYHTE

SEQ ID NO: 39888 - protein, 265 aa, Homo sapiens [sequence omitted]

SEQ ID NO: 39889 - protein, 2321 aa, Homo sapiens
MIVMNDQVLEPQNVDPSMVQMTFLDDVVHSLLKGENIGITSRRRSRANQNVNAVHSHYTRAQANSPRPAMNSQAAVPKQNTHQQQQQRSIRPNKRKGSDSSIPDEEKMKEEKYDYISRGENPKGKNKHLMNKRRKPEEDEKKLNMKRLRTDNVSDFSESSDSENSNKRIIDNSSEQKPENELKNKNTSKINGEEGKPHNNEKAGEETLKNSQPPWDQIQEDKKHEEAEKRKSVDTQLQEDMIIHSSEQSTVSDHNSNDLLPQECNMDKTHTMELLPKEKFVSRPPTPKCVIDITNDTNLEKVAQENSSTFGLQTLQKMDPNVSDSKHSIANAKFLETAKKDSDQSWVSDVVKVDLTQSSVTNASSGNDHLNMEKEKYVSYISPLSAVSVMEDKLHKRSPPPETIKSKLNTSVDTHKIKSSPSPEVVKPKITHSPDSVKSKATYVNSQATGERRLANKIEHELSRCSFHPIPTRSSTLETTKSPLIIDKNEHFTVYRDPALIGSETGANHISPFLSQHPFPLHSSSHRTCLNPGTHHPALTPAPHLLAGSSSQTPLPTINTHPLTSGPHHAVHHPHLLPTVLPGVPTASLLGGHPRLESAHASSLSHLALAHQQQQQLLQHQSPHLLGQAHPSASYNQLGLYPIIWQYPNGTHAYSGLGLPSSKWVHPENAVNAEASLRRNSPSPWLHQPTPVTSADGIGLLSHIPVRPSSAEPHRPLKITAHSSPPLTKTLVDHHKEELERKAFMEPLRSVASTSAKNDLDLNRSQTGKDCHLHRHFVDPVLNQLQRPPQETGERLNKYKEEHRRILQESIDVAPFTTKIKGLEGERENYSRVASSSSSPKSHIIKQDMDVERSVSDLYKMKHSVPQSLPQSNYFTTLSNSVVNEPPRSYPSKEVSNIYGDKQSNALAAAAANPQTLTSFITSLSKPPPLIKHQPESEGLVGKIPEHLPHQIASHSVTTFRNDCRSPTHLTVSSTNTLRSMPALHRAPVFHPPIHHSLERKEGSYSSLSPPTLTPVMPVNAGGKVQESQKPPTLIPEPKDSQANFKSSSEQSLTEMWRPNNNLSKEKTEWHVEKSSGKLQAAMASVIVRPSSSTKTDSMPAMQLASKDRVSERSSAGAHKTDCLKLAEAGETGRIILPNVNSDSVHTKSEKNFQAVSQGSVPSSVMSAVNTMCNTKTDVITSAADTTSVSSWGGSEVISSLSNTILASTSSECVSSKSVSQPVAQKQECKVSTTAPVTLASSKTGSVVQPSSGFSGTTDFIHLKKHKAALAAAQYKSSNASETEPNAIKNQTLSASLPLDSTVICSTINKANSVGNGQASQTSQPNYHTKLKKAWLTRHSEEDKNTNKMENSGNSVSEIIKPCSVNLIASTSSDIQNSVDSKIIVDKYVKDDKVNRRKAKRTYESGSESGDSDESESKSEQRTKRQPKPTYKKKQNDLQKRKGEIEEDLKPNGVLSRSAKERSKLKLQSNSNTGIPRSVLKDWRKVKKLKQTGESFLQDDSCCEIGPNLQKCRECRLIRSKKGEEPAHSPVFCRFYYFRRLSFSKNGVVRIDGFSSPDQYDDEAMSLWTHENFEDDELDIETSKYILDIIGDKFCQLVTSEKTALSWVKKDAKIAWKRAVRGVREMCDACEATLFNIHWVCQKCGFVVCLDCYKAKERKSSRDKELYAWMKCVKGQPHDHKHLMPTQIIPGSVLTDLLDAMHTLREKYGIKSHCHCTNKQNLQVGNFPTMNGVSQVLQNVLNHSNKISLCMPESQQQNTPPKSEKNGGSSPESDVGTDNKLTPPESQSPLHWLADLAEQKAREEKKENKELTLENQIKEEREQDNSESPNGRTSPLVSQNNEQGSTLRDLLTTTAGKLRVGSTDAGIAFAPVYSMGAPSSKSGRTMPNILDDIIASVVENKIPPSKTSKINVKPELKEEPEESIISAVDENNKLYSDIPHSWICEKHILWLKDYKNSSNWKLFKECWKQGQPAVVSGVHKKMNISLWKAESISLDFGDHQADLLNCKDSIISNANVKEFWDGFEEVSKRQKNKSGETVVLKLKDWPSGEDFKTMMPARYEDLLKSLPLPEYCNPEGKFNLASHLPGFFVRPDLGPRLCSAYGVVAAKDHDIGTTNLHIEVSDVVNILVYVGIAKGNGILSKAGILKKFEEEDLDDILRKRLKDSSEIPGALWHIYAGKDVDKIREFLQKISKEQGLEVLPEHDPIRDQSWYVNKKLRQRLLEEYGVRTCTLIQFLGDAIVLPAGALHQVQNFHSCIQVTEDFVSPEHLVESFHLTQELRLLKEEINYDDKLQVKNILYHAVKEMVRALKIHEDEVEDMEEN

SEQ ID NO: 39890 - protein, 251 aa, Homo sapiens
MISRAVVLVFGMLYPAYYSYKAVKTKNVKEYVRWMMYWIVFALYTVIETVADQTVAWFPLYYELKIAFVIWLLSPYTKGASLIYRKFLHPLLSSKEREIDDYIVQAKERGYETMVNFGRQGLNLAATAAVTAAVKSQGAITERLRSFSMHDLTTIQGDEPVGQRPYQPLPEAKKKSKPAPSESAGYGIPLKDGDEKTDEEAEGPYSDNEMLTHKGLRRSQSMKSVKTTKGRKEVRYGSLKYKVKKRPQVYF

SEQ ID NO: 39891 - protein, 549 aa, Homo sapiens [sequence omitted]

SEQ ID NO: 39892 - protein, 39 aa, Homo sapiens
MLFENFYFGSLKLNSIHISQRFTVDSFGNYASCGQIDFS

SEQ ID NO: 39893 - protein, 975 aa, Homo sapiens
MQISGAVAPAPPSSGLGFGPPTSLASASGSFPNSGLYGSYPQGQAPPLSQAQGHPGIQTPQRSAPSQASSFTPPASGGPRLPSMTGPLLPGQSFGGPSVSQPNHVSSPPQALPPGTQMTGPLGPLPPMHSPQQPGYQPQQNGSFGPARGPQSNYGGPYPAAPTFGSQPGPPQPLPPKRLDPDAIPSPQLSELPPQQKTRHRIDPDAIPSPIQVIEDDRNNRGTEPFVTGVRGQVPPLVTTNFLVKDQGNASPRYIRCTSYNIPCTSDMAKQAQVPLAAVIKPLARLPPEEASPYVVDHGESGPLRCNRCKAYMCPFMQFIEGGRRFQCCFCSCINDVPPQYFQHLDHTGKRVDAYDRPELSLGSYEFLATVDYCKNNKFPSPPAFIFMIDVSYNAIRTGLVRLLCEELKSLLDFLPREGGAEESAIRVGFVTYNKVLHFYNVKSSLAQPQMMVVSDVADMFVPLLDGFLVNVNESRAVITSLLDQIPEMFADTRETETVFVPVIQAGMEALKAAECAGKLFLFHTSLPIAEAPGKLKNRDDRKLINTDKEKTLFQPQTGAYQTLAKECVAQGCCVDLFLFPNQYVDVATLSVVPQLTGGSVYKYASFQVENDQERFLSDLRRDVQKVVGFDAVMRVRTSTGIRAVDFFGAFYMSNTTDVELAGLDGDKTVTVEFKHDDRLNEESGALLQCALLYTSCAGQRRLRIHNLALNCCTQLADLYRNCETDTLINYMAKFAYRGVLNSPVKAVRDTLITQCAQILACYRKNCASPSSAGQLILPECMKLLPVYLNCVLKSDVLQPGAEVTTDDRAYVRQLVTSMDVTETNVFFYPRLLPLTKSPVESTTEPPAVRASEERLSNGDIYLLENGLNLFLWVGASVQQGVVQSLFSVSSFSQITSGLSVLPVLDNPLSKKVRGLIDSLRAQRSRYMKLTVVKQEDKMEMLFKHFLVEDKSLSGGASYVDFLCHMHKEIRQLLS

SEQ ID NO: 39894 - protein, 1770 aa, Homo sapiens
MRDGLVIPLVELSAKQVAFHIPFEVVEKVYPPVPEQLQLRIAFWSFPENEEDIRLYSCLANGSADEFQRGDQLFRMRAVKDPLQIGFHLSATVVPPQMVPPKGAYNVAVMFDRCRVTSCSCTCGAGAKWCTHVVALCLFRIHNASAVCLRAPVSESLSRLQRDQLQKFAQYLISELPQQILPTAQRLLDELLSSQSTAINTVCGAPDPTAGPSASDQSTWYLDESTLTDNIKKTLHKFCGPSPVVFSDVNSMYLSSTEPPAAAEWACLLRPLRGREPEGVWNLLSIVREMFKRRDSNAAPLLEILTDQCLTYEQITGWWYSVRTSASHSSASGHTGRSNGQSEVAAHACASMCDEMVTLWRLAVLDPALSPQRRRELCTQLRQWQLKVIENVKRGQHKKTLERLFPGFRPAVEACYFNWEEAYPLPGVTYSGTDRKLALCWARALPSRPGASRSGGLEESRDRPRPLPTEPAVRPKEPGTKRKGLGEGVPSSQRGPRRLSAEGGDKALHKMGPGGGKAKALGGAGSGSKGSAGGGSKRRLSSEDSSLEPDLAEMSLDDSSLALGAEASTFGGFPESPPPCPLHGGSRGPSTFLPEPPDTYEEDGGVYFSEGPEPPTASVGPPGLLPGDVCTQDDLPSTDESGNGLPKTKEAAPAVGEEDDDYQAYYLNAQDGAGGEEEKAEGGAGEEHDLFAGLKPLEQESRMEVLFACAEALHAHGYSSEASRLTVELAQDLLANPPDLKVEPPPAKGKKNKVSTSRQTWVATNTLSKAAFLLTVLSERPEHHNLAFRVGMFALELQRPPASTKALEVKLAYQESEVAALLKKIPLGPSEMSTMRCRAEELREGTLCDYRPVLPLMLASFIFDVLCAPGSRPPSRNWNSETPGDEELGFEAAVAALGMKTTVSEAEHPLLCEGTRREKGDLALALMITYKDDQAKLKKILDKLLDRESQTHKPQTLSSFYSSSRPTTASQRSPSKHGGPSAPGALQPLTSGSAGPAQPGSVAGAGPGPTEGFTEKNVPESSPHSPCEGLPSEAALTPRPEGKVPSRLALGSRGGYNGRGWGSPGRPKKKHTGMASIDSSAPETTSDSSPTLSRRPLRGGWAPTSWGRGQDSDSISSSSSDSLGSSSSSGSRRASASGGARAKTVEVGRYKGRRPESHAPHVPNQPSEAAAHFYFELAKTVLIKAGGNSSTSIFTHPSSSGGHQGPHRNLHLCAFEIGLYALGLHNFVSPNWLSRTYSSHVSWITGQAMEIGSAALTILVECWDGHLTPPEVASLADRASRARDSNMVRAAAELALSCLPHAHALNPNEIQRALVQCKEQDNLMLEKACMAVEEAAKGGGVYPEVLFEVAHQWFWLYEQTAGGSSTAREGATSCSASGIRAGGEAGRGMPEGRGGPGTEPVTVAAAAVTAAATVVPVISVGSSLYPGPGLGHGHSPGLHPYTALQPHLPCSPQYLTHPAHPAHPMPHMPRPAVFPVPSSAYPQGVHPAFLGAQYPYSVTPPSLAATAVSFPVPSMAPITVHPYHTEPGLPLPTSVACELWGQGTVSSVHPASTFPAIQGASLPALTTQPSPLVSGGFPPPEEETHSQPVNPHSLHHLHAAYRVGMLALEMLGRRAHNDHPNNFSRSPPYTDDVKWLLGLAAKLGVNYVHQFCVGAAKGVLSPFVLQEIVMETLQRLSPAHAHNHLRAPAFHQLVQRCQQAYMQYIHHRLIHLTPADYDDFVNAIRSARSAFCLTPMGMMQFNDILQNLKRSKQTKELWQRVSLEMATFSP

SEQ ID NO: 39895 - protein, 65 aa, Homo sapiens [sequence omitted]

SEQ ID NO: 39896 - protein, 568 aa, Homo sapiens
MLTARTGHILHPEYLQPLPSTPVSPIELDAKKSPLALLAQTCSQIGKPDPSPSSKLSSVASNGGGAGGAGGGAAGDKDTKSGPLKLSDIGVEDKSSFKPYSKPGSDKKEPGGGGGGGGGGGGGGGGVSSEKSGFRVPSATCQPFTPRTGSPSSSASACSPGGMLSSAGGAPEGKDDKKDTDVGGGGKGTGGASAEGGPTGLAHGRISCGGGINVDVNQHPDGGPGGKALGSDCGGSSGSSSGSGPSAPTSSSVLGSGLVAPVSPYKPGQTVFPLPPAGMTYPGSLAGAYAGYPPQFLPHGVALDPTKPGSLVGAQLAAAAAGSLGCSKPAGSSPLAGASPPSVMTASLCRDPYCLSYHCASHLAGAAAASASCAHDPAAAAAALKSGYPLVYPTHPLHGVHSSLTAAAAAGATPPSLAGHPLYPYGFMLPNDPLPHICNWVSANGPCDKRFATSEELLSHLRTHTAFPGTDKLLSGYPSSSSLASAAAAAMACHMHIPTSGAPGSPGTLALRSPHHALGLSSRYHPYSKSPLPTPGAPVPVPAATGPYYSPYALYGQRLTTASALGYQ

SEQ ID NO: 39897 - protein, 335 aa, Homo sapiens
MQPPLSSMSSMKPTLSHSDGSFPYDSVPWQQNTNQPPGSLSVVTTVWGVTNTSQSQVLGNPMANANNPMNPGGNPMASGMTTSNPGLNSPQFAGQQQQFSAKAGPAQPYIQQSMYGRPNYPGSGGFGASYPGGPNAPAGMGIPPHTRPPADFTQPAAAAAAAAVAAAAATATATATATVAALQETQNKDINQYGPVCSSFQMGPTQAYNSQFMNQPGPRGPASMGGSMNPASMAAGMTPSGMSGPPMGMNQPRPPGISPFGTHGQRMPQQTYPGPRPQSLPIQNIKRPYPGEVSAAVGAWEVGTGTPGLEDMGRGYGFGRGVAWTPAHLDKEAGA

SEQ ID NO: 39898 - protein, 99 aa, Homo sapiens
MCQAGDFTNHNGTGGKSIYGSRFPDENFTLKHVGPGVLSMANAGPNTNGSQFFICTIKTDWSMALDDIALHCCSPGSPVLTGWMASMLCSVTSKRAWTS

SEQ ID NO: 39899 - protein, 1150 aa, Homo sapiens [sequence omitted]

SEQ ID NO: 39900 - protein, 329 aa, Homo sapiens
MGQKDSYVGDEAQSKRGILTLKYPIEHGIITNWDDMEKIWHHSFYNELRVAPEEHPTLLTEAPLNPKANREKMTQIMFETFNVPAMYVAIQAVLSLYASGRTTGIVLDSGDGVTHNVPIYEGYALPHAIMRLDLAGRDLTDYLMKILTERGYSFVTTAEREIVRDIKEKLCYVALDFENEMATAASSSSLEKSYELPDGQVITIGNERFRCPETLFQPSFIGMESAGIHETTYNSIMKCDIDIRKDLYANNVLSGGTTMYPGIADRMQKEITALAPSTMKIKIIAPPERKYSVWIGGSILASLSTFQQMWISKQEYDEAGPSIVHRKCF

SEQ ID NO: 39901 - protein, 245 aa, Homo sapiens [sequence omitted]

SEQ ID NO: 39902 - protein, 456 aa, Homo sapiens [sequence omitted]

SEQ ID NO: 39903 - protein, 545 aa, Homo sapiens
MNTVGPYHNRQETYKYFSLPFCVGSKKSISHYHETLGEALQGVELEFSGLDIKFKDDVMPATYCEIDLDKEKRDAFVYAIKNHYWYQMYIDDLPIWGIVGEADENGEDYYLWTYKKLEIGFNGNRIVDVNLTSEGKVKLVPNTKIQMSYSVKWKKSDVKFEDRFDKYLDPSFFQHRIHWFSIFNSFMMVIFLVGLVSMILMRTLRKDYARYSKEEEMDDMDRDLGDEYGWKQVHGDVFRPSSHPLIFSSLIGSGCQIFAVSLIVIIVAMIEDLYTERGSMLSTAIFVYAATSPVNGYFGGSLYARQGGRRWIKQMFIGAFLIPAMVCGTAFFINFIAIYYHASRAIPFGTMVAVCCICFFVILPLNLVGTILGRNLSGQPNFPCRVNAVPRPIPEKKWFMEPAVIVCLGGILPFGSIFIEMYFIFTSFWAYKIYYVYGFMMLVLVILCIVTVCVTIVCTYFLLNAEDYRWQWTSFLSAASTAIYVYMYSFYYYFFKTKMYGLFQTSFYFGYMAVFSTALGIMCGAIGYMGTSAFVRKIYTNVKID

SEQ ID NO: 39904 - protein, 1554 aa, Homo sapiens
MIQQFAAEYTSKNSSTQDPSQPNSTKNQSLPKASPVTTSPTAATTQNPVLSKLLMADQDSPLDLTVRKSQSEPSEQDGVLDLSTKKSPCAGSTSLSHSPGCSSTQGNGENSTEAKAVDSNNQSKSPLEKFMVKLCTHHQKQFIRVLNDLYTESQPGTEDLQPSDSGAMDVSTCNAGCAQLSTKHKEKDALCLDMKSSASVDLFVDSSDSHSPLHLTEQTPKKPPPEINPVDGRENALTVVQKDSSELPTTKSNSINSSSVDSFTPGYLTASNCSSVNFHHIPKILEGQTTGQEQDTNVNICEDGKDHMQSSALVESLITVKMAAENSEEGNTCIIPQRNLFKALSEEAWNSGFMGNSSRTADKENTLQCPKTPLRQDLEANEQDARPKQENHLHSLGRNKVGYHLHPSDKGQFDHSKDGWLGPGPMPAVHKAANGHSRTKMISTSIKTARKSKRASGLRINDYDNQCDVVYISQPITECHFENQKSILSSRKTARKSTRGYFFNGDCCELPTVRTLARNLHSQEKASCSALASEAVFTPKQTLTIPAPRHTVDVQLPREDNPEEPSKEITSHEEGGGDVSPRKEPQEPEVCPTKIKPNLSSSPRSEETTASSLVWPLPAHLPEEDLPEGGSTVSAPTASGMSSPEHNQPPVALLDTEEMSVPQDCHLLPSTESFSGGVSEDVISRPHSPPEIVSREESPQCSENQSSPMGLEPPMSLGKAEDNQSISAEVESGDTQELNVDPLLKESSTFTDENPSETEESEAAGGIGKLEGEDGDVKCLSEKDTYDTSIDSLEENLDKKKKGKKFPEASDRCLRSQLSDSSSADRCLRNQSSDSSSACLEIKVPKNPSAKRSKKEGHPGGTTPKGLLPDSFHTETLEDTEKPSVNERPSEKDAEQEGEGGGIITRQTLKNMLDKEVKELRGEIFPSRDPITTAGQPLPGERLEIYVQSKMDEKNAHIPSESIACKRDPEQAKEEPGHIPTQHVEEAVNEVDNENTQQKDDESDAPCSSLGLSSSGSGDAARAPKSVPRPKRLTSSTYNLRHAHSLGSLDASKVTSEKEAAQVNPIMPKENGASESGDPLDEDDVDTVVDEQPKFMEWCAEEENQELIANFNAQYMKVQKGWIQLEKEGQPTPRARNKSDKLKEIWKSKKRSRKCRSSLESQKCSPVQMLFMTNFKLSNVCKWFLETTETRSLVIVKKLNTRLPGDVPPVKHPLQKYAPSSLYPSSLQAERLKKHLKKFPGATPAKNNWKMQKLWAKFRENPDQVEPEDGSDVSPGPNSEDSIEEVKEDRNSHPPANLPTPASTRILRKYSNIRGKLRAQQRLIKNEKMECPDALAVESKPSRKSVCINPLMSPKLALQVDADGFPVKPKSTEGMKGRKGKQVSEILPKAEVQSKRKRTEGSSPPDSKNKGPTVKASKEKHADGATKTPAAKRPAARDRSSQPPKKTSLKENKVKIPKKSAGKSCPPSRKEKENTNKRPSQSIASETLTKPAKQKGAGESSSRPQKATNRKQSSGKTRARPSTKTPESSAAQRKRKLKAKLDCSHSKRRRLDAK

SEQ ID NO: 39905 - protein, 289 aa, Homo sapiens [sequence omitted]

SEQ ID NO: 39906 - protein, 561 aa, Homo sapiens [sequence omitted]

SEQ ID NO: 39907 - protein, 587 aa, Homo sapiens
MPRSLWLGCSSLADSMPSLRCLYNPGTGALTAFQNSSEREDCNNGEPPRKIIPEKNSLRQTYNSCARLCLNQETVCLASTAMKTENCVAKTKLANGTSSMIVPKQRKLSASYEKEKELCVKYFEQWSESDQVEFVEHLISQMCHYQHGHINSYLKPMLQRDFITALPARGLDHIAENILSYLDAKSLCAAELVCKEWYRVTSDGMLWKKLIERMVRTDSLWRGLAERRGWGQYLFKNKPPDGNAPPNSFYRALYPKIIQDIETIESNWRCGRHSLQRIHCRSETSKGVYCLQYDDQKIVSGLRDNTIKIWDKNTLECKRILTGHTGSVLCLQYDERVIITGSSDSTVRVWDVNTGEMLNTLIHHCEAVLHLRFNNGMMVTCSKDRSIAVWDMASPTDITLRRVLVGHRAAVNVVDFDDKYIVSASGDRTIKVWNTSTCEFVRTLNGHKRGIACLQYRDRLVVSGSSDNTIRLWDIECGACLRVLEGHEELVRCIRFDNKRIVSGAYDGKIKVWDLVAALDPRAPAGTLCLRTLVEHSGRVFRLQFDEFQIVSSSHDDTILIWDFLNDPAAQAEPPRSPSRTYTYISR

SEQ ID NO: 39908 - protein, 234 aa, Homo sapiens [sequence omitted]

SEQ ID NO: 39909 - protein, 257 aa, Homo sapiens
MEKYGFQASNVTFIHGYIEKLGEAGIKNESHDIVVSNCVINLVPDKQQVLQEAYRVLKHGGELYFSDVYTSLELPEEIRTHKVLWGECLGGALYWKELAVLAQKIGFCPPRLVTANLITIQNKELERVIGDCRFVSATFRLFKHSKTGPTKRCQVIYNGGITGHEKELMFDANFTFKEGEIVEVDEETAAILKNSRFAQDFLIRPIGEKLPTSGGCSALELKDIITDPFKLAEESDSMKSRCVPDAAGGCCGTKKSC

SEQ ID NO: 39910 - protein, 827 aa, Homo sapiens
MAARRSLSARGRGILQAAAGRLLPLLLLSCCCGAGGCAAVGENEETVIIGLRLEDTNDVSFMEGGALRVSERTRVKLRVYGQNINNETWSRIAFTEHERRRHSPGERGLGGPAPPEPDSGPQRCGIRTSDIIILPHIILNRRTSGIIEIEIKPLRKMEKSKSYYLCTSLSTPALGAGGSGSTGGAVGGKGGSGVAGLPPPPWAETTWIYHDGEDTKMIVGEEKKFLLPFWLQVIFISLLLCLSGMFSGLNLGLMALDPMELRIVQNCGTEKEKNYAKRIEPVRRQGNYLLCSLLLGNVLVNTTLTILLDDIAGSGLVAVVVSTIGIVIFGEIVPQAICSRHGLAVGANTIFLTKFFMMMTFPASYPVSKLLDCVLGQEIGTVYNREKLLEMLRVTDPYNDLVKEELNIIQGALELRTKTVEDVMTPLRDCFMITGEAILDFNTMSEIMESGYTRIPVFEGERSNIVDLLFVKDLAFVDPDDCTPLKTITKFYNHPLHFVFNDTKLDAMLEEFKKGKSHLAIVQRVNNEGEGDPFYEVLGIVTLEDVIEEIIKSEILDETDLYTDNRTKKKVAHRERKQDFSAFKQTDSEMKVKISPQLLLAMHRFLATEVEAFSPSQMSEKILLRLLKHPNVIQELKYDEKNKKAPEYYLYQRNKPVDYFVLILQGKVEVEAGKEGMKFEASAFSYYGVMALTASPGENKSPPRPCGLNHSDSLSRSDRIDAVTPTLGSSNNQLNSSLLQVYIPDYSVRALSDLQFVKISRQQYQNALMASRMDKTPQSSDSENTKIELTLTELHDGLPDETANLLNEQNCVTHSKANHSLHNEGAI

SEQ ID NO: 39911 - protein, 496 aa, Homo sapiens
MIPDLTSPYLPNGSLSPTARTLHFQSGSTHYSAYKTIEHQIAVQYLQMKWPLLDVQAGSLQSRQALKDARSPSPAHIVSNKVPVVQHPHHVHPLTPLITYSNEHFTPGNPPPHLPADVDPKTGIPRPPHPPDISPYYPLSPGTVGQIPHPLGWLVPQQGQPVYPITTGGFRHPYPTALTVNASMSRFPPHMVPPHHTLHTTGIPHPAIVTPTVKQESSQSDVGSLHSSKHQDSKKEEEKKKPHIKKPLNAFMLYMKEMRAKVVAECTLKESAAINQILGRRWHALSREEQAKYYELARKERQLHMQLYPGWSARDNYGKKKKRKRDKQPGETNDANTPKKCRALFGLDRQTLWCKPCRRKKKCVRYIQGEGSCLSPPSSDGSLLDSPPPSPNLLGSPPRDAKSQTEQTQPLSLSLKPDPLAHLSMMPPPPALLLAEATHKASALCPNGALDLPPAALQPAAPSSSIAQPSTSSLHSHSSLAGTQPQPLSLVTKSLE

SEQ ID NO: 39912 - protein, 511 aa, Homo sapiens
MLSEQAQKWFPTHVQVTVLQAKDLKPKGKSGTNDTYTIIQLGKEKYSTSVAEKTLEPVWKEEASFELPGLLIQGSPEKYILFLIVMHRSLVGLDKFLGQVAINLNDIFEDKQRRKTEWFRLESKQGKRIKNRGEIKVNIQFMRNNMTASMFDLSMKDKTRSPFAKLKDKMKGRKNDGTFSDTSSAIIPSTHMPDANSEFSSGEIQMKSKPKKPFLLGPQRLSSAHSMSDLSGSHMSSEKLKAGTIGQTHLLGHQLDSFGTVPESGSLKSPHRRTLSFDTSKMNQPDSIVDEGELCFGRQNDPFTNVTASLPQKFATLPRKKNPFEESSETWDSSMNLFSKPIEIRKENKREKREKVSLFERVTGKKDSRRSDKLNNGGSDSPCDLKSPNAFSENRQDYFDYESTNPFTAKFRASNIMPSSSFHMSPTSNEDLRKIPDSNPFDATAGYRSLTYEEVLQELVKHKELLRRKDTHIRELEDYIDNLLVRVMEETPSILRVPYEPSRKAGKFSNS

SEQ ID NO: 39913 - protein, 391 aa, Homo sapiens
MEDDGQPRTLYVGNLSRDVTEVLILQLFSQIGPCKSCKMITEQPDSRRVNSSVGFSVLQHTSNDPYCFVEFYEHRDAAAALAAMNGRKILGKEVKVNWATTPSSQKKDTSNHFHVFVGDLSPEITTEDIKSAFAPFGKISDARVVKDMATGKSKGYGFVSFYNKLDAENAIVHMGGQWLGGRQIRTNWATRKPPAPKSTQENNTKQLRFEDVVNQSSPKNCTVYCGGIASGLTDQLMRQTFSPFGQIMEIRVFPEKGYSFVRFSTHESAAHAIVSVNGTTIEGHVVKCYWGKESPDMTKNFQQVDYSQWGQWSQVYGNPQQYGQYMANGWQVPPYGVYGQPWNQQGFGVDQSPSAAWMGGFGAQPPQGQAPPPVIPPPNQAGYGMASYQTQ

SEQ ID NO: 39914 - protein, 374 aa, Homo sapiens
MEDDGQPRTLYVGNLSRDVTEVLILQLFSQIGPCKSCKMITEHTSNDPYCFVEFYEHRDAAAALAAMNGRKILGKEVKVNWATTPSSQKKDTSNHFHVFVGDLSPEITTEDIKSAFAPFGKISDARVVKDMATGKSKGYGFVSFYNKLDAENAIVHMGGQWLGGRQIRTNWATRKPPAPKSTQENNTKQLRFEDVVNQSSPKNCTVYCGGIASGLTDQLMRQTFSPFGQIMEIRVFPEKGYSFVRFSTHESAAHAIVSVNGTTIEGHVVKCYWGKESPDMTKNFQQVDYSQWGQWSQVYGNPQQYGQYMANGWQVPPYGVYGQPWNQQGFGVDQSPSAAWMGGFGAQPPQGQAPPPVIPPPNQAGYGMASYQTQ

SEQ ID NO: 39915 - protein, 318 aa, Homo sapiens
MRKYFLQANDQQDLVEWVNVLNKAIKITVPKQSDSQPNSDNLSRHGECGKKQVSYRTDIVGGVPIITPTQKEEVNECGESIDRNNLKRSQSHLPYFTPKPPQDSAVIKAGYCVKQGAVMKNWKRRYFQLDENTIGYFKSELEKEPLRVIPLKEVHKVQECKQSDIMMRDNLFEIVTTSRTFYVQADSPEEMHSWIKAVSGAIVAQRGPGRSASSEHPPGPSESKHAFRPTNAATATSHSTASRSNSLVSTFTMEKRGFYESLAKVKPGNFKVQTVSPREPASKVTEQALLRPQSKNGPQEKDCDLVDLDDASLPVSDV

SEQ ID NO: 39916 - protein, 391 aa, Homo sapiens
MSQGPTLFSCGIMENDRWRDLDRKCPLQIDQPSTSIWECLPEKDSSLWHREAVTACAVTSLIKDLSISDHNGNPSAPPSKRQCRSLSFSDEMSSCRTSWRPLGSKVWTPVEKRRCYSGGSVQRYSNGFSTMQRSSSFSLPSRANVLSSPCDQAGLHHRFGGQPCQGVPGSAPCGQAGDTWSPDLHPVGGGRLDLQRSLSCSHEQFSFVEYCPPSANSTPASTPELARRSSGLSRSRSQPCVLNDKKVGVKRRRPEEVQEQRPSLDLAKMAQNCQTFSSLSCLSAGTEDCGPQSPFARHVSNTRAWTALLSASGPGGRTPAGTPVPEPLPPSFDDHLACQEDLSCEESDSCALDEDCGRRAEPAAAWRDRGAPGNSLCSLDGELDIEQIEKN

SEQ ID NO: 39917 - protein, 226 aa, Homo sapiens [sequence omitted]

SEQ ID NO: 39918 - protein, 206 aa, Homo sapiens
MFEVTGLHDVDQGWMRAVRKHAKGLHIVPRLLFEDWTYDDFRNVLDSEDEIEELSKTVVQVAKNQHFDGFVVEVWNQLLSQKRVGLIHMLTHLAEALHQARLLALLVIPPAITPGTDQLGMFTHKEFEQLAPVLDGFSLMTYDYSTAHQPGPNAPLSWVRACVQVLDPKSKWRSKILLGLNFYGMDYATSKDAREPVVGASVHGAS

SEQ ID NO: 39919 - protein, 242 aa, Homo sapiens [sequence omitted]

SEQ ID NO: 39920 - protein, 408 aa, Homo sapiens
MSALGRSSVILLTYVLAATELTCLFMQFSIVPYLSRKLGLDSIAFGYLQTTFGVLQLLGGPVFGRFADQRGARAALTLSFLAALALYLLLAAASSPALPGVYLLFASRLPGALMHTLPAAQMVITDLSAPEERPAALGRLGLCFGVGVILGSLLGGTLVSAYGIQCPAILAALATLLGAVLSFTCIPASTKGAKTDAQAPLPGGPRASVFDLKAIASLLRLPDVPRIFLVKVASNCPTGLFMVMFSIISMDFFQLEAAQAGYLMSFFGLLQMVTQGLVIGQLSSHFSEEVLLRASVLVFIVVGLAMAWMSSVFHFCLLVPGLVFSLCTLNVVTDSMLIKAVSTSDTGTMLGLCASVQPLLRTLGPTVGGLLYRSFGVPVFGHVQVAINTLVLLVLWRKPMPQRKDKVR

SEQ ID NO: 39921 - protein, 153 aa, Homo sapiens
MKRVETNQDWSLMCPNECPGLDEVWGEEFEKLYASYEKQGRVRKVVKAQQLWYAIIESQTETGTPYMLYKDSCNRKSNQQNLGTIKCSNLCTEIVEYTSKDEVAVCNLASLALNMYVTSEHTYDFKKLAEVTKVVVRNLNKIIDINYYPVPEV

SEQ ID NO: 39922 - protein, 459 aa, Homo sapiens
MSIDCGHSFCHSCLSGLWEIPGESQNWGYTCPLCRAPVQPRNLRPNWQLANVVEKVRLLRLHPGMGLKGDLCERHGEKLKMFCKEDVLIMCEACSQSPEHEAHSVVPMEDVAWEYKWELHEALEHLKKEQEEAWKLEVGERKRTATWKIQVETRKQSIVWEFEKYQRLLEKKQPPHRQLGAEVAAALASLQREAAETMQKLELNHSELIQQSQVLWRMIAELKERSQRPVRWMLQDIQEVLNRSKSWSLQQPEPISLELKTDCRVLGLREILKTYAADVRLDPDTAYSRLIVSEDRKRVHYGDTNQKLPDNPERFYRYNIVLGSQCISSGRHYWEVEVGDRSEWGLGVCKQNVDRKEVVYLSPHYGFWVIRLRKGNEYRAGTDEYPILSLPVPPRRVGIFVDYEAHDISFYNVTDCGSHIFTFPRYPFPGRLLPYFSPCYSIGTNNTAPLAICSLDGED

SEQ ID NO: 39923 - protein, 598 aa, Homo sapiens
MGLVLALALALALALALSDSRVLWAPAEAHPLSPQGHPARLHRIVPRLRDVFGWGNLTCPICKGLFTAINLGLKEPNVARVGSVAIKLCNLLKIAPPAVCQSIVHLFEDDMVEVWRRSVLSPSEACGLLLGSTCGHWDIFSSWNISLPTVPKPPPKPPSPPAPGAPVSRILFLTDLHWDHDYLEGTDPDCADPLCCRRGSGLPPASRPGAGYWGEYSKCDLPLRTLESLLSGLGPAGPFDMVYWTGDIPAHDVWHQTRQDQLRALTTVTALVRKFLGPVPVYPAVGNHESTPVNSFPPPFIEGNHSSRWLYEAMAKAWEPWLPAEALRTLRIGGFYALSPYPGLRLISLNMNFCSRENFWLLINSTDPAGQLQWLVGELQAAEDRGDKVHIIGHIPPGHCLKSWSWNYYRIVARYENTLAAQFFGHTHVDEFEVFYDEETLSRPLAVAFLAPSATTYIGLNPGYRVYQIDGNYSGSSHVVLDHETYILNLTQANIPGAIPHWQLLYRARETYGLPNTLPTAWHNLVYRMRGDMQLFQTFWFLYHKGHPPSEPCGTPCRLATLCAQLSARADSPALCRHLMPDGSLPEAQSLWPRPLFC

SEQ ID NO: 39924 - protein, 80 aa, Homo sapiens [sequence omitted]

SEQ ID NO: 39925 - protein, 168 aa, Homo sapiens
MGLQACLLGLFALILSGKCSYSPEPDQRRTLPPGWVSLGRADPEEELSLTFALRQQNVERLSELVQAVSDPSSPQYGKYLTLENVADLVRPSPLTLHTVQKWLLAAGAQKCHSVITQDFLTCWLSIRQAELLLPGAEFHHYVGGPTETHVVSGGTAPFSPNIIPEATS

SEQ ID NO: 39926 - protein, 814 aa, Homo sapiens
MLELPQERAALLSQIPGPTAAYIKEWFEESLSQVNHHSAASNETYQERLARLEGDKESLILQVSVLTDQVEAQGEKIRDLEVCLEGHQVKLNAAEEMLQQELLSRTSLETQKLDLMTEVSELKLKLVGMEKEQREQEEKQRKAEELLQELRHLKIKVEELENERNQYEWKLKATKAEVAQLQEQVALKDAEIERLHSQLSRTAALHSESHTERDQEIQRLKMGMETLLLANEDKDRRIEELTGLLNQYRKVKEIVMVTQGPSERTLSINEEEPEGGFSKWNATNKDPEELFKQEMPPRCSSPTVGPPPLPQKSLETRAQKKLSCSLEDLRSESVDKCMDGNQPFPVLEPKDSPFLAEHKYPTLPGKLSGATPNGEAAKSPPTICQPDATGSSLLRLRDTESGWDDTAVVNDLSSTSSGTESGPQSPLTPDGKRNPKGIKKFWGKIRRTQSGNFYTDTLGMAEFRRGGLRATAGPRLSRTRDSKGQKSDANAPFAQWSTERVCAWLEDFGLAQYVIFARQWVSSGHTLLTATPQDMEKELGIKHPLHRKKLVLAVKAINTKQEEKSALLDHIWVTRWLDDIGLPQYKDQFHESRVDRRMLQYLTVNDLLFLKVTSQLHHLSIKCAIHVLHVNKFNPHCLHRRPADESNLSPSEVVQWSNHRVMEWLRSVDLAEYAPNLRGSGVHGGLIILEPRFTGDTLAMLLNIPPQKTLLRRHLTTKFNALIGPEAEQEKREKMASPAYTPLTTTAKVRPRKLGFSHFGNIRKKKFDESTDYICPMEPSDGVSDSHRVYSGYRGLSPLDAPELDGLDQVGQIS

SEQ ID NO: 39927 - protein, 108 aa, Homo sapiens
MGVLAREAPHLEKQPAAGPQRVLPGEKYYSSVPEEGGATHVYRYHRGESKLHMCLDIGNGQAENISKDLYIEVYPGTYSVTVGSNDLTKKTHVVAVDSGQSVDLVFPV

SEQ ID NO: 39928 - protein, 1025 aa, Homo sapiens
MDPALREAAERQLNEAHKSLNFVSTLLQITMSEQLDLPVRQAGVIYLKNMITQYWPDRETAPGDISPYTIPEEDRHCIRENIVEAIIHSPELIRVQLTTCIHHIIKHDYPSRWTAIVDKIGFYLQSDNSACWLGILLCLYQLVKNYEYKKPEERSPLVAAMQHFLPVLKDRFIQLLSDQSDQSVLIQKQIFKIFYALVQYTLPLELINQQNLTEWIEILKTVVNRDVPNETLQVEEDDRPELPWWKCKKWALHILARLFERYGSPGNVSKEYNEFAEVFLKAFAVGVQQVLLKVLYQYKEKQYMAPRVLQQTLNYINQGVSHALTWKNLKPHIQGIIQDVIFPLMCYTDADEELWQEDPYEYIRMKFDVFEDFISPTTAAQTLLFTACSKRKEVLQKTMGFCYQILTEPNADPRKKDGALHMIGSLAEILLKKKIYKDQMEYMLQNHVFPLFSSELGYMRARACWVLHYFCEVKFKSDQNLQTALELTRRCLIDDREMPVKVEAAIALQVLISNQEKAKEYITPFIRPVMQALLHIIRETENDDLTNVIQKMICEYSEEVTPIAVEMTQHLAMTFNQVIQTGPDEEGSDDKAVTAMGILNTIDTLLSVVEDHKEITQQLEGICLQVIGTVLQQHVLEFYEEIFSLAHSLTCQQVSPQMWQLLPLVFEVFQQDGFDYFTDMMPLLHNYVTVDTDTLLSDTKYLEMIYSMCKKVLTGVAGEDAECHAAKLLEVIILQCKGRGIDQCIPLFVEAALERLTREVKTSELRTMCLQVAIAALYYNPHLLLNTLENLRFPNNVEPVTNHFITQWLNDVDCFLGLHDRKMCVLGLCALIDMEQIPQVLNQVSGQILPAFILLFNGLKRAYACHAEHENDSDDDDEAEDDDETEELGSDEDDIDEDGQEYLEILAKQAGEDGDDEDWEEDDAEETALEGYSTIIDDEDNPVDEYQIFKAIFQTIQNRNPVWYQALTHGLNEEQRKQLQDIATLADQRRAAHESKMIEKHGGYKFSAPVVPSSFNFGGPAPGMN

SEQ ID NO: 39929 - protein, 168 aa, Homo sapiens [sequence omitted]

SEQ ID NO: 39930 - protein, 650 aa, Homo sapiens
MRTVGPRLDHERAKSLMDQYFARMCSLMLSKELPARIRFLLQDTVELREHHWVPRKAFLDNGPKTINQIRQDAVKDLGVFIPAPMAQGMRSDFFLEGPFMPPRMKMDRDPLGGLADMFGQMPGSGIGTGPGVIQDRFSPTMGRHRSNQLFNGHGGHIMPPTQSQFGEMGGKFMKSQGLSQLYHNQSQGLLSQLQGQSKDMPPRFSKKGQLNADEISLRPAQSFLMNKNQVPKLQPQITMIPPSAQPPRTQTPPLGQTPQLGLKTNPPLIQEKPAKTSKKPPPSKEELLKLTETVVTEYLNSGNANEAVNGVREMRAPKHFLPEMLSKVIILSLDRSDEDKEKASSLISLLKQEGIATSDNFMQAFLNVLDQCPKLEVDIPLVKSYLAQFAARAIISELVSISELAQPLESGTHFPLFLLCLQQLAKLQDREWLTELFQQSKVNMQKMLPEIDQNKDRMLEILEGKGLSFLFPLLKLEKELLKQIKLDPSPQTIYKWIKDNISPKLHVDKGFVNILMTSFLQYISSEVNPPSDETDSSSAPSKEQLEQEKQLLLSFKPVMQKFLHDHVDLQVSALYALQVHCYNSNFPKGMLLRFFVHFYDMEIIEEEAFLAWKEDITQEFPGKGKALFQVNQWLTWLETAEEEESEEEAD

SEQ ID NO: 39931 - protein, 1075 aa, Homo sapiens
MQIVDELSILPAMLQTNMGNPVTVVTATTGSKQNCTTGEGDYQLVQHEVLCSMKNTYEVLDFLGRGTFGQVVKCWKRGTNEIVAIKILKNHPSYARQGQIEVSILARLSTENADEYNFVRAYECFQHRNHTCLVFEMLEQNLYDFLKQNKFSPLPLKVIRPILQQVATALKKLKSLGLIHADLKPENIMLVDPVRQPYRVKVIDFGSASHVSKTVCSTYLQSRYYRAPEIILGLPFCEAIDMWSLGCVIAELFLGWPLYPGALEYDQIRYISQTQGLPGEQLLNVGTKSTRFFCKETDMSHSGWRLKTLEEHEAETGMKSKEARKYIFNSLDDVAHVNTVMDLEGSDLLAEKADRREFVSLLKKMLLIDADLRITPAETLNHPFVNMKHLLDFPHSNHVKSCFHIMDICKSHLNSCDTNNHNKTSLLRPVASSSTATLTANFTKIGTLRSQALTTSAHSVVHHGIPLQAGTAQFGCGDAFQQTLIICPPAIQGIPATHGKPTSYSIRVDNTVPLVTQAPAVQPLQIRPGVLSQTWSGRTQQMLVPAWQQVTPLAPATTTLTSESVAGSHRLGDWGKMISCSNHYNSVMPQPLLTNQITLSAPQPVSVGIAHVVWPQPATTKKNKQCQNRGILVKLMEWEPGREEINAFSWSNSLQNTNIPHSAFISPKIINGKDVEEVSCIETQDNQNSEGEARNCCETSIRQDSDSSVSDKQRQTIIIADSPSPAVSVITISSDTDEEETSQRHSLRECKGSLDCEACQSTLNIDRMCSLSSPDSTLSTSSSGQSSPSPCKRPNSMSDEEQESSCDTVDGSPTSDSSGHDSPFAESTFVEDTHENTELVSSADTETKPAVCSVVVPPVELENGLNADEHMANTDSICQPLIKGRSAPGRLNQPSAVGTRQQKLTSAFQQQHLNFSQVQHFGSGHQEWNGNFGHRRQQAYIPTSVTSNPFTLSHGSPNHTAVHAHLAGNTHLGGQPTLLPYPSSATLSSAAPVAHLLASPCTSRPMLQHPTYNISHPSGIVHQVPVGLNPRLLPSPTIHQTQYKPIFPPHSYIAASPAYTGFPLSPTKLSQYPYM

SEQ ID NO: 39932 - protein, 468 aa, Homo sapiens
METETAPLTLESLPTDPLLLILSFLDYRDLINCCYVSRRLSQLSSHDPLWRRHCKKYWLISEEEKTQKNQCWKSLFIDTYSDVGRYIDHYAAIKKAWDDLKKYLEPRCPRMVLSLKEGAREEDLDAVEAQIGCKLPDDYRCSYRIHNGQKLVVPGLLGSMALSNHYRSEDLLDVDTAAGGFQQRQGLKYCLPLTFCIHTGLSQYIAVEAAEGRNKNEVFYQCPDQMARNPAAIDMFIIGATFTDWFTSYVKNVVSGGFPIIRDQIFRYVHDPECVATTGDITVSVSTSFLPELSSVHPPHYFFTYRIRIEMSKDALPEKACQLDSRYWRITNAKGDVEEVQGPGVVGEFPIISPGRVYEYTSCTTFSTTSGYMEGYYTFHFLYFKDKIFNVAIPRFHMACPTFRVSIARLEMGPDEYEEMEEEEEEEEEEDEDDDSADMDESDEDDEEERRRRVFDVPIRRRRCSRLF

SEQ ID NO: 39933 - protein, 412 aa, Homo sapiens
METETAPLTLESLPTDPLLLILSFLDYRDLINCCYVSRRLSQLSSHDPLWRRHCKKYWLISEEEKTQKNQCWKSLFIDTYSDVGRYIDHYAAIKKAWDDLKKYLEPRCPRMVLSLKEGAREEDLDAVEAQIGCKLPDDYRCSYRIHNGQKLVVPGLLGSMALSNHYRSEDLLDVDTAAGGFQQRQGLKYCLPLTFCIHTGLSQYIAVEAAEGRNKNEVFYQCPDQMARNPAAIDMFIIGATFTDWFTSYVKNVVSGGFPIIRDQIFRYVHDPECVATTGDITVSVSTSFLPELSSVHPPHYFFTYRIRIEMSKDALPEKACQLDSRYWRITNAKGDVEEVQGPGVVGEFPIISPGRVYEYTSCTTFSTTSGYMEGYYTFHFLYFKDKIFNVAIPRFHMACPTFRVSIARLVS

SEQ ID NO: 39934 - protein, 965 aa, Homo sapiens
MNSRHNSWDTVNTVLPEDPEVADLFSRCPRLPELEEFPWTEGDVARVLRKGAGGRRLPQFSAEAVRRLAGLLRRALIRVAREAQRLSVLHAKCTRFEVQSAVRLVHSWALAESCALAAVKALSLYSMSAGDGLRRGKSARCGLTFSVGRFFRWMVDTRISVRIHEYAAISLTACMENLVEEIRARVMASHSPDGGGAGGGEVSAEALEMVINNDAELWGVLQPYEHLICGKNANGVLSLPAYFSPYNGGSLGHDERADAYAQLELRTLEQSLLATCVGSISELSDLVSRAMHHMQGRHPLCPGASPARQARQPPQPITWSPDALHTLYYFLRCPQMESMENPNLDPPRMTLNNERPFMLLPPLMEWMRVAITYAEHRRSLTVDSGDIRQAARLLLPGLDCEPRQLKPEHCFSSFRRLDARAATEKFNQDLGFRMLNCGRTDLINQAIEALGPDGVNTMDDQGMTPLMYACAAGDEAMVQMLIDAGANLDIQVPSNSPRHPSIHPDSRHWTSLTFAVLHGHISVVQLLLDAGAHVEGSAVNGGEDSYAETPLQLASAAGNYELVSLLLSRGADPLLSMLEAHGMGSSLHEDMNCFSHSAAHGHRNVLRKLLTQPQQAKADVLSLEEILAEGVEESDASSQGSGSEGPVRLSRTRTKALQEAMYYSAEHGYVDITMELRALGVPWKLHIWIESLRTSFSQSRYSVVQSLLRDFSSIREEEYNEELVTEGLQLMFDILKTSKNDSVIQQLATIFTHCYGSSPIPSIPEIRKTLPARLDPHFLNNKEMSDVTFLVEGKLFYAHKVLLVTASNRFKTLMTNKSEQDGDSSKTIEISDMKYHIFQMMMQYLYYGGTESMEIPTTDILELLSAASLFQLDALQRHCEILCSQTLSMESAVNTYKYAKIHNAPELALFCEGFFLKHMKALLEQDAFRQLIYGRSSKVQGLDPLQDLQNTLAERVHSVYITSRV

SEQ ID NO: 39935 - protein, 160 aa, Homo sapiens
MAGKRSGWSRAALLQLLLGVNLVVMPPTRARSLRFVTLLYRHGDRSPVKTYPKDPYQEEEWPQGFGQLTKEGMLQHWELGQALRQRYHGFLNTSYHRQEVYVRSTDFDRTLMSAEANLAGLFPPNGMQRFNPNISWQPIPVHTVPITEDRVRVASPSLGW

SEQ ID NO: 39936 - protein, 122 aa, Homo sapiens
MAGKRSGWSRAALLQLLLGVNLVVMPPTRARSLRFVTLLYRHGDRSPVKTYPKDPYQEEEWPQGFGQLTKEGMLQHWELGQALRQRYHGFLNTSYHRQEVRLGAPEARGTRYAALIFCPQGA

SEQ ID NO: 39937 - protein, 1520 aa, Homo sapiens
MSLRDDTSFVFTLTDKDTGVTRYGICVNFYRSFQKRISKEKGEGGAGSRGKEGTHATCASEEGGTESSESGSSLQPLSADSTPDVNQSPRGKRRAKAGSRSRNSTLTSLCVLSHYPFFSTFRECLYTLKRLVDCCSERLLGKKLGIPRGVQRDTMWRIFTGSLLVEEKSSALLHDLREIEAWIYRLLRSPVPVSGQKRVDIEVLPQELQPALTFALPDPSRFTLVDFPLHLPLELLGVDACLQVLTCILLEHKVVLQSRDYNALSMSVMAFVAMIYPLEYMFPVIPLLPTCMASAEQLLLAPTPYIIGVPASFFLYKLDFKMPDDVWLVDLDSNRVIAPTNAEVLPILPEPESLELKKHLKQALASMSLNTQPILNLEKFHEGQEIPLLLGRPSNDLQSTPSTEFNPLIYGNDVDSVDVATRVAMVRFFNSANVLQGFQMHTRTLRLFPRPVVAFQAGSFLASRPRQTPFAEKLARTQAVEYFGEWILNPTNYAFQRIHNNMFDPALIGDKPKWYAHQLQPIHYRVYDSNSQLAEALSVPPERDSDSEPTDDSGSDSMDYDDSSSSYSSLGDFVSEMMKCDINGDTPNVDPLTHAALGDASEVEIDELQNQKEAEEPGPDSENSQENPPLRSSSSTTASSSPSTVIHGANSEPADSTEMDDKAAVGVSKPLPSVPPSIGKSNVDRRQAEIGEGSVRRRIYDNPYFEPQYGFPPEEDEDEQGESYTPRFSQHVSGNRAQKLLRPNSLRLASDSDAESDSRASSPNSTVSNTSTEGFGGIMSFASSLYRNHSTSFSLSNLTLPTKGAREKATPFPSLKGNRRALVDQKSSVIKHSPTVKREPPSPQGRSSNSSENQQFLKEVVHSVLDGQGVGWLNMKKVRRLLESEQLRVFVLSKLNRMVQSEDDARQDIIPDVEISRKVYKGMLDLLKCTVLSLEQSYAHAGLGGMASIFGLLEIAQTHYYSKEPDKRKRSPTESVNTPVGKDPGLAGRGDPKAMAQLRVPQLGPRAPSATGKGPKELDTRSLKEENFIASIGPEVIKPVFDLGETEEKKSQISADSGVSLTSSSQRTDQDSVIGVSPAVMIRSSSQDSEVSTVVSNSSGETLGADSDLSSNAGDGPGGEGSVHLASSRGTLSDSEIETNSATSTIFGKAHSLKPSIKEKLAGSPIRTSEDVSQRVYLYEGLLGKERSTLWDQMQFWEDAFLDAVMLEREGMGMDQGPQEMIDRYLSLGEHDRKRLEDDEDRLLATLLHNLISYMLLMKVNKNDIRKKVRRLMGKSHIGLVYSQQINEVLDQLANLNGRDLSIWSSGSRHMKKQTFVVHAGTDTNGDIFFMEVCDDCVVLRSNIGTVYERWWYEKLINMTYCPKTKVLCLWRRNGSETQLNKFYTKKCRELYYCVKDSMERAAARQQSIKPGPELGGEFPVQDLKTGEGGLLQVTLEGINLKFMHNQVFIELNHIKKCNTVRGVFVLEEFVPEIKEVVSHKYKTPMAHEICYSVLCLFSYVAAVHSSEEDLRTPPRPVSS

SEQ ID NO: 39938 - protein, 530 aa, Homo sapiens
MTTRPTAVKATGGLCLLGAYADSDDDDNDVSEKLAQSKETNGNQSTDIDSTLANFLAEIDAITAPQPAAPVGASAPPPTPPRPEPKEAATSTLSSSTSNGTDSTQTSGWQYDTQCSLAGVGIEMGDWQEVWDENTGCYYYWNTQTNEVTWELPQYLATQVQGLQHYQPSSVPGAETSFVVNTDIYSKEKTISVSSSKSGPVIAKREVKKEVNEGIQALSNSEEEKKGVAASLLAPLLPEGIKEEEERWRRKVICKEEPVSEVKETSTTVEEATTIVKPQEIMLDNIEDPSQEDLCSVVQSGESEEEEEQDTLELELVLERKKAELRALEEGDGSVSGSSPRSDISQPASQDGMRRLMSKRGKWKMFVRATSPESTSRSSSKTGRDTPENGETAIGAENSEKIDENSDKEMEVEESPEKIKVQTTPKVEEEQDLKFQIGELANTLTSKFEFLGINRQSISNFHVLLLQTETRIADWREGALNGNYLKRKLQDAAEQLKQYEINATPKGWSCHWDRYALFSPFHLSPLTSQT

SEQ ID NO: 39939 - protein, 72 aa, Homo sapiens
MQSIFTDIGKVDFTDPCNYQLIPAVPGISPNSTASTAWLSSDGEALFALPCASGGIFVLKLPPYDIPGKNGN

SEQ ID NO: 39940 - protein, 354 aa, Homo sapiens
MLISEEEIPFKDDPRDETYKPHLERETPKPRRKSGKVKEEKEKKEIKVEVEVEVKEEENEIREDEEPPRKRGRRRKDDKSPRLPKRRKKPPIQYVRCEMEGCGTVLAHPRYLQHHIKYQHLLKKKYVCPHPSCGRLFRLQKQLLRHAKHHTDQRDYICEYCARAFKSSHNLAVHRMIHTGEKPLQCEICGFTCRQKASLNWHMKKHDADSFYQFSCNICGKKFEKKDSVVAHKAKSHPEVLIAEALAANAGALITSTDILGTNPESLTQPSDGQGLPLLPEPLGNSTSGECLLLEAEGMSKSYCSGTERVSLMADGKIFVGSGSSGGTEGLVMNSDILGATTEVLIEDSDSAGP

SEQ ID NO: 39941 - protein, 1020 aa, Homo sapiens [sequence omitted]

SEQ ID NO: 39942 - protein, 1019 aa, Homo sapiens [sequence omitted]

SEQ ID NO: 39943 - protein, 71 aa, Homo sapiens [sequence omitted]

SEQ ID NO: 39944 - protein, 301 aa, Homo sapiens
MEVLAWLLIYLLGPGWVPSALAAFILAISQAQSWCLQHDLGHASIFKKSWWNHVAQKFVMGQLKGFSAHWWNFRHFQHHAKPNIFHKDPDVTVAPVFLLGESSVEYGKKKRRYLPYNQQHLYFFLIGPPLLTLVNFEVENLAYMLVCMQWADLLWAASFYARFFLSYLPFYGVPGVLLFFVAVRVLESHWFVWITQMNHIPKEIGHEKHRDWVSSQLAATCNVEPSLFTNWFSGHLNFQIEHHLFPRMPRHNYSRVAPLVKSLCAKHGLSYEVKPFLTALVDIVRSLKKSGDIWLDAYLHQ

SEQ ID NO: 39945 - protein, 317 aa, Homo sapiens [sequence omitted]

SEQ ID NO: 39946 - protein, 129 aa, Homo sapiens
MRWTRGVSVWPVGLVGGLRFEGPQVQDGRVVGFHTAWEPSRPFPVDMAGFAVALPLLLDKPNAQFDSTAPRGHLESSLLSHLVDPKDLEPRAANCTRVLVWHTRTEKPKMKQEEQLQRQGRGSDPAIEV

SEQ ID NO: 39947 - protein, 131 aa, Homo sapiens
MVSAIGRSSLRQGVVRPRGNSLRLRGAPVGAPLAVQAAMDSLRKMLISVAMLGAGAGVGYALLVIVTPGERRKQEMLKEMPLQDPRSREEAARTQQLLLATLQEAATTQENVAWRKNWMVGGEGGAGGRSP

SEQ ID NO: 39948 - protein, 71 aa, Homo sapiens
MVARLGRGSGRFAHPRAGGDWREAAVGCRALRRAWGVAVSVSELCSRRRGETREAIVATLRLLVSSQAVRP

SEQ ID NO: 39949 - protein, 353 aa, Homo sapiens [sequence omitted]

SEQ ID NO: 39950 - protein, 280 aa, Homo sapiens [sequence omitted]

SEQ ID NO: 39951 - protein, 112 aa, Homo sapiens
MLRKSVETRDWLSTLEPRNVRAVMKRVVEDTTAIDVQVGLLYEEGVRKAQSSDSSKRTFSVYSSSRQQGRYAPSYTPSAPMDTNLLSNIQKLFSERIDVFSPVEFNKVRLPT

SEQ ID NO: 39952 - protein, 558 aa, Homo sapiens [sequence omitted]

SEQ ID NO: 39953 - protein, 187 aa, Homo sapiens
MAALGKEELVRRLRREEAARLAALVQRGRLMQEVNRQLQGHLGEIRELKQLNRRLQAENRELRDLCCFLDSERQRGRRAARQWQLFGTQASRAVREDLGGCWQKLAELEGRQEELLRENLALKELCLALGEEWGPRGGPSGAGGSGAGPAPELALPPCGPRDLGDGSSSTGSVGSPDQLPLACSPDD

SEQ ID NO: 39954 - protein, 813 aa, Homo sapiens
MSAQLPGIPMPPPPLGLPPLQPPPPPPPPPPGLGLGFPMAHPPNLGPPPPLRVGEPVALSEEERLKLAQQQAALLMQQEERAKQQGDHSLKEHELLEQQKRAAVLLEQERQQEIAKMGTPVPRPPQDMGQIGVRTPLGPRVAAPVGPVGPTPTVLPMGAPVPRPRGPPPPPGDENREMDDPSVGPKIPQALEKILQLKESRQEEMNSQQEEEEMETDARSSLGQSASETEEDTVSVSKKEKNRKRRNRKKKKKPQRVRGVSSESSGDREKDSTRSRGSDSPAADVEIEYVTEEPEIYEPNFIFFKRIFEAFKLTDDVKKEKEKEPEKLDKLENSAAPKKKGFEEEHKDSDDDSSDDEQEKKPEAPKLSKKKLRRMNRFTVAELKQLVARPDVVEMHDVTAQDPKLLVHLKATRNSVPVPRHWCFKRKYLQGKRGIEKPPFELPDFIKRTGIQEMREALQEKEEQKTMKSKMREKVRPKMGKIDIDYQKLHDAFFKWQTKPKLTIHGDLYYEGKEFETRLKEKKPGDLSDELRISLGMPVGPNAHKVPPPWLIAMQRYGPPPSYPNLKIPGLNSPIPESCSFGYHAGGWGKPPVDETGKPLYGDVFGTNAAEFQTKTEEEEIDRTPWGELEPSDEESSEEEEEEESDEDKPDETGFITPADSGLITPGGFSSVPAGMETPELIELRKKKIEEAMDGSETPQLFTVLPEKRTATVGGAMMGSTHIYDMSTVMSRKGPAPELQGVEVALAPEELELDPMAMTQKYEEHVREQQAQVEKEDFSDMVAEHAAKQKQKKRKAQPQDSRGGSKKYKEFKF

SEQ ID NO: 39955 - protein, 619 aa, Homo sapiens
MVFPREEKLSQDEIVLGTKAVIQGLETLRGEHRALLAPLVAPEAGEAEPGSQERCILLRRSLEAIELGLGEAQVILALSSHLGAVESEKQKLRAQVRRLVQENQWLREELAGTQQKLQRSEQAVAQLEEEKQHLLFMSQIRKLDEDASPNEEKGDVPKDTLDDLFPNEDEQSPAPSPGGGDVSGQHGGYEIPARLRTLHNLVIQYASQGRYEVAVPLCKQALEDLEKTSGHDHPDVATMLNILALVYRDQNKYKEAAHLLNDALAIREKTLGKDHPAVAATLNNLAVLYGKRGKYKEAEPLCKRALEIREKVLGKFHPDVAKQLSNLALLCQNQGKAEEVEYYYRRALEIYATRLGPDDPNVAKTKNNLASCYLKQGKYQDAETLYKEILTRAHEKEFGSVNGDNKPIWMHAEEREESKDKRRDSAPYGEYGSWYKACKVDSPTVNTTLRSLGALYRRQGKLEAAHTLEDCASRNRKQGLDPASQTKVVELLKDGSGRRGDRRSSRDMAGGAGPRSESDLEDVGPTAEWNGDGSGSLRRSGSFGKLRDALRRSSEMLVKKLQGGTPQEPPNPRMKRASSLNFLNKSVEEPTQPGGTGLSDSRTLSSSSMDLSRRSSLVG

SEQ ID NO: 39956 - protein, 673 aa, Homo sapiens [sequence omitted]

SEQ ID NO: 39957 - protein, 34 aa, Homo sapiens
MGRKRLITDSYPVVKRREGPAGHSKGELAPELGL

SEQ ID NO: 39958 - protein, 588 aa, Homo sapiens [sequence omitted]

SEQ ID NO: 39959 - protein, 876 aa, Homo sapiens
MVVNGRRNGGKLSNDHQQNQSKLQHTGKDTLKAGKNAVERRSNRCNGNSGFEGQSRYVPSSGMSAKELCENDDLATSLVLDPYLGFQTHKMNTSAFPSRSSRHFSKSDSFSHNNPVRFRPIKGRQEELKEVIERFKKDEHLEKAFKCLTSGEWARHYFLNKNKMQEKLFKEHVFIYLRMFATDSGFEILPCNRYSSEQNGAKIVATKEWKRNDKIELLVGCIAELSEIEENMLLRHGENDFSVMYSTRKNCAQLWLGPAAFINHDCRPNCKFVSTGRDTACVKALRDIEPGEEISCYYGDGFFGENNEFCECYTCERRGTGAFKSRVGLPAPAPVINSKYGLRETDKRLNRLKKLGDSSKNSDSQSVSSNTDADTTQEKNNATSNRKSSVGVKKNSKSRTLTRQSMSRIPASSNSTSSKLTHINNSRVPKKLKKPAKPLLSKIKLRNHCKRLEQKNASRKLEMGNLVLKEPKVVLYKNLPIKKDKEPEGPAQAAVASGCLTRHAAREHRQNPVRGAHSQGESSPCTYITRRSVRTRTNLKEASDIKLEPNTLNGYKSSVTEPCPDSGEQLQPAPVLQEEELAHETAQKGEAKCHKSDTGMSKKKSRQGKLVKQFAKIEESTPVHDSPGKDDAVPDLMGPHSDQGEHSGTVGVPVSYTDCAPSPVGCSVVTSDSFKTKDSFRTAKSKKKRRITRYDAQLILENNSGIPKLTLRRRHDSSSKTNDQENDGMNSSKISIKLSKDHDNDNNLYVAKLNNGFNSGSGSSSTKLKIQLKRDEENRGSYTEGLHENGVCCSDPLSLLESRMEVDDYSQYEEESTDDSSSSEGDEEEDDYDDDFEDDFIPLPPAKRLRLIVGKDSIDIDISSRRREDQSLRLNA

SEQ ID NO: 39960 - protein, 430 aa, Homo sapiens
MAEPQAESEPLLGGARGGGGDWPAGLTTYRSIQVGPGAAARWDLCIDQAVVFIEDAIQGYLFGWAHFQKNLWLLGYLVVLVVSLVDWTVSLSLVCHEPLRIRRLLRPFFLLQNSSMMKKTLKCIRWSLPEMASVGLLLAIHLCLFTMFGMLLFAGGKQDDGQDRERLTYFQNLPESLTSLLVLLTTANNPDVMIPAYSKNRAYAIFFIVFTVIGSLFLMNLLTAIIYSQFRGYLMKSLQTSLFRRRLGTRAAFEVLSSMVGEGGAFPQAVGVKPQNLLQVLQKVQLDSSHKQAMMEKVRSYGSVLLSAEEFQKLFNELDRSVVKEHPPRPEYQSPFLQSAQFLFGHYYFDYLGNLIALANLVSICVFLVLDADVLPAERDDFILGILNCVFIVYYLLEMLLKVFALGLRGYLSYPSNVFDGLLTVVLLVK

SEQ ID NO: 39961 - protein, 682 aa, Homo sapiens
MWLYRRYYSNVCQRTLSFTIFLILFLAFIETPSSLTSTADVRYRAAPWEPPCGLTESVEVLCLLVFAADLSVKGYLFGWAHFQKNLWLLGYLVVLVVSLVDWTVSLSLVCHEPLRIRRLLRPFFLLQNSSMMKKTLKCIRWSLPEMASVGLLLAIHLCLFTMFGMLLFAGGKQDDGQDRERLTYFQNLPESLTSLLVLLTTANNPDVMIPAYSKNRAYAIFFIVFTVIGSLFLMNLLTAIIYSQFRGYLMKSLQTSLFRRRLGTRAAFEVLSSMVGEGGAFPQAVGVKPQNLLQVLQKVQLDSSHKQAMMEKVRSYGSVLLSAEEFQKLFNELDRSVVKEHPPRPEYQSPFLQSAQFLFGHYYFDYLGNLIALANLVSICVFLVLDADVLPAERDDFILGILNCVFIVYYLLEMLLKVFALGLRGYLSYPSNVFDGLLTVVLLVLEISTLAVYRLPHPGWRPEMVGLLSLWDMTRMLNMLIVFRFLRIIPSMKLMAVVASTVLGLVQNMRAFGGILVVVYYVFAIIGINLFRGVIVALPGNSSLAPANGSAPCGSFEQLEYWANNFDDFAAALVTLWNLMVVNNWQVFLDAYRRYSGPWSKIYFVLWWLVSSVIWVNLFLALILENFLHKWDPRSHLQPLAGTPEATYQMTVELLFRDILEEPGEDELTERLSQHPHLWLCR

SEQ ID NO: 39962 - protein, 675 aa, Homo sapiens
MADGHTDSYSTSAVLRRPQKGRLAALRDEPSKVQTLNEQDWERAQQASVLANVAQAFESDADVSDGEDDRDTLLSSVDLLSPSGQADAHTLAMMLQEQLDAINKEIRLIQEEKENTEQRAEEIESRVGSGSLDNLGRFRSMSSIPPYPASSLASSSPPGSGRSTPRRIPHSPAREVDRLGVMTLPSDLRKHRRKLPPSREEVRDDKTTIKCETSPPSSPRALRLDRLHKGALHTVSHEDIRDIRNSTGSQDGPVSNPSSSNSSQDSLHKAPKKKGIKSSIGRLFGKKEKGRPGQTGKEALGQAGVSETDNSSQDALGLSKLGGQAEKNRKLQKKHELLEEARRQGLPFAQWDGPTVVVWLELWVGMPAWYVAACRANVKSGAIMSALSDTEIQREIGISNPLHRLKLRLAIQEIMSLTSPSAPPTSRTTLAYGDMNHEWIGNEWLPSLGLPQYRSYFMECLVDARMLDHLTKKDLRGQLKMVDSFHRNSFQCGIMCLRRLNYDRKELERKREESQSEIKDVLVWSNDRVIRWILSIGLKEYANNLIESGVHGALLALDETFDFSALALLLQIPTQNTQARAVLEREFNNLLVMGTDRRFDEDDDKSFRRAPSWRKKFRPKDIRGLAAGSAETLPANFRVTSSMSSPSMQPKKMQMDGNVSGTQRLDSATVRTYSC

SEQ ID NO: 39963 - protein, 202 aa, Homo sapiens
MIIAPCSLELLGSSNPPASASGVAGITGGILLSISRPYKTKPTHGIGKYKHLIKAEEPKKKKGKVEVRAINLGTDYEYGVLNIHLTAYDMTLAESYAQYVHNLCNSLSIKVEESYAMPTKTIEVLQLQDQGSKMLLDSVLTTHERVVQISGLSATFAEIFLEIIQSSLPEGVRLSVKEHTEEDFKGRFKARPELEELLAKLK

SEQ ID NO: 39964 - protein, 1240 aa, Homo sapiens
MSGPNSSSEWSIEGRRLVPLMPRLVPQTAFTVTANAVANAAIQHNASLPVPAETGSKEVVCYSYTSTTSTPTSTPVPSGSIATVKSPRPASPASNVVVLPSGSTVYVKSVSCSDEDEKPRKRRRTNSSSSSPVVLKEVPKAVVPVSKTITVPVSGSPKMSNIMQSIANSLPPHMSPVKITFTKPSTQTTNTTTQKVIIVTTSPSSTFVPNILSKSHNYAAVTKLVPTSVIASTTQKPPVVITASQSSLVSNSSSGSSSSTPSPIPNTVAVTAVVSSTPSVVMSTVAQGVSTSAIKMASTRLPSPKSLVSAPTQILAQFPKQHQQSPKQQLYQVQQQTQQQVAQPSPVSHQQQPQQSPLPPGIKPTIQIKQESGVKIITQQVQPSKILPKPVTATLPTSSNSPIMVVSSNGAIMTTKLVTTPTGTQATYTRPTVSPSIGRMAATPGAATYVKTTSGSIITVVPKSLATLGGKIISSNIVSGTTTKITTIPMTSKPNVIVVQKTTGKGTTIQGLPGKNVVTTLLNAGGEKTIQTVPTGAKPAILTATRPITKMIVTQPKGIGSTVQPAAKIIPTKIVYGQQGKTQVLIKPKPVTFQATVVSEQTRQLVTETLQQASRVAEAGNSSIQEGKEEPQNYTDSSSSSTESSQSSQDSQPVVHVIASRRQDWSEHEIAMETSPTIIYQDVSSESQSATSTIKALLELQQTTVKEKLESKPRQPTIDLSQMAVPIQMTQEKRHSPESPSIAVVESELVAEYITTERTDEGTEVAFPLLVSHRSQPQQPSQPQRTLLQHVAQSQTATQTSVVVKSIPASSPGAITHIMQQALSSHTAFTKHSEELGTEEGEVEEMDTLDPQTGLFYRSALTQSQSAKQQKLSQPPLEQTQLQVKTLQCFQTKQKQTIHLQADQLQHKLPQMPQLSIRHQKLTPLQQEQAQPKPDVQHTQHPMVAKDRQLPTLMAQPPQTVVQVLAVKTTQQLPKLQQAPNQPKIYVQPQTPQSQMSLPASSEKQTASQVEQPIITQGSSVTKITFEGRQPPTVTKITGGSSVPKLTSPVTSISPIQASEKTAVSDILKMSLMEAQIDTNVEHMIVDPPKKALATSMLTGEAGSLPSTHMVVAGMANSTPQQQKCRESCSSPSTVGSSLTTRKIDPPAVPATGQFMRIQNVGQKKAEESPAEIIIQAIPQYAIPCHSSSNVVVEPSGLLELNNFTSQQLDDEETAMEQDIDSSTEDGTEPSPSQSSAERS

SEQ ID NO: 39965 - protein, 523 aa, Homo sapiens [sequence omitted]

SEQ ID NO: 39966 - protein, 1431 aa, Homo sapiens [sequence omitted]

SEQ ID NO: 39967 - protein, 655 aa, Homo sapiens
MREPLESSNTKSFHSAVEIKNRSQHELPCFQHHGIDTPTSLQKRSACCPPSLLRLEETASSSQDGDPQIWDDLPFSESLNKFLAVLESEIAVTQADVSSRKHHVDNDIDKFHADHSRLSVTPQRTTGALHTPPIALRSSQVIVKANCSKDDFLFNCKGNLSPSVEKESQPDNKVEAVSVNHNGRDMSEYFLPNPYLSALSSSSKDLETIVTLKKTIRISPHRESDHSSLNNKYLNGCGEISVSEMNEKLTTLCYRKYNDVSDLCKLENKQYCRWSKNQDDSFTICRKLTYPLETLCNSPNRSTNTLKEMPWGHINNNVTQSYSIGYEGSYDASADLFDDIAKEMDIATEITKKSQDILLKWGTSLAESHPSESDFSLRSLSEDFIQPSQKLSLQSLSDSRHSRTCSPTPHFQSDSEYNFENSQDFVPCSQSTPISGFHQTRIHGINRAFKKPVFYSDLDGNYEKIRIFPENDKQQASPSCPKNIKTPSQKIRSPIVSGVSQPDVFNHYPFAECHETDSDEWVPPTTQKIFPSDMLGFQGIGLGKCLAAYHFPDQQELPRKKLKHIRQGTNKGLIKKKLKNMLAAVVTKKKTHKYNCKSSGWISKCPDIQVLAAPQLHPILGPDSCSEVKCCLPFSEKGPPSVCETRSAWSPELFS

SEQ ID NO: 39968 - protein, 1517 aa, Homo sapiens
MLTILAEENLPFAKEIVSLIEAQTAKAPSSEKLPVMYLMDSIVKNVGREYLTAFTKNLVATFICVFEKVDENTRKSLFKLRSTWDEIFPLKKLYALDVRVNSLDPAWPIKPLPPNVNTSSIHVNPKFLNKSPEEPSTPGTVVSSPSISTPPIVPDIQKNLTQEQLIRQQLLAKQKQLLELQQKKLELELEQAKAQLAVSLSVQQETSNLGPGSAPSKLHVSQIPPMAVKAPHQVPVQSEKSRPGPSLQIQDLKGTNRDPRLNRISQHSHGKDQSHRKEFLMNTLNQSDTKTSKTIPSEKLNSSKQEKSKSGEKITKKELDQLDSKSKSKSKSPSPLKNKLSHTKDLKNQESESMRLSDMNKRDPRLKKHLQDKTDGKDDDVKEKRKTAEKKDKDEHMKSSEHRLAGSRNKIINGIVQKQDTITEESEKQGTKPGRSSTRKRSRSRSPKSRSPIIHSPKRRDRRSPKRRQRSMSPTSTPKAGKIRQSGAKQSHMEEFTPPSREDRNAKRSTKQDIRDPRRMKKTEEERPQETTNQHSTKSGTEPKENVENWQSSKSAKRWKSGWEENKSLQQVDEHSKPPHLRHRESWSSTKGILSPRAPKQQQHRLSVDANLQIPKELTLASKRELLQKTSERLASGEITQDDFLVVVHQIRQLFQYQEGVREEQRSPFNDRFPLKRPRYEDSDKPFVDSPASRFAGLDTNQRLTALAEDRPLFDGPSRPSVARDGPTKMIFEGPNKLSPRIDGPPTPASLRFDGSPGQMGGGGPLRFEGPQGQLGGGCPLRFEGPPGPVGTPLRFEGPIGQAGGGGFRFEGSPGLRFEGSPGGLRFEGPGGQPVGGLRFEGHRGQPVGGLRFEGPHGQPVGGLRFDNPRGQPVGGLRFEGGHGPSGAAIRFDGPHGQPGGGIRFEGPLLQQGVGMRFEGPHGQSVAGLRFEGQHNQLGGNLRFEGPHGQPGVGIRFEGPLVQQGGGMRFEGPSVPGGGLRIEGPLGQGGPRFEGCHALRFDGQPGQPSLLPRFDGLHGQPGPRFERTPGQPGPQRFDGPPGQQVQPRFDGVPQRFDGPQHQQASRFDIPLGLQGTRFDNHPSQRLESVSFNQTGPYNDPPGNAFNAPSQGLQFQRHEQIFDSPQGPNFNGPHGPGNQSFSNPLNRASGHYFDEKNLQSSQFGNFGNIPAPMTVGNIQASQQVLSGVAQPVAFGQGQQFLPVHPQNPGFVQNPSGALPKAYPDNHLSQVDVNELFSKLLKTGILKLSQTDSATTQVSEVTAQPPPEEEEDQNEDQDVPDLTNFTVEELKQRYDSVINRLYTGIQCYSCGMRFTTSQTDVYADHLDWHYRQNRTEKDVSRKVTHRRWYYSLTDWIEFEEIADLEERAKSQFFEKVHEEVVLKTQEAAKEKEFQSVPAGPAGAVESCEICQEQFEQYWDEEEEEWHLKNAIRVDGKIYHPSCYEDYQNTSSFDCTPSPSKTPVENPLNIMLNIVKNELQEPCDSPKVKEERIDTPPACTEESIATPSEIKTENDTVESV

SEQ ID NO: 39969 - protein, 147 aa, Homo sapiens [sequence omitted]

SEQ ID NO: 39970 - protein, 70 aa, Homo sapiens
MAASMHGQPSPSLEDAKLRRPMVIEIIEKNFDYLRKEMTQNIYQMATFGTTAGFSGIFSNFLFRRCFKII

SEQ ID NO: 39971 - protein, 237 aa, Homo sapiens
MTAPAIDIFSTPSSSNSTSKLPNDLLDLQQPTFHPSVHPMSTASQVASTWGGFTPSPVAQPHPSAGLNVDFESVFGNKSTNVIVDSGGGLLKPTVASQNQNLPVAKLPPSKLVSDDLDSSLANLVGNLGIGNGTTKNDVNWSQPGEKKLTGGSNWQPKVAPTTAWNAATMNGMHFPQYAPPVMAYPATTPTGMIGYGIPPQMGSVPVMTQPTLIYSQPVMRPPNPFGPVSGAQIQFM

SEQ ID NO: 39972 - protein, 270 aa, Homo sapiens
MITLKVDNLTYRTSPDSLRRVFEKYGRVGDVYIPREPHTKAPRGFAFVRFHDRRDAQDAEAAMDGAELDGRELRVQVARYGRRDLPRSRQGEPRGRSRGGGYGRRSRSYGRRSRSPRRRHRSRSRGPSCSRSRSRSRYRGSRYSRSPYSRSPYSRSRYSRSPYSRSRYRESRYGGSHYSSSGYSNSRYSRYHSSRSHSKSGSSTSSRSASTSKSSSARRSKSSSVSRSRSRSRSSSMTRSPPRVSKRKSKSRSRSKRPPKSPEEEGQMSS

SEQ ID NO: 39973 - protein, 439 aa, Homo sapiens
MLAFLVLSTGMFCSSSAFLPSSFCMYTTLIAMTGWYMDKTSIAVLGVAAGAILGWPFSAALGLPIAFDLLVMKHRWKSFFHWSLMALILFLVPVVVIDSYYYGKLVIAPLNIVLYNVFTPHGPDLYGTEPWYFYLINGFLNFNVAFALALLVLPLTSLMEYLLQRFHVQNLGHPYWLTLAPMYIWFIIFFIQPHKEERFLFPVYPLICLCGAVALSALQKCYHFVFQRYRLEHYTVTSNWLALGTVFLFGLLSFSRSVALFRGYHGPLDLYPEFYRIATDPTIHTVPEGRPVNVCVGKEWYRFPSSFLLPDNWQLQFIPSEFRGQLPKPFAEGPLATRIVPTDMNDQNLEEPSRYIDISKCHYLVDLDTMRETPREPKYSSNKEEWISLAYRPFLDASRSQFVAQAGLKLLGSSNPPTSASQNIGITGLSHRAWPLTSP

SEQ ID NO: 39974 - protein, 16 aa, Homo sapiens
MRAGTANCRAMLSLPP

SEQ ID NO: 39975 - protein, 338 aa, Homo sapiens
MNCYCNDMNREVVKTDSAATRIPELDFEIPAFSQKGALTTVEGLITRAISGLEQDQPARRANKDATAERIDEFIVKLKELKQVASPFTLIIDDPSGNSFVENPHAPQKDDALVITHYNRTRQQEEMLGLQVLQFSTNCPECNAPAQTNMKLVQIPHFKEVIIMATNCENCGHRTNEVKSGGAVEPLGTRITLHITDASDMTRDLLKSETCSVEIPELEFELGMAVLGGKFTTLEGLLKDIRELVTKNPFTLGDSSNPGQTERLQEFSQKMDQIIEGNMKAHFIMDDPAGNSYLQNVYAPEDDPEMKVERYKRTFDQNEELGLNDMKTEGYEAGLAPQR

SEQ ID NO: 39976 - protein, 1311 aa, Homo sapiens
MPARIGYYEIDRTIGKGNFAVVKRATHLVTKAKVAIKIIDKTQLDEENLKKIFREVQIMKMLCHPHIIRLYQVMETERMIYLVTEYASGGEIFDHLVAHGRMAEKEARRKFKQIVTAVYFCHCRNIVHRDLKAENLLLDANLNIKIADFGFSNLFTPGQLLKTWCGSPPYAAPELFEGKEYDGPKVDIWSLGVVLYVLVCGALPFDGSTLQNLRARVLSGKFRIPFFMSTECEHLIRHMLVLDPNKRLSMEQICKHKWMKLGDADPNFDRLIAECQQLKEERQVDPLNEDVLLAMEDMGLDKEQTLQSLRSDAYDHYSAIYSLLCDRHKRHKTLRLGALPSMPRALAFQAPVNIQAEQAGTAMNISVPQVQLINPENQIVEPDGTLNLDSDEGEEPSPEALVRYLSMRRHTVGVADPRTEVMEDLQKLLPGFPGVNPQAPFLQVAPNVNFMHNLLPMQNLQPTGQLEYKEQSLLQPPTLQLLNGMGPLGRRASDGGANIQLHAQQLLKRPRGPSPLVTMTPAVPAVTPVDEESSDGEPDQEAVQRYLANRSKRHTLAMTNPTAEIPPDLQRQLGQQPFRSRVWPPHLVPDQHRSTYKDSNTLHLPTERFSPVRRFSDGAASIQAFKAHLEKMGNNSSIKQLQQECEQLQKMYGGQIDERTLEKTQQQHMLYQQEQHHQILQQQIQDSICPPQPSPPLQAACENQPALLTHQLQRLRIQPSSPPPNHPNNHLFRQPSNSPPPMSSAMIQPHGAASSSQFQGLPSRSAIFQQQPENCSSPPNVALTCLGMQQPAQSQQVTIQVQEPVDMLSNMPGTAAGSSGRGISISPSAGQMQMQHRTNLMATLSYGHRPLSKQLSADSAEAHSLNVNRFSPANYDQAHLHPHLFSDQSRGSPSSYSPSTGVGFSPTQALKVPPLDQFPTFPPSAHQQPPHYTTSALQQALLSPTPPDYTRHQQVPHILQGLLSPRHSLTGHSDIRLPPTEFAQLIKRQQQQRQQQQQQQQQQEYQELFRHMNQGDAGSLAPSLGGQSMTERQALSYQNADSYHHHTSPQHLLQIRAQECVSQASSPTPPHGYAHQPALMHSESMEEDCSCEGAKDGFQDSKSSSTLTKGCHDSPLLLSTGGPGDPESLLGTVSHAQELGIHPYGHQPTAAFSKNKVPSREPVIGNCMDRSSPGQAVELPDHNGLGYPARPSVHEHHRPRALQRHHTIQNSDDAYVQLDNLPGMSLVAGKALSSARMSDAVLSQSSLMGSQQFQDGENEECGASLGGHEHPDLSDGSQHLNSSCYPSTCITDILLSYKHPEVSFSMEQAGV

SEQ ID NO: 39977 - protein, 54 aa, Homo sapiens
MEHSTFLSGLVLATLLSQAADTQALLRNDQVYQPLRDRDDAQYSHLGGNWARNK

SEQ ID NO: 39978 - protein, 140 aa, Homo sapiens
MADKVRRQRPRRRVCWALVAVLLADLLALSDTLAVMSVDLGSESMKVAIVKPGVPMEIVLNKESRRKTPVIVTLKENERFFGDSAASMAIKNPKATLRYFQHLLGKQADNPHVALYQARFPEHELTFDPQRQTVHFQISS

SEQ ID NO: 39979 - protein, 479 aa, Homo sapiens [sequence omitted]

SEQ ID NO: 39980 - protein, 415 aa, Homo sapiens [sequence omitted]

SEQ ID NO: 39981 - protein, 638 aa, Homo sapiens
MAAREELYSKVTPRRNRQQRPGTIKHGSALDVLLSMGFPRARAQKALASTGGRSVQAACDWLFSHVGDPFLDDPLPREYVLYLRPTGPLAQKLSDFWQQSKQICGKNKAHNIFPHITLCQFFMCEDSKVDALGEALQTTVSRWKCKFSAPLPLELYTSSNFIGLFVKEDSAEVLKKFAADFAAEAASKTEVHVEPHKKQLHVTLAYHFQASHLPTLEKLAQNIDVKLGCDWVATIFSRDIRFANHETLQVIYPYTPQNDDELELVPGDFIFMSPMEQTSTSEGWIYGTSLTTGCSGLLPENYITKADECSTWIFHGSYSILNTSSSNSLTFGDGVLERRPYEDQGLGETTPLTIICQPMQPLRVNSQPGPQKRCLFVCRHGERMDVVFGKYWLSQCFDAKGRYIRTNLNMPHSLPQRSGGFRDYEKDAPITVFGCMQARLVGEALLESNTIIDHVYCSPSLRCVQTAHNILKGLQQENHLKIRVEPGLFEWTKWVAGSTLPAWIPPSELAAANLSVDTTYRPHIPISKLVVSESYDTYISRSFQVTKEIISECKSKGNNILIVAHASSLEACTCQLQGLSPQNSKDFVQMVRKIPYLGFCSCEELGETGIWQLTDPPILPLTHGPTGGFNWRETLLQE

SEQ ID NO: 39982 - protein, 187 aa, Homo sapiens
MKCPDQKCLYTCQIKDGGVQPQFEIVPEDDPQNAIVSSSADACHAELLRTISTTMGKLMPNLLPAGADFFGFSHPAIHNLIQSCPGARKCINYQWVKFDVCKPGDGQLPEGLPENDAAMSFEAFQRQIFDEDQNDPLLPGSLDLPELQPAAFVSSYQPMYLTHEPLVDTHLQHLKSPSQGSPIQSSD

SEQ ID NO: 39983 - protein, 189 aa, Homo sapiens
MVAPGLVLGLVLPLILWADRSAGIGFRFASYINNDMVLQKEPAGAVIWGFGTPGATVTVTLRQGQETIMKKVTSVKAHSDTWMVVLDPMKPGGPFEVMAQQTLEKINFTLRVHDVLFGDVWLCSGQSNMQMTVLQVICRVSAIIHSVGDEEGKEGGIRGQQGEAGLFLFSEYHEPRYVLNALNEFINLT

SEQ ID NO: 39984 - protein, 551 aa, Homo sapiens
MEVCENHQHWHTVVKEACLTQGMTLYSYGMLLPCGVDQFHGTEYVCCPQTKIIGSVSKEEEEEDEEEEEEEDEEEDYDVYKSEFPTEADLEDFTEAAVDEDDEDEEEGEEVVEDRDYYYDTFKGDDYNEENPTEPGSDGTMSDKEITHDVKVPPTPLPTNDVDVYFETSADDNEHARFQKAKEQLEIRHRNRMDRVKKEWEEAELQAKNLPKAERQTLIQHFQAMVKALEKEAASEKQQLVETHLARVEAMLNDRRRMALENYLAALQSDPPRPHRILQALRRYVRAENKDRLHTIRHYQHVLAVDPEKAAQMKSQVMTHLHVIEERRNQSLSLLYKVPYVAQEIQEEIDELLQEQRADMDQFTASISETPVDVRVSSEESEEIPPFHPFHPFPALPENEDTQPELYHPMKKGSGVGEQDGGLIGAEEKVINSKNKVDENMVIDETLDVKEMIFNAERVGGLEEERESVGPLREDFSLSSSALIGLLVIAVAIATVIVISLVMLRKRQYGTISHGIVEVDPMLTPEERHLNKMQNHGYENPTYKYLEQMQI

SEQ ID NO: 39985 - protein, 963 aa, Homo sapiens
MAVGVLLGWLLVIHLLVNVWLLCLLSALLVVLGGWLGSSLAGVASGRLHLERFIPLATCPPCPEAERQLEREINRTIQMIIRDFVLSWYRSVSQEPAFEEEMEAAMKGLVQELRRRMSVMDSHAVAQSVLTLCGCHLQSYIQAKEATAGKNGPVEPSHLWEAYCRATAPHPAVHSPSAEVTYTRGVVNLLLQGLVPKPHLETRTGRHVVVELITCNVILPLISRLSDPDWIHLVLVGIFSKARDPAPCPASAPEQPSVPTSLPLIAEVEQLPEGRASPVAAPVFLSYSEPEGSAGPSPEVEEGHEAVEGDLGGMCEERKVGNNSSHFLQPNVRGPLFLCEDSELESPLSELGKETIMLMTPGSFLSDRIQDALCALESSQALEPKDGEASEGAEAEEGPGTETETGLPVSTLNSCPEIHIDTADKEIEQGDVTASVTALLEGPEKTCPSRPSCLEKDLTNDVSSLDPTLPPVLLSSSPPGPLSSATFSFEPLSSPDGPVIIQNLRITGTITAREHSGTGFHPYTLYTVKYETALDGENSSGLQQLAYHTVNRRYREFLNLQTRLEEKPDLRKFIKNVKGPKKLFPDLPLGNMDSDRVEARKSLLESFLKQLCAIPEIANSEEVQEFLALNTDARIAFVKKPFMVSRIDKMVVSAIVDTLKTAFPRSEPQSPTEELSEAETESKPQTEGKKASKSRLRFSSSKISPALSVTEAQDKILYCLQEGNVESETLSMSAMESFIEKQTKLLEMQPTKAPEKDPEQPPKGRVDSCVSDAAVPAQDPSNSDPGTETELADTALDLLLLLLTEQWKWLCTENMQKFLRLIFGTLVQRWLEVQVANLTSPQRWVQYLLLLQESIWPGGVLPKFPRPVRTQEQKLAAEKQALQSLMGVLPDLVVEILGVNKCRLSWGLVLESLQQPLINRHLIYCLGDIILEFLDLSASVEESAATTSASDTPGNSKRMGVSS

SEQ ID NO: 39986 - protein, 56 aa, Homo sapiens
MWLLTVPHSPVDASQKKTPPAFPESPAAVPPTTTGGPQTQLCIYTASHHSHSTGIT

SEQ ID NO: 39987 - protein, 301 aa, Homo sapiens
MLSVEKIIHCDLKPENIVLYQKGQASVKVIDFGSSCYEHQKVYTYIQSRFYRSPEVILGHPYDVAIDMWSLGCITAELYTGYPLFPGENEVEQLACIMEVLGLPPAGFIQTASRRQTFFDSKGFPKNITNNRGKKRYPDSKDLTMVLKTYDTSFLDFLRRCLVWEPSLRMTPDQALKHAWIHQSRNLKPQPRPQTLRKSNSFFPSETRKDKVQGCHHSSRKADEITKETTEKTKDSPTKHVQHSGDQQDCLQHGADTVQLPQLVDAPKKSEAAVGAEVSMTSPGQSKNFSLKNTNVLPPIV

SEQ ID NO: 39988 - protein, 300 aa, Homo sapiens
MLSVEKIIHCDLKPENIVLYQKGQASVKVIDFGSSCYEHQKVYTYIQSRFYRSPEVILGHPYDVAIDMWSLGCITAELYTGYPLFPGENEVEQLACIMEVLGLPPAGFIQTASRRQTFFDSKGFPKNITNNRGKKRYPDSKDLTMVLKTYDTSFLDFLRRCLVWEPSLRMTPDQALKHAWIHQSRNLKPQPRPQTLRKSNSFFPSETRKDKVQGCHHSSRKDEITKETTEKTKDSPTKHVQHSGDQQDCLQHGADTVQLPQLVDAPKKSEAAVGAEVSMTSPGQSKNFSLKNTNVLPPIV

SEQ ID NO: 39989 - protein, 124 aa, Homo sapiens
MFPFYSCWRTGLLLLLLAVAVRESWQTEEKTCDLVGEKGKESEKELALVKRLKPLFNKSFESTVGQGSDTYIYIFRVCREAGNHTSGAGLVQINKSNGKETVVGRLNETHIFNGSKKTPLPTID

SEQ ID NO: 39990 - protein, 148 aa, Homo sapiens [sequence omitted]

SEQ ID NO: 39991 - protein, 103 aa, Homo sapiens
MKDGVPEGAQLQGPVHRNPTYRPSRGPPRPRPAPAVGEAEDKENQQATSGPNQPSVRRGYRRPYNYRRRPRPPNAPSQDGKEAKAGEAPTENPAPPTQQSSAE

SEQ ID NO: 39992 - protein, 661 aa, Homo sapiens
MIGTQIVTERLVALLESGTEKVLLIDSRPFVEYNTSHILEAININCSKLMKRRLQQDKVLITELIQHSAKHKVDIDCSQKVVVYDQSSQDVASLSSDCFLTVLLGKLEKSFNSVHLLAGGFAEFSRCFPGLCEGKSTLVPTCISQPCLPVANIGPTRILPNLYLGCQRDVLNKELMQQNGIGYVLNASNTCPKPDFIPESHFLRVPVNDSFCEKILPWLDKSVDFIEKAKASNGCVLVHCLAGISRSATIAIAYIMKRMDMSLDEAYRFVKEKRPTISPNFNFLGQLLDYEKKIKNQTGASGPKSKLKLLHLEKPNEPVPAVSEGGQKSETPLSPPCADSATSEAAGQRPVHPASVPSVPSVQPSLLEDSPLVQALSGLHLSADRLEDSNKLKRSFSLDIKSVSYSASMAASLHGFSSSEDALEYYKPSTTLDGTNKLCQFSPVQELSEQTPETSPDKEEASIPKKLQTARPSDSQSKRLHSVRTSSSGTAQRSLLSPLHRSGSVEDNYHTSFLFGLSTSQQHLTKSAGLGLKGWHSDILAPQTSTPSLTSSWYFATESSHFYSASAIYGGSASYSAYSCSQLPTCGDQVYSVRRRQKPSDRADSRRSWHEESPFEKQFKRRSCQMEFGESIMSENRSREELGKVGSQSSFSGSMEIIEVS

SEQ ID NO: 39993 - protein, 183 aa, Homo sapiens
MDARQAEHPKPSACRNLFGPVDHEELTRDLEKHCRDMEEASQRKWNFDFQNHKPLEGKYEWQEVEKGSLPEFYYRPPRPPKGACKVPAQESQDVSGSRPAAPLIGAPANSEDTHLVDPKTDPSDSQTGLAEQCAGIRKRPATDDSSTQNKRANRTEENVSDGSPNAGSVEQTPKKPGLRRRQT

SEQ ID NO: 39994 - protein, 1253 aa, Homo sapiens [sequence omitted]

SEQ ID NO: 39995 - protein, 1252 aa, Homo sapiens
MRVSDRQQLEAVYKVKEELLKTDVKLLNGNHENGDLDPTSPLENMDYIKDKEEVNGIEEICFDPEGSKAEWKETPCILSVNVKNKQDDDLNCEPLSPHNITPEPVSKLPAEPVSGDPAPGDLDAGDPASGVLASGDSTSGDPTSSEPSSSDAASGDATSGDAPSGDVSPGDATSGDATADDLSSGDPTSSDPIPGEPVPVEPISGDCAADDIASSEITSVDLASGAPASTDPASDDLASGDLSSSELASDDLATGELASDELTSESTFDRTFEPKSVPVCEPVPEIDNIEPSSNKDDDFLEKNGADEKLEQIQSKDSLDEKNKADNNIDANEETLETDDTTICSDRPPENEKKVEEDIITELALGEDAISSSMEIDQGEKNEDETSADLVETINENVIEDNKSENILENTDSMETDEIIPILEKLAPSEDELTCFSKTSLLPIDETNPDLEEKMESSFGSPSKQESSESLPKEAFLVLSDEEDISGEKDESEVISQNETCSPEVESNEKDNKPEEEEQVIHEDDERPSEKNEFSRRKRSKSEDMDNVQSKRRRYMEEEYEAEFQVKITAKGDINQKLQKVIQWLLEEKLCALQCAVFDKTLAELKTRVEKIECNKRHKTVLTELQAKIARLTKRFEAAKEDLKKRHEHPPNPPVSPGKTVNDVNSNNNMSYRNAGTVRQMLESKRNVSESAPPSFQTPVNTVSSTNLVTPPAVVSSQPKLQTPVTSGSLTATSVLPAPNTATVVATTQVPSGNPQPTISLQPLPVILHVPVAVSSQPQLLQSHPGTLVTNQPSGNVEFISVQSPPTVSGLTKNPVSLPSLPNPTKPNNVPSVPSPSIQRNPTASAAPLGTTLAVQAVPTAHSIVQATRTSLPTVGPSGLYSPSTNRGPIQMKIPISAFSTSSAAEQNSNTTPRIENQTNKTIDASVSKKAADSTSQCGKATGSDSSGVIDLTMDDEESGASQDPKKLNHTPVSTMSSSQPVSRPLQPIQPAPPLQPSGVPTSGPSQTTIHLLPTAPTTVNVTHRPVTQVTTRLPVPRAPANHQVVYTTLPAPPAQAPLRGTVMQAPAVRQVNPQNSVTVRVPQTTTYVVNNGLTLGSTGPQLTVHHRPPQVHTEPPRPVHPAPLPEAPQPQRLPPEAASTSLPQKPHLKLARVQSQNGIVLSWSVLEVDRSCATVDSYHLYAYHEEPSATVPSQWKKIGEVKALPLPMACTLTQFVSGSKYYFAVRAKDIYGRFGPFCDPQSTDVISSTQSS

SEQ ID NO: 39996 - protein, 274 aa, Homo sapiens [sequence omitted]

SEQ ID NO: 39997 - protein, 13 aa, Homo sapiens
MKVFCLMHLILYL

SEQ ID NO: 39998 - protein, 279 aa, Homo sapiens
MEKHNVLEKGFLKEKEQEAISFQDRYKELQEKHKQELEDMRKAGHEALSIIVDEYKALLQSSVKQQVEAIEKQYISAIEKQAHKCEELLNAQHQRLLEMLDTEKELLKEKIKEALIQQSQEQKEILEKCLEEERQRNKEALVSAAKLEKEAVKDAVLKVVEEERKNLEKAHAEERELWKTEHAKDQEKVSQEIQKAIQEQRKISQETVKAAIIEEQKRSEKAVEEAVKRTRDELIEYIKEQKRLDQVIRQRSLSSLELFLSCAQKQLSALIATEPVDIE

SEQ ID NO: 39999 - protein, 243 aa, Homo sapiens
MEKHNVLEKGFLKEKEQEAISFQDRYKELQEKHKQELEDMRKAGHEALSIIVDEYKHQRLLEMLDTEKELLKEKIKEALIQQSQEQKEILEKCLEEERQRNKEALVSAAKLEKEAVKDAVLKVVEEERKNLEKAHAEERELWKTEHAKDQEKVSQEIQKAIQEQRKISQETVKAAIIEEQKRSEKAVEEAVKRTRDELIEYIKEQKRLDQVIRQRSLSSLELFLSCAQKQLSALIATEPVDIE

SEQ ID NO: 40000 - protein, 115 aa, Homo sapiens
MEENEEISSDEEETNVTAQAMQSNNGRGEDEEEEDDDWDEEVLEETALEGFSTPLDLDNSVDEYQFFTQALITVQSRDAAWYQLLMAPLSEDQRTALQEVYTLAEHRRTVAGQPE

SEQ ID NO: 40001 - protein, 864 aa, Homo sapiens
MQNELKQSRAVVTNVQAENERLTAVVQDLKENNEMVELQRIRMKDEIREYKFREARLLQDYTELEEENITLQKLVSTLKQNQVEYEGLKHEIKRFEEETVLLNSQLEDAIRLKEIAEHQLEEALETLKNEREQKNNLRKELSQYISLNDNHISISVDGLKFAEDGSEPNNDDKMNGHIHGPLVKLNGDYRTPTLRKGESLNPVSDLFSELNISEIQKLKQQLMQVEREKAILLANLQESQTQLEHTKGALTEQHERVHRLTEHVNAMRGLQSSKELKAELDGEKGRDSGEEAHDYEVDINGLEILECKYRVAVTEVIDLKAEIKALKEKYNKSVENYTDEKAKYESKIQMYDEQVTSLEKTTKESGEKMAHMEKELQKMTSIANENHSTLNTAQDELVTFSEELAQLYHHVCLCNNETPNRVMLDYYRQSRVTRSGSLKGPDDPRGLLSPRLARRGVSSPVETRTSSEPVAKESTEASKEPSPTKTPTISPVITAPPSSPVLDTSDIRKEPMNIYNLNAIIRDQIKHLQKAVDRSLQLSRQRAAARELAPMIDKDKEALMEEILKLKSLLSTKREQIATLRAVLKANKQTAEVALANLKNKYENEKAMVTETMTKLRNELKALKEDAATFSSLRAMFATRCDEYVTQLDEMQRQLAAAEDEKKTLNTLLRMAIQQKLALTQRLEDLEFDHEQSRRSKGKLGKSKIGSPKVSGEASVTVPTIDTYLLHSQGPQTPNIRVSSGTQRKRQFSPSLCDQSRPRTSGASYLQNLLRVPPDPTSTESFLLKGPPSMSEFIQGHRLSKEKRLTVAPPDCQQPAASVPPQCSQLAGRQDCPTVSPDTALPEEQPHSSSQCAPLHCLSKPPHP

SEQ ID NO: 40002 - protein, 155 aa, Homo sapiens [sequence omitted]

SEQ ID NO: 40003 - protein, 312 aa, Homo sapiens
MWSEGRYEYERIPRERAPPRSHPSDESGYRWTRDDHSASRQPEYRDMRDGFRRKSFYSSHYARERSPYKRDNTFFRESPVGRKDSPHSRSGSSVSSRSYSPERSKSYSFHQSQHRKSVRPGASYKRQNEGNPERDKERPVQSLKTSRDTSPSSGSAVSSSKVLDKPSRLTEKELAEAASKWAAEKLEKSDESNLPEISEYEAGSTAPLFTDQPEEPESNTTHGIELFEDSQLTTRSKAIASKTKEIEQVYRQDCETFGMVVKMLIEKDPSLEKSIQFALRQNLHEIGERCVEELKHFIAEYDTSTQDFGEPF

SEQ ID NO: 40004 - protein, 41 aa, Homo sapiens
MTPIRDPQRRCMSIYLLSVYCVPGTISMCIEKPWKAIQQYI

SEQ ID NO: 40005 - protein, 284 aa, Homo sapiens [sequence omitted]

SEQ ID NO: 40006 - protein, 514 aa, Homo sapiens [sequence omitted]

SEQ ID NO: 40007 - protein, 449 aa, Homo sapiens
MASGTASRSEDEESLAGQKRASSQALGTIPKRRSSSRFIKRKKFDDELVESSLAKSSTRAKGASGVEPGRCSGSEPSSSEKKKVSKAPSTPVPPSPAPAPGLTKRVKKSKQPLQVTKDLGRWKPADDLLLINAVLQTNDLTSVHLGVKFSCRFTLREVQERWYALLYDPVISKLACQAMRQLHPEAIAAIQSKALFSKAEEQLLSKVGSTSQPTLETFQDLLHRHPDAFYLARTAKALQAHWQLMKQYYLLEDQTVQPLPKGDQVLNFSDAEDLIDDSKLKDMRDEVLEHELMVADRRQKREIRQLEQELHKWQVLVDSITGMSSPDFDNQTLAVLRGRMVRYLMRSREITLGRATKDNQIDVDLSLEGPAWKISRKQGVIKLKNNGDFFIANEGRRPIYIDGRPVLCGSKWRLSNNSVVEIASLRFVFLINQDLIALIRAEAAKITPQ

SEQ ID NO: 40008 - protein, 46 aa, Homo sapiens
MNLLSAFKLTWSESLDEPVGPFLLARWFGTSGFGTVRGWTKILRGC

SEQ ID NO: 40009 - protein, 608 aa, Homo sapiens
MVGCAFVLFLFLLHRDVSSREEATEKPWLKSLVSRKDHVLDLMLEAMNNLRDSMPKLQIRAPEAQQTLFSINQSCLPGFYTPAELKPFWERPPQDPNAPGADGKAFQKSKWTPLETQEKEEGYKKHCFNAFASDRISLQRSLGPDTRPPECVDQKFRRCPPLATTSVIIVFHNEAWSTLLRTVYSVLHTTPAILLKEIILVDDASTEEHLKEKLEQYVKQLQVVRVVRQEERKGLITARLLGASVAQAEVLTFLDAHCECFHGWLEPLLARIAEDKTVVVSPDIVTIDLNTFEFAKPVQRGRVHSRGNFDWSLTFGWETLPPHEKQRRKDETYPIKSPTFAGGLFSISKSYFEHIGTYDNQMEIWGGENVEMSFRVWQCGGQLEIIPCSVVGHVFRTKSPHTFPKGTSVIARNQVRLAEVWMDSYKKIFYRRNLQAAKMAQEKSFGDISERLQLREQLHCHNFSWYLHNVYPEMFVPDLTPTFYGAIKNLGTNQCLDVGENNRGGKPLIMYSCHGLGGNQYFEYTTQRDLRHNIAKQLCLHVSKGALGLGSCHFTGKNSQVPKDEEWELAQDQLIRNSGSGTCLTSQDKKPAMAPCNPSDPHQLWLFV

SEQ ID NO: 40010 - protein, 299 aa, Homo sapiens
MLPNSTERAITIAGIPQSIIECVKQICVVMLESPPKGVTIPYRPKPSSSPVIFAGGQAYTIQGQYAIPQPDLTKLHQLAMQQSHFPMTHGNTGFSGIESSSPEVKGYWAGLDASAQTTSHELTIPNDLIGCIIGRQGAKINEIRQMSGAQIKIANPVEGSTDRQVTITGSAASISLAQYLINVSLENAKPSSQAASVTIPDHLSINLSQPSTPSSSSSSTTTPSLATAGTSDAPSSLPNPLPTAPCVSSLLGMKPIPLLALNVVSAAKGTGASATTTTTSAVPCVTNKLKGEKQRFSPY

SEQ ID NO: 40011 - protein, 1037 aa, Homo sapiens
MVQALTTTRIQRQAEGFQCWRECGTRRSPFEGKETCAHRYEARQRVDQILETRDMIGRCFVLSQDLAIRDELDGGEWKFCEGRPQGHEQFGFCQQGTAAAFSPDSHYLLFGAPGTYNWKGTARVELCAQGSADLAHLDDGPYEAGGEKEQDPRLIPVPANSYFGFSIDSGKGLVRAEELSFVAGAPRANHKGAVVILRKDSASRLVPEVMLSGERLTSGFGYSLAVADLNSDGWPDLIVGAPYFFERQEELGGAVYVYLNQGGHWAGISPLRLCGSPDSMFGISLAVLGDLNQDGFPDIAVGAPFDGDGKVFIYHGSSLGVVAKPSQVLEGEAVGIKSFGYSLSGSLDMDGNQYPDLLVGSLADTAVLFRARPILHVSHEVSIAPRSIDLEQPNCAGGHSVCVDLRVCFSYIAVPSSYSPTVALDYVLDADTDRRLRGQVPRVTFLSRNLEEPKHQASGTVWLKHQHDRVCGDAMFQLQENVKDKLRAIVVTLSYSLQTPRLRRQAPGQGLPPVAPILNAHQPSTQRAEIHFLKQGCGEDKICQSNLQLVRARFCTRVSDTEFQPLPMDVDGTTALFALSGQPVIGLELMVTNLPSDPAQPQADGDDAHEAQLLVMLPDSLHYSGVRALDPAEKPLCLSNENASHVECELGNPMKRGAQVTFYLILSTSGISIETTELEVELLLATISEQELHPVSARARVFIELPLSIAGMAIPQQLFFSGVVRGERAMQSERDVGSKVKYEVTVSNQGQSLRTLGSAFLNIMWPHEIANGKWLLYPMQVELEGGQGPGQKGLCSPRPNILHLDVDSRDRRRRELEPPEQQEPGERQEPSMSWWPVSSAEKKKNITLDCARGTANCVVFSCPLYSFDRAAVLHVWGRLWNSTFLEEYSAVKSLEVIVRANITVKSSIKNLMLRDASTVIPVMVYLDPMAVVAEGVPWWVILLAVLAGLLVLALLVLLLWKMGFFKRAKHPEATVPQYHAVKIPREDRQQFKEEKTGTILRNNWGSPRREGPDAHPILAADGHPELGPDGHPGPGTA

SEQ ID NO: 40012 - protein, 94 aa, Homo sapiens
MLSRLLKEHQAKQNERKELQEKRRREAITAATCLTEALVDHLNVGVAQAYMNQRKLDHEVKTLQVQAAQFAKQTGQWIGMVENFNQALKGFLVW

SEQ ID NO: 40013 - protein, 259 aa, Homo sapiens
MNSLGISHKLTLAPLKHPTVTFKLYDTDRNGILDSSVSWGPCMLGKGICVNLSAPSCPNSSRVLRNRRGWGERLSPLGLNLKVSPKLLTPQRECWIHELGLPYKHTNTFIYLADIPENERCESGVEPRNTDFWKRVWMVVVKGIWLWLLPFLLQEVDKIILQMMRVAEYLDWDVSELRPILQEMMKEIDYDGSGSVSQAEWVRAGATTVPLLVLLGLEMTLKDDGQHMWRPKRFPRPVYCNLCESSIGLGKQGLSCNRE

SEQ ID NO: 40014 - protein, 200 aa, Homo sapiens
MDASALTGIPLPLIKSYLFQLLQGLAFCHSHRVLHRDLKPQNLLINTEGAIKLADFGLARAFGVPVRTYTHEVVTLWYRAPEILLGCKYYSTAVDIWSLGCIFAEMVTRRALFPGDSEIDQLFRIFRTLGTPDEVVWPGVTSMPDYKPSFPKWARQDFSKVVPPLDEDGRSLLSVRVGTCFPSFISPREGLFQDEGRMRP

SEQ ID NO: 40015 - protein, 130 aa, Homo sapiens
MGSFRINPDGSQSVVEVPYARSEAHLTELLEEICDRMKEYGEQIDPSTHRKNYVRVVGRNGESSELDLQGIRIDSDISGTLKFACESIVEEYEDELIEFFSREADNVKDKLCSKRTDLCDHALHISHDEL

SEQ ID NO: 40016 - protein, 907 aa, Homo sapiens [sequence omitted]

SEQ ID NO: 40017 - protein, 231 aa, Homo sapiens
MSGTSSPEAVKKLLENMQSDLRALSLECKKKFPPVKEAIVLCFRLHFTKDNITNNTAAATVRQVVTVVFERMVAEDERHRDIIEQPVLVQGNSNRRSVSTLKPCAKDAYMLFQDLCQLVNADAPYWLVGMTEMTRTFGLELLESVLNDFPQVFLQHQEFSFLLKERVCPLVIKLFSPNIKFRQGSSTSSSPAPVEKPYFPICMRLLRVVSVLIKQFYSLLVSANFLMYLCI

SEQ ID NO: 40018 - protein, 340 aa, Homo sapiens
MAEETCLYLWEHIFEGLLDPSDVTAQWREGKSIVGRTQYSFITGPAVIPGYFSVDVNNVVLILNGREKAKIFYATQWLLYAQNLVQIQKLQHLAVVLLGNEHCDNEWINPFLKRNGGFVELLFIIYDSPWINDVDVFQWPLGVATYRNFPVVEASWSMLHDERPYLCNFLGTIYENSSRQALMNILKKDGNDKLCWVSAREHWQPQETNESLKNYQDALLQSDLTLCPVGVNTECYRIYEACSYGSIPVVEDVMTAGNCGNTSVHHGAPLQLLKSMGAPFIFIKNWKELPAVLEKEKTIILQEKIERRKMLLQWYQHFKTELKMKFTNILESSFLMNNKS

SEQ ID NO: 40019 - protein, 471 aa, Homo sapiens
MELTDTELILYTRKRDSVKWHYLCLRRYGYDSNLFSFESGRRCQTGQGIFAFKCARAEELFNMLQEIMQNNSINVVEEPVVERNNHQTELEVPRTPRTPTTPGFAAQNLPNGYPRYPSFGDASSHPSSRHPSVGSARLPSVGEESTHPLLVAEEQVHTYVNTTGVQEERKNRTSVHVPLEARVSNAESSTPKEEPSSIEDRDPQILLEPEGVKFVLGPTPVQKQLMEKEKLEQLGRDQVSGSGANNTEWDTGYDSDERRDAPSVNKLVYENINGLSIPSASGVRRGRLTSTSTSDTQNINNSAQRRTALLNYENLPSLPPVWEARKLSRDEDDNLGPKTPSLNGYHNNLDPMHNYVNTENVTVPASAHKIEYSRRRDCTPTVFNFDIRRPSLEHRQLNYIQVDLEGGSDSDNPQTPKTPTTPLPQTPTRRTELYAVIDIERTAAMSNLQKALPRDDGTSRKTRHNSTDLPM

SEQ ID NO: 40020 - protein, 200 aa, Homo sapiens
MVQEHDEPILKHLKDIKVKFSDAGQPMSFVLEFHFEPNEYFTNEVLTKTYRMRSEPDDSDPFSFDGPEIMGCTGCQIDWKKGKNVTLKTIKKKQKHKGRGTVRTVTKTVSNDSFFNFFAPPEVPESGDLDDDAEAILAADFEIGHFLRERIIPRSVLYFTGEAIEDDDDDYDEEGEEADEGYQLFEEVKSCSKLFQRWLQ

SEQ ID NO: 40021 - protein, 622 aa, Homo sapiens
MADGPDEYDTEAGCVPLLHPEEIKPQSHYNHGYGEPLGRKTHIDDYSTWDIVKATQYGIYERCRELVEAGYDVRQPDKENVTLLHWAAINNRIDLVKYYISKGAIVDQLGGDLNSTPLHWATRQGHLSMVVQLMKYGADPSLIDGEGCSCIHLAAQFGHTSIVAYLIAKGQDVDMMDQNGMTPLMWAAYRTHSVDPTRLLLTFNVSVNLGDKYHKNTALHWAVLAGNTTVISLLLEAGANVDAQNIKGESALDLAKQRKNVWMINHLQEARQAKGYDNPSFLRKLKADKEFRQKVMLGTPFLVIWLVGFIADLNIDSWLIKGLMYGGVWATVQFLSKSFFDHSMHSALPLGIYLATKFWMYVTWFFWFWNDLNFLFIHLPFLANSVALFYNFGKSWKSDPGIIKATEEQKKKTIVELAETGSLDLSIFCSTCLIRKPVRSKHCGVCNRCIAKFDHHCPWVGNCVGAGNHRYFMGYLFFLLFMICWMIYGCISYWGLHCETTYTKDGFWTYITQIATCSPWMFWMFLNSVFHFMWVAVLLMCQMYQISCLGITTNERMNARRYKHFKVTTTSIESPFNHGCVRNIIDFFEFRCCGLFRPVIVDWTRQYTIEYDQISGSGYQLV

SEQ ID NO: 40022 - protein, 871 aa, Homo sapiens
MAPKTPIKNEPIDLSKQKKFTPERNPITPVKFVDRQQAEPWTPTANLKMLISAASPDIRDREKKKGLFRPIENKDDAFTDSLQLDVVGDSAVDEFEKQRPSRKQKSLGLLCQKFLARYPSYPLSTEKTTISLDEVAVSLGVERRRIYDIVNVLESLHLVSRVAKNQYGWHGRHSLPKTLRNLQRLGEEQKYEEQMAYLQQKELDLIDYKFGERKKDGDPDSQEQQLLDFSEPDCPSSSANSRKDKSLRIMSQKFVMLFLVSKTKIVTLDVAAKILIEESQDAPDHSKFKTKVRRLYDIANVLTSLALIKKVHVTEERGRKPAFKWIGPVDFSSSDEELVDVSASVLPELKRETYGQIQVCAKQKLARHGSFNTVQASERIQRKVNSEPSSPYREEQGSGGYSLEIGSLAAVYRQKIEDNSQGKAFASKRVVPPSSSLDPVAPFPVLSVDPEYCVNPLAHPVFSVAQTDLQAFSMQNGLNGQVDVSLASAASAVESLKPALLAGQPLVYVPSASLFMLYGSLQEGPASGSGSERDDRSSEAPATVELSSAPSAQKRLCEERKPQEEDEPATKRQSREYEDGPLSLVMPKKPSDSTDLASPKTMGNRASIPLKDIHVNGQLPAAEEISGKATANSLVSSEWGNPSRNTDVEKPSKENESTKEPSLLQYLCVQSPAGLNGFNVLLSGSQTPPTVGPSSGQLPSFSVPCMVLPSPPLGPFPVLYSPAMPGPVSSTLGALPNTGPVNFSLPGLGSIAQLLVGPTAVVNPKSSTLPSADPQLQSQPSLNLSPVMSRSHSVVQQPESPVYVGHPVSVVKLHQSPVPVTPKSIQRTHRETFFKTPGSLGDPVLKRRERNQSRNTSSAQRRLEIPSGGAD

SEQ ID NO: 40023 - protein, 1217 aa, Homo sapiens [sequence omitted]

SEQ ID NO: 40024 - protein, 161 aa, Homo sapiens
MIGEIAAAVSFISKFLRTKGLTSERQLQTFSQSLQELLAEHYKHHWFPEKPCKGSGYRCIRINHKMDPLIGQAAQRIGLSSQELFRLLPSELTLWVDPYEVSYRIGEDGSICVLYEASPAGGSTQNSTNVQMVDSRISCKEELLLGRTSPSKNYNMMTVSG

SEQ ID NO: 40025 - protein, 625 aa, Homo sapiens
MLPTWWIVSSWLVWGVILFVYLVIRALRLWRTAKLQVTLKKYSVHLEDMATNSRAFTNLVRKALRLIQETEVISRGFTLLLDRVSAACPFNKAGQHPSQHLIGLRKAVYRTLRANFQAARLATLYMLKNYPLNSESDNVTNYICVVPFKELGLGLSEEQISEEEAHNFTDGFSLPALKVLFQLWVAQSSEFFRRLALLLSTANSPPGPLLTPALLPHRILSDVTQGLPHAHSACLEELKRSYEFYRYFETQHQSVPQCLSKTQQKSRELNNVHTAVRSLQLHLKALLNEVIILEDELEKLVCTKETQELVSEAYPILEQKLKLIQPHVQASNNCWEEAISQVDKLLRRNTDKKGKPEIACENPHCTVVPLKQPTLHIADKDPIPEEQELEAYVDDIDIDSDFRKDDFYYLSQEDKERQKREHEESKRVLQELKSVLGFKASEAERQKWKQLLFSDHAVLKSLSPVDPVEPISNSEPSMNSDMGKVSKNDTEEESNKSATTDNEISRTEYLCENSLEGKNKDNSSNEVFPQGAEERMCYQCESEDEPQADGSGLTTAPPTPRDSLQPSIKQRLARLQLSPDFTFTAGLAAEVAARSLSFTTMQEQTFGGEEEEQIIEENKNEIEEK

SEQ ID NO: 40026 - protein, 170 aa, Homo sapiens
MQENLRFASSGDDIKIWDASSMTLVDKFNPHTSPHGISSICWSSNNNFLVTASSSGDKIVVSSCKCKPVPLLELAEGQKQTCVNLNSTSMYLVSGGLNNTVNIWDLKSKRVHRSLKDHKDQVTCVTYNWNDCYIASGSLSGEIILHSVTTNLSSTPFGHGSNQALQSSVE

SEQ ID NO: 40027 - protein, 1374 aa, Homo sapiens [sequence omitted]

SEQ ID NO: 40028 - protein, 186 aa, Homo sapiens [sequence omitted]

SEQ ID NO: 40029 - protein, 185 aa, Homo sapiens
MGSGIDLTKVPAIQQKRTVAFLNQFVVHTVQFLNRFSTVCEEKLADLSLRIQQIETTLNILDAKLSSIPGLDDVTVEVSPLNVTSVTNGAHPEATSEQPQNSTQDSGLQESEVSAENILTVAKDPRYARYLKMVQVGVPVMAIRNKMISEGLDPDLLERPDAPVPDGESEKTVEESSDSESSFSD

SEQ ID NO: 40030 - protein, 165 aa, Homo sapiens
MGSGIDLTKVPAIQQKRTVAFLNQFVVHTVQFLNRFSTVCEEKLADLSLRIQQIETTLNILDAKLSSIPGLDDVTVEVSPLNVTSVTNGAHPEATSEQPQNSTQDSGLQESEVSAENILTVAKDPRYARYLKMVQVGVPVMAIRNKMISEGLDPDLLEKIKKRKK

SEQ ID NO: 40031 - protein, 53 aa, Homo sapiens
MGSGIDLTKVPAIQQKRTVAFLNQFVVHTVQFLNRFSTVCEETGSHFVTHAGV

SEQ ID NO: 40032 - protein, 14 aa, Homo sapiens
MSSSFSNSCKLCVG

SEQ ID NO: 40033 - protein, 797 aa, Homo sapiens [sequence omitted]

SEQ ID NO: 40034 - protein, 457 aa, Homo sapiens
MLIPMASVMAVTEPKWVSVWSRFLWVTLLSMVLGSLLALLLPLGAVEEQCLAVLKGLYLLRSKPDRAQHAATKCTSPSTELSITSRGATLLVAKTKASPAGKLEARAALNQALEMKRQGKREKAQKLFMHALKMDPDFVDALTEFGIFSEEDKDIIQADYLYTRALTISPYHEKALVNRDRTLPLVEEIDQRYFSIIDSKVKKVMSIPKGNSALRRVMEETYYHHIYHTVAIEGNTLTLSEIRHILETRYAVPGKSLEEQNEVIGMHAAMKYINTTLVSRIGSVTISDVLEIHRRVLGYVDPVEAGRFRTTQVLVGHHIPPHPQDVEKQMQEFVQWLNSEEAMNLHPVEFAALAHYKLVYIHPFIDGNGRTSRLLMNLILMQAGYPPITIRKEQRSDYYHVLEAANEGDVRPFIRFIAKCTETTLDTLLFATTEYSVALPEAQPNHSGFKETLPVKP

SEQ ID NO: 40035 - protein, 32 aa, Homo sapiens
MVLKISLPVILMDETLKFVARNYLEPVLSSEL

SEQ ID NO: 40036 - protein, 585 aa, Homo sapiens
MYCYPGSHLARALTRALALALVLALLVGPFLSGLAGAIPAPGGRWARDGQVPPASRSRSVLLDVSAGQLLMVDGRHPDAVAWANLTNAIRETGWAFLELGTSGQYNDSLQAYAAGVVEAAVSEELIYMHWMNTVVNYCGPFEYEVGYCERLKSFLEANLEWMQEEMESNPDSPYWHQVRLTLLQLKGLEDSYEGRVSFPAGKFTIKPLGFLLLQLSGDLEDLELALNKTKIKPSLGSGSCSALIKLLPGQSDLLVAHNTWNNYQHMLRVIKKYWLQFREGPWGDYPLVPGNKLVFSSYPGTIFSCDDFYILGSGLVTLETTIGNKNPALWKYVRPRGCVLEWVRNIVANRLASDGATWADIFKRFNSGTYNNQWMIVDYKAFIPGGPSPGSRVLTILEQIPGMVVVADKTSELYQKTYWASYNIPSFETVFNASGLQALVAQYGDWFSYDGSPRAQIFRRNQSLVQDMDSMVRLMRYNDFLHDPLSLCKACNPQPNGENAISARSDLNPANGSYPFQALRQRSHGGIDVKVTSMSLARILSLLAASGPTWDQVPPFQWSTSPFSGLLHMGQPDLWKFAPVKVSWD

SEQ ID NO: 40037 - protein, 261 aa, Homo sapiens
MKEQMYQDKLASLKRQLQQLQEGTLQEYQKRMKKLDQQYKERIRNAELFLQLETEQVERNYIKEKKAAVKEFEDKKVELKENLIAELEEKKKMIENEKLTMELTGDSMEVKPIMTRKLRRRPNDPVPIPDKRRKPAPAQLNYLLTDEQIMEDLRTLNKLKSPKRPASPSSPEHLPATPAESPAQRFEARIEDGKLYYDKRWYHKSQAIYLESKDNQKLSCVISSVGANEIWVRKTSDSTKMRIYLGQLQRGLFVIRRRSAA

SEQ ID NO: 40038 - protein, 2027 aa, Homo sapiens
MSPLSREGILDALFVLFEECSQPALMKIKHVSNFVRKYSDTIAELQELQPSAKDFEVRSLVGCGHFAEVQVVREKATGDIYAMKVMKKKALLAQEQVSFFEEERNILSRSTSPWIPQLQYAFQDKNHLYLVMEYQPGGDLLSLLNRYEDQLDENLIQFYLAELILAVHSVHLMGYVHRDIKPENILVDRTGHIKLVDFGSAAKMNSNKMVNAKLPIGTPDYMAPEVLTVMNGDGKGTYGLDCDWWSVGVIAYEMIYGRSPFAEGTSARTFNNIMNFQRFLKFPDDPKVSSDFLDLIQSLLCGQKERLKFEGLCCHPFFSKIDWNNIRNSPPPFVPTLKSDDDTSNFDEPEKNSWVSSSPCQLSPSGFSGEELPFVGFSYSKALGILGRSESVVSGLDSPAKTSSMEKKLLIKSKELQDSQDKCHKMEQEMTRLHRRVSEVEAVLSQKEVELKASETQRSLLEQDLATYITECSSLKRSLEQARMEVSQEDDKALQLLHDIREQSRKLQEIKEQEYQAQVEEMRLMMNQLEEDLVSARRRSDLYESELRESRLAAEEFKRKATECQHKLLKAKDQGKPEVGEYAKLEKINAEQQLKIQELQEKLEKAVKASTEATELLQNIRQAKERAERELEKLQNREDSSEGIRKKLVEAEERRHSLENKVKRLETMERRENRLKDDIQTKSQQIQQMADKILELEEKHREAQVSAQHLEVHLKQKEQHYEEKIKVLDNQIKKDLADKETLENMMQRHEEEAHEKGKILSEQKAMINAMDSKIRSLEQRIVELSEANKLAANSSLFTQRNMKAQEEMISELRQQKFYLETQAGKLEAQNRKLEEQLEKISHQDHSDKNRLLELETRLREVSLEHEEQKLELKRQLTELQLSLQERESQLTALQAARAALESQLRQAKTELEETTAEAEEEIQALTAHRDEIQRKFDALRNSCTVITDLEEQLNQLTEDNAELNNQNFYLSKQLDEASGANDEIVQLRSEVDHLRREITEREMQLTSQKQTMEALKTTCTMLEEQVMDLEALNDELLEKERQWEAWRSVLGDEKSQFECRVRELQRMLDTEKQSRARADQRITESRQVVELAVKEHKAEILALQQALKEQKLKAESLSDKLNDLEKKHAMLEMNARSLQQKLETERELKQRLLEEQAKLQQQMDLQKNHIFRLTQGLQEALDRADLLKTERSDLEYQLENIQVLYSHEKVKMEGTISQQTKLIDFLQAKMDQPAKKKKGLFSRRKEDPALPTQVPLQYNELKLALEKEKARCAELEEALQKTRIELRSAREEAAHRKATDHPHPSTPATARQQIAMSAIVRSPEHQPSAMSLLAPPSSRRKESSTPEEFSRRLKERMHHNIPHRFNVGLNMRATKCAVCLDTVHFGRQASKCLECQVMCHPKCSTCLPATCGLPAEYATHFTEAFCRDKMNSPGLQTKEPSSSLHLEGWMKVPRNNKRGQQGWDRKYIVLEGSKVLIYDNEAREAGQRPVEEFELCLPDGDVSIHGAVGASELANTAKADVPYILKMESHPHTTCWPGRTLYLLAPSFPDKQRWVTALESVVAGGRVSREKAEADAKLLGNSLLKLEGDDRLDMNCTLPFSDQVVLVGTEEGLYALNVLKNSLTHVPGIGAVFQIYIIKDLEKLLMIAGEERALCLVDVKKVKQSLAQSHLPAQPDISPNIFEAVKGCHLFGAGKIENGLCICAAMPSKVVILRYNENLSKYCIRKEIETSEPCSCIHFTNYSILIGTNKFYEIDMKQYTLEEFLDKNDHSLAPAVFAASSNSFPVSIVQVNSAGQREEYLLCFHEFGVFVDSYGRRSRTDDLKWSRLPLAFAYREPYLFVTHFNSLEVIEIQARSSAGTPARAYLDIPNPRYLGPAISSGAIYLASSYQDKLRVICCKGNLVKESGTEHHRGPSTSRSSPNKRGPPTYNEHITKRVASSPAPPEGPSHPREPSTPHRYREGRTELRRDKSPGRPLEREKSPGRMLSTRRERSPGRLFEDSSRGRLPAGAVRTPLSQVNKVWDQSSV

SEQ ID NO: 40039 - protein, 54 aa, Homo sapiens
MLNISPFSFGLVIQQVFDNGSIYNPEVLDITEETLHSRFLEVYAVSLAPSYTDG

SEQ ID NO: 40040 - protein, 172 aa, Homo sapiens
MPREDRATWKSNYFLKIIQLLDDYPKCFIVGADNVGSKQMQQIRMSLRGKAVVLMGKNTMMRKAIRGHLENNPALEKLLPHIRGNVGFVFTKEDLTEIRDMLLANKVPAAARAGAIAPCEVTVPAQNTGLGPEKTSFFQALGITTKISRGTIEILVSGPGLPVLTRQMGSCF

SEQ ID NO: 40041 - protein, 717 aa, Homo sapiens [sequence omitted]

SEQ ID NO: 40042 - protein, 80 aa, Homo sapiens
MIERHYFREHLLKNFDFDFGFCIPSSRNTCEHIYEFPQLSEDVIRLMIENPYETRSDSFYFVDNKLIMHNKADYAYNGGQ

SEQ ID NO: 40043 - protein, 358 aa, Homo sapiens
MNRAVQLLILAYVIGWVFVWEKGYQETDSVVSSVTTKVKGVAVTNTSKLGFRIWDVADYVIPAQEENSLFVMTNVILTMNQTQGLCPEIPDATTVCKSDASCTAGSAGTHSNGVSTGRCVAFNGSVKTCEVAAWCPVEDDTHVPQPAFLKAAENFTLLVKNNIWYPKFNFSKRNILPNITTTYLKSCIYDAKTDPFCPIFRLGKIVENAGHSFQDMAVEGGIMGIQVNWDCNLDRAASLCLPRYSFRRLDTRDVEHNVSPGYNFRFAKYYRDLAGNEQRTLIKAYGIRFDIIVFGKAGKFDIIPTMINIGSGLALLGMATVLCDIIVLYCMKKRLYYREKKYKYVEDYEQGLASELDQ

SEQ ID NO: 40044 - protein, 162 aa, Homo sapiens
MVTLAELLVLLAALLATVSGYFVSIDAHAEECFFERVTSGTKMGLIFEVAEGGFLDIDVEITGPDNKGIYKGDRESSGKYTFAAHMDGTYKFCFSNRMSTMTPKIVMFTIDIGEAPKGQDMETEAHQNKLEEMINELAVAMTAVKHEQEYMEVRERIHRASK

SEQ ID NO: 40045 - protein, 569 aa, Homo sapiens
MTPVQSATIPLFMRNKDVAAEAVTGSGKTLAFVIPILEILLRREEKLKKSQVGAIIITPTRELAIQIDEVLSHFTKHFPEFSQILWIGGRNPGEDVERFKQQGGNIIVATPGRLEDMFRRKAEGLDLASCVRSLDVLVLDEADRLLDMGFEASINTILEFLPKQRRTGLFSATQTQEVENLVRAGLRNPVRVSVKEKGVAASSAQKTPSRLENYYMVCKADEKFNQLVHFLRNHKQEKHLVFFSTCACVEYYGKALEVLVKGVKIMCIHGKMKYKRNKIFMEFRKLQSGILVCTDVMARGIDIPEVNWVLQYDPPSNASAFVHRCGRTARIGHGGSALVFLLPMEESYINFLAINQKCPLQEMKPQRNTADLLPKLKSMALADRAVFEKGMKAFVSYVQAYAKHECNLIFRLKDLDFASLARGFALLRMPKMPELRGKQFPDFVPVDVNTDTIPFKDKIREKQRQKLLEQQRREKTENEGRRKFIKNKAWSKQKAKKEKKKKMNEKRKREEGSDIEDEDMEELLNDTRLLKKLKKGKITEEEFEKGLLTTGKRTIKTVDLGISDLEDDC

SEQ ID NO: 40046 - protein, 847 aa, Homo sapiens [sequence omitted]

SEQ ID NO: 40047 - protein, 924 aa, Homo sapiens
MNRSPATGQNVNITLQSVGPVVGGNQQITLAPLPLPSPTSPGFQFSAQPRRFEHGSPSYIQVTSPLSQQVQTQSPTQPSPGPGQALQNVRAGAPGPGLGLCSSSPTGGFVDASVLVRQISLSPSSGGHFVFQDGSGLTQIAQGAQVQLQHPGTPITVRERRPSQPHTQSGGTIHHLGPQSPAAAGGAGLQPLASPSHITTANLPPQISSIIQGQLVQQQQVLQGPPLPRPLGFERTPGVLLPGAGGAAGFGMTSPPPPTSPSRTAVPPGLSSLPLTSVGNTGMKKVPKKLEEIPPASPEMAQMRKQCLDYHYQEMQALKEVFKEYLIELFFLQHFQGNMMDFLAFKKKHYAPLQAYLRQNDLDIEEEEEEEEEEEEKSEVINDEVKVVTGKDGQTGTPVAIATQLPPKVSAAFSSQQQPFQQALAGSLVAGAGSTVETDLFKRQQAMPSTGMAEQSKRPRLEVGHQGVVFQHPGADAGVPLQQLMPTAQGGMPPTPQAAQLAGQRQSQQQYDPSTGPPVQNAASLHTPLPQLPGRLPPAGVPTAALSSALQFAQQPQVVEAQTQLQIPVKTQQPNVPIPAPPSSQLPIPPSQPAQLALHVPTPGKVQVQASQLSSLPQMVASTRLPVDPAPPCPRPLPTSSTSSLAPVSGSGPGPSPARSSPVNRPSSATNKALSPVTSRTPGVVASAPTKPQSPAQNATSSQDSSQDTLTEQITLENQVHQRIAELRKAGLWSQRRLPKLQEAPRPKSHWDYLLEEMQWMATDFAQERRWKVAAAKKLVRTVVRHHEEKQLREERGKKEEQSRLRRIAASTAREIECFWSNIEQVVEIKLRVELEEKRKKALNLQKVSRRGKELRPKGFDALQESSLDSGMSGRKRKASISLTDDEVDDEEETIEEEEANEGVVDHQTELSNLAKEGRLLLPY

SEQ ID NO: 40048 - protein, 3062 aa, Homo sapiens
MNRSPATGQNVNITLQSVGPVVGGNQQITLAPLPLPSPTSPGFQFSAQPRRFEHGSPSYIQVTSPLSQQVQTQSPTQPSPGPGQALQNVRAGAPGPGLGLCSSSPTGGFVDASVLVRQISLSPSSGGHFVFQDGSGLTQIAQGAQVQLQHPGTPITVRERRPSQPHTQSGGTIHHLGPQSPAAAGGAGLQPLASPSHITTANLPPQISSIIQGQLVQQQQVLQGPPLPRPLGFERTPGVLLPGAGGAAGFGMTSPPPPTSPSRTAVPPGLSSLPLTSVGNTGMKKVPKKLEEIPPASPEMAQMRKQCLDYHYQEMQALKEVFKEYLIELFFLQHFQGNMMDFLAFKKKHYAPLQAYLRQNDLDIEEEEEEEEEEEEKSEVINDEQQALAGSLVAGAGSTVETDLFKRQQAMPSTGMAEQSKRPRLEVGHQGVVFQHPGADAGVPLQQLMPTAQGGMPPTPQAAQLAGQRQSQQQYDPSTGPPVQNAASLHTPLPQLPGRLPPAGVPTAALSSALQFAQQPQVVEAQTQLQIPVKTQQPNVPIPAPPSSQLPIPPSQPAQLALHVPTPGKVQVQASQLSSLPQMVASTRLPVDPAPPCPRPLPTSSTSSLAPVSGSGPGPSPARSSPVNRPSSATNKALSPVTSRTPGVVASAPTKPQSPAQNATSSQDSSQDTLTEQITLENQVHQRIAELRKAGLWSQRRLPKLQEAPRPKSHWDYLLEEMQWMATDFAQERRWKVAAAKKLVRTVVRHHEEKQLREERGKKEEQSRLRRIAASTAREIECFWSNIEQVVEIKLRVELEEKRKKALNLQKVSRRGKELRPKGFDALQESSLDSGMSGRKRKASISLTDDEVDDEEETIEEEEANEGVVDHQTELSNLAKEAELPLLDLMKLYEGAFLPSSQWPRPKPDGEDTSGEEDADDCPGDRESRKDLVLIDSLFIMDQFKAAERMNIGKPNAKDIADVTAVAEAILPKGSARVTTSVKFNAPSLLYGALRDYQKIGLDWLAKLYRKNLNGILADEAGLGKTVQIIAFFAHLACNEGNWGPHLVVVRSCNILKWELELKRWCPGLKILSYIGSHRELKAKRQEWAEPNSFHVCITSYTQFFRGLTAFTRVRWKCLVIDEMQRVKGMTERHWEAVFTLQSQQRLLLIDSPLHNTFLELWTMVHFLVPGISRPYLSSPLRAPSEESQDYYHKVVIRLHRVTQPFILRRTKRDVEKQLTKKYEHVLKCRLSNRQKALYEDVILQPGTQEALKSGHFVNVLSILVRLQRICNHPGLVEPRHPGSSYVAGPLEYPSASLILKALERDFWKEADLSMFDLIGLENKITRHEAELLSKKKIPRKLMEEISTSAAPAARPAAAKLKASRLFQPVQYGQKPEGRTVAFPSTHPPRTAAPTTASAAPQGPLRGRPPIATFSANPEAKAAAAPFQTSQASASAPRHQPASASSTAASPAHPAKLRAQTTAQASTPGQPPPQPQAPSHAAGQSALPQRLVLPSQAQARLPSGEVVKIAQLASITGPQSRVAQPETPVTLQFQGSKFTLSHSQLRQLTAGQPLQLQGSVLQIVSAPGQPYLRAPGPVVMQTVSQAGAVHGALGSKPPAGGPSPAPLTPQVGVPGRVAVNALAVGEPGTASKPASPIGGPTQEEKTRLLKERLDQIYLVNERRCSQAPVYGRDLLRICALPSHGRVQWRGSLDGRRGKEAGPAHSYTSSSESPSELMLTLCRCGESLQDVIDRVAFVIPPVVAAPPSLRVPRPPPLYSHRMRILRQGLREHAAPYFQQLRQTTAPRLLQFPELRLVQFDSGKLEALAILLQKLKSEGRRVLILSQMILMLDILEMFLNFHYLTYVRIDENASSEQRQELMRSFNRDRRIFCAILSTHSRTTGINLVEADTVVFYDNDLNPVMDAKAQEWCDRIGRCKDIHIYRLVSGNSIEEKLLKNGTKDLIREVAAQGNDYSMAFLTQRTIQELFEVYSPMDDAGFPVKAEEFVVLSQEPSVTETIAPKIARPFIEALKSIEYLEEDAQKSAQEGVLGPHTDALSSDSENMPCDEEPSQLEELADFMEQLTPIEKYALNYLELFHTSIEQEKERNSEDAVMTAVRAWEFWNLKTLQEREARLRLEQEEAELLTYTREDAYSMEYVYEDVDGQTEVMPLWTPPTPPQDDSDIYLDSVMCLMYEATPIPEAKLPPVYVRKERKRHKTDPSAAGRKKKQRHGEAVVPPRSLFDRATPGLLKIRREGKEQKKNILLKQQVPFAKPLPTFAKPTAEPGQDNPEWLISEDWALLQAVKQLLELPLNLTIVSPAHTPNWDLVSDVVNSCSRIYRSSKQCRNRYENVIIPREEGKSKNNRPLRTSQIYAQDENATHTQLYTSHFDLMKMTAGKRSPPIKPLLGMNPFQKNPKHASVLAESGINYDKPLPPIQVASLRAERIAKEKKALADQQKAQQPAVAQPPPPQPQPPPPPQQPPPPLPQPQAAGSQPPAGPPAVQPQPQPQPQTQPQPVQAPAKAQPAITTGGSAAVLAGTIKTSVTGTSMPTGAVSGNVIVNTIAGVPAATFQSINKRLASPVAPGALTTPGGSAPAQVVHTQPPPRAVGSPATATPDLVSMATTQGVRAVTSVTASAVVTTNLTPVQTPARSLVPQVSQATGVQLPGKTITPAHFQLLRQQQQQQQQQQQQQQQQQQQQQQQQQQQQQTTTTSQVQVPQIQGQAQSPAQIKAVGKLTPEHLIKMQKQKLQMPPQPPPPQAQSAPPQPTAQVQVQTSQPPQQQSPQLTTVTAPRPGALLTGTTVANLQVARLTRVPTSQLQAQGQMQTQAPQPAQVALAKPPVVSVPAAVVSSPGVTTLPMNVAGISVAIGQPQKAAGQTVVAQPVHMQQLLKLKQQAVQQQKAIQPQAAQGPAAVQQKITAQQITTPGAQQKVAYAAQPALKTQFLTTPISQAQKLAGAQQVQTQIQVAKLPQVVQQQTPVASIQQVASASQQASPQTVALTQATAAGQQVQMIPAVTATAQVVQQKLIQQQVVTTASAPLQTPGAPNPAQVPASSDSPSQQPKLQMRVPAVRLKTPTKPPCQ

SEQ ID NO: 40049 - protein, 942 aa, Homo sapiens
MALKPHERKEKWERRLIKKPRESETCPPAEPSENRRPLEAGSPGQDLEPACDGARKVPLQPSKQMKVTVSKGGDRDSDDDSVLEATSSRDPLSDSSAHAVSGRGYSCDSESGPDDKASVGSEKLFAPGTDKGPALEKSEAKAGPVPKVSGLERSRELSAESFLPTASPAPHAAPCPGPPPGSRANPLVKKEPPAPHRHTPQPPPPQPRGLLPTHVPASLGAFAGHSQAAANGLHGLSRSSSAPLGLGKHVSLSPHGPGPHLSTSHLALRSQAQHQLHAAMFAAPPTLPPPPALPASSLVLPGHPADASLAVSFSQPIMYCQPHSGILIDHELLRQELNTRFLVQSAERPGASLGPGALLRAEFHQHQHTHQHTHQHTHQHQHTFAPFPAGLPPTPPAAPPPFDKYAPKLDSPYFRHSSFFPSFPPAIPGLPTLLPHPGPFGSLQGAFQPKTSSPIEVARRAGAVHTLLQKAPGVSDPYRAVVKKPGRWCAVHVQIAWQIYRHQQKIKEMQLDPHKLEVGAKLDLFGRPPAPGVFAGFHYPQDLARPLFPSTGAAHPASNPFGPSAHPGSFLPTGPLTDPFSRPSTFGGLGSLSSHAFGGLGSHALAPGGSIFAPKEGSSVHGLPSPHEAWNRLHRAPPSFPAPPPWPKSVDAERVSALTNHDREPDNGKEEQERDLLEKTRLLSRASPATPAGHPVSGLLLRAQSELGRSGAPAEREAEPRVKESRSPAKEEAAKMPARASPPHSKAAPGDVKVKEERGEDEASEPPAGGLHPAPLQLGLGRERLGAPGFAWEPFRGLELPRRAFPAAAPAPGSAALLEPPERPYRDREPHGYSPERLRGELERARAPHLPPAAPALDGALLPSLGALHFPRLSPAALHNGLLARTPPAAAALGAPPPLVTAAGPPTPPGPPRSRTTPLGGLGPGEARDYSPSRNPPEVEAR

SEQ ID NO: 40050 - protein, 392 aa, Homo sapiens [sequence omitted]

SEQ ID NO: 40051 - protein, 522 aa, Homo sapiens [sequence omitted]

SEQ ID NO: 40052 - protein, 26 aa, Homo sapiens
MQKAVLSLTKMETFQKREVLLSQDSF

SEQ ID NO: 40053 - protein, 319 aa, Homo sapiens
MYAEALNTYQVIVKNKMFSNAGILKMNMGNIYLKQRNYSKAIKFYRMALDQVPSVNKQMRIKIMQNIGVTFIQADREKMKKAFQKLITVPLEIDEDKYISPSDDPHTNLVTEAIKNDHLRQMERERKAMAEKYIMTSAKLIAPVIETSFAAGYDWCVEVVKASQYVELANDLEINKAVTYLRQKDYNQAVEILKVLEKKDSRVKSAAATNLSALYYMGKDFAQASSYADIAVNSDRYNPAALTNKGNTVFANGDYEKAAEFYKEALRNDSSCTEALYNIGLTYEKLNRLDEALDCFLKLHAILRNSAEVLYQIANMYLI

SEQ ID NO: 40054 - protein, 285 aa, Homo sapiens [sequence omitted]

SEQ ID NO: 40055 - protein, 1335 aa, Homo sapiens
MPTSSELNSGQNFLTQWMTNPSRAGVILNRGFPILEADKEKRAAVDISTSFPIKGTHFSDSFSFINEEDSLLEEQKLESNNPYKPQSDKSETHTAFPCIKKGPQVAACHSAPGHQEENKNDFIPDLASEFKEGAYKDPLFKKLEQLKEVQQKKQEQLKRQQLEQLQRLMEEQEKLLTMVSGQCTLPGLSLLPDDQSQKHRSPGNTTTGERATCCFPSYVYPDPTQEETYPSNILSHEQSNFCRTAHGDFVLTSKRASPNLFSEAQYQEAPVEKNNLKEENRNHPTGESILCWEKVTEQIQEANDKNLQKHDDSSEVANIEERPIKAAIGERKQTFEDYLEEQIQLEEQELKQKQLKEAEGPLPIKAKPKQPFLKRGEGLARFTNAKSKFQKGKESKLVTNQSTSEDQPLFKMDRQQLQRKTALKNKELCADNPILKKDSKARTKSGSVTLSQKPKMLKCSNRKSLSPSGLKIQTGKKCDGQFRDQIKFENKVTSNNKENVTECPKPCDTGCTGWNKTQGKDRLPLSTGPASRLAAKSPIRETMKESESSLDVSLQKKLETWEREKEKENLELDEFLFLEQAADEISFSSNSSFVLKILERDQQICKGHRMSSTPVKAVPQKTNPADPISHCNRSEDLDHTAREKESECEVAPKQLHSLSSADELREQPCKIRKAVQKSTSENQTEWNARDDEGVPNSDSSTDSEEQLDVTIKPSTEDRERGISSREDSPQVCDDKGPFKDTRTQEDKRRDVDLDLSDKDYSSDESIMESIKHKVSEPSRSSSLSLSKMDFDDERTWTDLEENLCNHDVVLGNESTYGTPQTCYPNNEIGILDKTIKRKIAPVKRGEDLSKSRRSRSPPTSELMMKFFPSLKPKPKSDSHLGNELKLNISQDQPPGDNARSQVLREKIIELETEIEKFKAENASLAKLRIERESALEKLRKEIADFEQQKAKELARIEEFKKEEMRKLQKERKVFEKYTTAARTFPDKKEREEIQTLKQQIADLREDLKRKETKWSSTHSRLRSQIQMLVRENTDLREEIKVMERFRLDAWKRAEAIESSLEVEKKDKLANTSVRFQNSQISSGTQVEKYKKNYLPMQGNPPRRSKSAPPRDLGNLDKGQAASPREPLEPLNFPDPEYKEEEEDQDIQGEISHPDGKVEKVYKNGCRVILFPNGTRKEVSADGKTITVTFFNGDVKQVMPDQRVIYYYAAAQTTHTTYPEGLEVLHFSSGQIEKHYPDGRKEITFPDQTVKNLFPDGQEESIFPDGTIVRVQRDGNKLIEFNNGQRELHTAQFKRREYPDGTVKTVYANGHQETKYRSGRIRVKDKEGNVLMDTEL

SEQ ID NO: 40056 - protein, 631 aa, Homo sapiens
MRDHNLLGTPGEITSEELQQRLDGVKEQLASQPDLRDGTNYRDSEVPRESSHEDSLLEWLNTFRRTGNATRSGQNGNQTWRAVSRTNPNNGEFRFSLEIHVNHENRGFEIHGEDYTDIPLSDSNRDHTANRQQRSTSPVARRTRSQTSVNFNGSSSNIPRTRLASRGQNPAEGSFSTLGRLRNGIGGAAGIPRANASRTNFSSHTNQSGGSELRQREGQRFGAAHVWENGARSNVTVRNTNQRLEPIRLRSTSNSRSRSPIQRQSGTVYHNSQRESRPVQQTTRRSVRRRGRTRVFLEQDRERERRGTAYTPFSNSRLVSRITVEEGEESSRSSTAVRRHPTITLDLQVRRIRPGENRDRDSIANRTRSRVGLAENTVTIESNSGGFRRTISRLERSGIRTYVSTITVPLRRISENELVEPSSVALRSILRQIMTGFGELSSLMEADSESELQRNGQHLPDMHSELSNLGTDNNRSQHREGSSQDRQAQGDSTEMHGENETTQPHTRNSDSRGGRQLRNPNNLVETGTLPILRLAHFFLLNESDDDDRIRGLTKEQIDNLSTRHYEHNSIDSELGKICSVCISDYVTGNKLRQLPCMHEFHIHCIDRWLSENCTCPICRQPVLGSNIANNG

SEQ ID NO: 40057 - protein, 404 aa, Homo sapiens
MSACREIALLRELKHPNVISLQKVFLSHADRKVWLLFDYAEHDLWHIIKFHRASKANKKPVQLPRGMVKSLLYQILDGIHYLHANWVLHRDLKPANILVMGEGPERGRVKIADMGFARLFNSPLKPLADLDPVVVTFWYRAPELLLGARHYTKAIDIWAIGCIFAELLTSEPIFHCRQEDIKTSNPYHHDQLDRIFNVMGFPADKDWEDIKKMPEHSTLMKDFRRNTYTNCSLIKYMEKHKVKPDSKAFHLLQKLLTMDPIKRITSEQAMQDPYFLEDPLPTSDVFAGCQIPYPKREFLTEEEPDDKGDKKNQQQQQGNNHTNGTGHPGNQDSSHTQGPPLKKVRVVPPTTTSGGLIMTSDYQRSNPHAAYPNPGPSTSQPQSSMGYSATSQQPPQYSHQTHRY

SEQ ID NO: 40058 - protein, 78 aa, Homo sapiens
MQVSACVGRLPFFRKRGKYPHRLSVFSETIFFPRKKSLTVGVSLRQRRGQPTGPCKARAAAPPLSFRPEPPSSSNSPK

SEQ ID NO: 40059 - protein, 741 aa, Homo sapiens
MDGGALTDTSLTDSYFSTSFIGVNGFGSPVETKYPLMQRMTNSSSSPSLLNDSAKPYSAHDPLTSPASSLFNDFGALNISQRRKPRKYRLGMLEERLVPMGSKARKAKNPIGCLADRCKSGVPINMVWWNRVTENNLQTPNPTASEFIPKGGSTSRLSNVSQSNMSAFSQVFSHPSMGSPATAGLAPGMSLSAGSSPLHSPKITPHTSPAPRRRSHTPNPASYMVPSSASTSVNNPVSQTPSSGQVIQKETVGGTTYFYTDTTPAPLTGMVFPNYHIYPPTAPHVAYMQPKANAPSFFMADELRQELINRHLITMAQIDQADMPAVPTEVDSYHSLFPLEPLPPPNRIQKSSNFGYITSCYKAVNSKDDLPYCLRRIHGFRLVNTKCMVLVDMWKKIQHSNIVTLREVFTTKAFAEPSLVFAYDFHAGGETMMSRHFNDPNADAYFTKRKWGQHEGPLPRQHAGLLPESLIWAYIVQLSSALRTIHTAGLACRVMDPTKILITGKTRLRVNCVGVFDVLTFDNSQNNNPLALMAQYQQADLISLGKVVLALACNSLAGIQRENLQKAMELVTINYSSDLKNLILYLLTDQNRMRSVNDIMPMIGARFYTQLDAAQMRNDVIEEDLAKEVQNGRLFRLLAKLGTINERPEFQKDPTWSETGDRYLLKLFRDHLFHQVTEAGAPWIDLSHIISCLNKLDAGVPEKISLISRDEKSVLVVTYSDLKRCFENTFQELIAAANGQL

SEQ ID NO: 40060 - protein, 335 aa, Homo sapiens
MVKVKARVDRFGHVRCLVTRAAFNSAKVDIVAISDPFIDLNYMVYMFQYGSTHGKFHGTVKAENRKLVITGNLITIFQERDPSKIKWGDAGTEYSVESTSIFTIMEKSGAHLQGGAKRVILSAPSANTLMFVMGVTHENYDSSLKIISNASCTMNCLAPLAKVIRDNFGIMEGLMTTVHAVPATQKTVDGPSRRLWCDSHGALQNIIPAPSDAAKAVAKVIPELNGKLTGMAFCVPTANLSVVDLTCCLEKPAKYDDIKKVVKQVSEGPLKGILGYTEYQLVSSDFNSDTHSSTFDAGASIALNDHFFKLISWYDNEFGYSNRVMDLMAHMSSKE

SEQ ID NO: 40061 - protein, 395 aa, Homo sapiens
MPGNRPDVIESIDSQVLQEARPPLVSADDEIYSTSKAFIGPIYKPPEKKKRNEGRNEAHVLNGINDRGGQKEKQKFNSEKSEIDNELFQFYKEIEELEKEKDGFENSCKESEPSQEQFVPFYEGHNNGLLKPDEEKKDLSNKAMPSHCDYQQNLGNEPDKYPCNGQVIPTFCDTSFTSFRPEWQSVYPFIVPYGPPLPSLNYHLNIQRFSGPPNPPSNIFQAQDDSQIQNGYYVNNCHVNWNCMTFDQNNEYTDCSENRSSVHPSGNGCSMQDRYVSNGFCEVRERCWKDHCMDKHNGTDRFVNQQFQEEKLNKLQKLLILLRGLPGSGKTTLSRILLGQNRDGIVFSTDDYFHHQDGYRYNVNQLGDAHDWNQNRGLFWAKCPRIEYLARSQKT

SEQ ID NO: 40062 - protein, 534 aa, Homo sapiens [sequence omitted]

SEQ ID NO: 40063 - protein, 601 aa, Homo sapiens
MEDERQLGDPAIFPAVIVEHVPGADILNSYAGLACVEEPNDMITESSLDVAEEEIIDDDDDDITLTVEASCHDGDETIETIEAAEALLNMDSPGPMLDEKRINNNIFSSPEDDMVVAPVTHVSVTLDGIPEVMETQQVQEKYADSPGASSPEQPKRKKGRKTKPPRPDSPATTPNISVKKKNKDGKGNTIYLWEFLLALLQDKATCPKYIKWTQREKGIFKLVDSKAVSRLWGKHKNKPDMNYETMGRALRYYYQRGILAKVEGQRLVYQFKEMPKDLIYINDEDPSSSIESSDPSLSSSATSNRNQTSRSRVSSSPGVKGGATTVLKPGNSKAAKPKDPVEVAQPSEVLRTVQPTQSPYPTQLFRTVHVVQPVQAVPEGEAARTSTMQDETLNSSVQSIRTIQAPTQVPVVVSPRNQQLHTVTLQTVPLTTVIASTDPSAGTGSQKFILQAIPSSQPMTVLKENVMLQSQKAGSPPSIVLGPAQVQQVLTSNVQTICNGTVSVASSPSFSATAPVVTFSPRSSQLVAHPPGTVITSVIKTQETKTLTQEVEKKESEDHLKENTEKTEQQPQPYVMVVSSSNGFTSQVAMKQNELLEPNSF

SEQ ID NO: 40064 - protein, 1884 aa, Homo sapiens
MRLLLRQVVQRRPGGDRQRPEVRLLHAGSGADTGDTVNIGDVSYKLKIPKNPELVPQNYISDSLAQSVVQHLRWIMQKDLLGQDVFLIGPPGPLRRSIAMQYLELTKREVEYIALSRDTTETDLKQRREIRAGTAFYIDQCAVRAATEGRTLILEGLEKAERNVLPVLNNLLENREMQLEDGRFLMSAERYDKLLRDHTKKELDSWKIVRVSENFRVIALGLPVPRYSGNPLDPPLRSRFQARDIYYLPFKDQLKLLYSIGANVSAEKVSQLLSFATTLCSQESSTLGLPDFPLDSLAAAVQILDSFPMMPIKHAIQWLYPYSILLGHEGKMAVEGVLKRFELQDSGSSLLPKEIVKVEKMMENHVSQASVTIRIADKEVTIKVPAGTRLLSQPCASDRFIQTLSHKQLQAEMMQSHMVKDICLIGGKGCGKTVIAKNFADTLGYNIEPIMLYQDMTARDLLQQRYTLPNGDTAWRSSPLVNAALEGKLVLLDGIHRVNAGTLAVLQRLIHDRELSLYDGSRLLREDRYMRLKEELQLSDEQLQKRSIFPIHPSFRIIALAEPPVIGSTAHQWLGPEFLTMFFFHYMKPLVKSEEIQVIKEKVPNVPQEALDKLLSFTHKLRETQDPTAQSLAASLSTRQLLRISRRLSQYPNENLHSAVTKACLSRFLPSLARSALEKNLADATIEINTDDNLEPELKDYKCEVTSGTLRIGAVSAPIYNAHEKMKVPDVLFYDNIQHVIVMEDMLKDFLLGEHLLLVGNQGVGKNKIVDRFLHLLNRPREYIQLHRDTTVQTLTLQPSVKDGLIVYEDSPLVKAVKLGHILVVDEADKAPTNVTCILKTLVENGEMILADGRRIVANSANVNGRENVVVIHPDFRMIVLANRPGFPFLGNDFFGTLGDIFSCHAVDNPKPHSELEMLRQYGPNVPEPILQKLVAAFGELRSLADQGIINYPYSTREVVNIVKHLQKFPTEGLSSVVRNVFDFDSYNNDMREILINTLHKYGIPIGAKPTSVQLAKELTLPEQTFMGYWTIGQARSGMQKLLCPVETHHIDIKGPALINIQEYPIERHEERSLNFTEECASWRIPLDEINIICDIATSHENEQNTLYVVTCNPASLYFMNMTGKSGFFVDFFDIFPRTANGVWHPFVTVAPLGSPLKGQVVLHEQQSNVILLLDTTGRALHRLILPSEKFTSKKPFWWNKEEAETYKMCKEFSHKNWLVFYKEKGNSLTVLDVLEGRTHTISLPINLKTVFLVAEDKWLLVESKTNQKYLLTKPAHIESEGSGVCQLYVLKEEPPSTGFGVTQETEFSIPHKISSDQLSSEHLSSAVEQKIASPNRILSDEKNYATIVVGFPDLMSPSEVYSWKRPSSLHKRSGTDTSFYRGKKKRGTPKQSNCVTLLDTNQVVRILPPGEVPLKDIYPKDVTPPQTSGYIEVTDLQSKKLRYIPIPRSESLSPYTTWLSTISDTDALLAEWDKSGVVTVDMGGHIRLWETGLERLQRSLMEWRNMIGQDDRNMQITINRDSGEDVSSPKHGKEDPDNMPHVGGNTWAGGTGGRDTAGLGGKGGPYRLDAGHTVYQVSQAEKDAVPEEVKRAAREMGQRAFQQRLKEIQMSEYDAATYERFSGAVRRQVHSLRIILDNLQAKGKERQWLRHQATGELDDAKIIDGLTGEKAIYKRRGELEPQLGSPQQKPKRLRLVVDVSGSMYRFNRMDGRLERTMEAVCMVMEAFENYEEKFQYDIVGHSGDGYNIGLVPMNKIPKDNKQRLEILKTMHAHSQFCMSGDHTLEGTEHAIKEIVKEEADEYFVIVLSDANLSRYGIHPAKFAQILTRDPQVNAFAIFIGSLGDQATRLQRTLPAGRSFVAMDTKDIPQILQQIFTSTMLSSV

SEQ ID NO: 40065 - protein, 334 aa, Homo sapiens [sequence omitted]

SEQ ID NO: 40066 - protein, 164 aa, Homo sapiens [sequence omitted]

SEQ ID NO: 40067 - protein, 1177 aa, Homo sapiens
MAEIRRRSQKPEAGGCGAPAAREVILVLSAPFLRCVPAPGAGASGGTSPSATQPNPAVFIFEHKAQHISRFIHNSHDLTYFAYLIKAQPDDPESQMACHVFRATDPSQVPDVISSIRQLSKAAMKEDAKPSKDNEDAFYNSQKFEVLYCGKVTVTHKKAPSSLIDDCMEKFSLHEQQRLKIQGEQRGPDPGEDLADLEVVVPGSPGDCLPEEADGTDTHLGLPAGASQPALTSSRVCFPERILEDSGFDEQQEFRSRCSSVTGVQRRVHEGSQKSQPRRRHASAPSHVQPSDSEKNRTMLFQVGRFEINLISPDTKSVVLEKNFKDISSCSQGIKHVDHFGFICRESPEPGLSQYICYVFQCASESLVDEVMLTLKQAFSTAAALQSAKTQIKLCEACPMHSLHKLCERIEGLYPPRAKLVIQRHLSSLTDNEQADIFERVQKMKPVSDQEENELVILHLRQLCEAKQKTHVHIGEGPSTISNSTIPENATSSGRFKLDILKNKAKRSLTSSLENIFSRGANRMRGRLGSVDSFERSNSLASEKDYSPGDSPPGTPPASPPSSAWQTFPEEDSDSPQFRRRAHTFSHPPSSTKRKLNLQDGRAQGVRSPLLRQSSSEQCSDGEGRKRTSSTCSNESLSVGGTSVTPRRISWRQRIFLRVASPMNKSPSAMQQQDGLDRNELLPLSPLSPTMEEEPLVVFLSGEDDPEKIEERKKSKELRSLWRKAIHQQILLLRMEKENQKLEASRDELQSRKVKLDYEEVGACQKEVLITWDKKLLNCRAKIRCDMEDIHTLLKEGVPKSRRGEIWQFLALQYRLRHRLPNKQQPPDISYKELLKQLTAQQHAILVDLGRTFPTHPYFSVQLGPGQLSLFNLLKAYSLLDKEVGYCQGISFVAGVLLLHMSEEQAFEMLKFLMYDLGFRKQYRPDMMSLQIQMYQLSRLLHDYHRDLYNHLEENEISPSLYAAPWFLTLFASQFSLGFVARVFDIIFLQGTEVIFKVALSLLSSQETLIMECESFENIVEFLKNTLPDMNTSEMEKIITQVFEMDISKQLHAYEVEYHVLQDELQESSYSCEDSETLEKLERANSQLKRQNMDLLEKLQVAHTKIQALESNLENLLTRETKMKSLIRTLEQEKMAYQKTVEQLRKLLPADALVNCDLLLRDLNCNPNNKAKIGNKP

SEQ ID NO: 40068 - protein, 1334 aa, Homo sapiens
MSYDVLFQRTELGALEIWRQLICAHVCICVGWLYLRDRVCSKKDIILRTEQNSGRTILIKAVTEKNFETKDFRASLENGVLLCDLINKLKPGVIKKINRLSTPIAGLDNINVFLKACEQIGLKEAQLFHPGDLQDLSNRVTVKQEETDRRVKNVLITLYWLGRKAQSNPYYNGPHLNLKAFENLLGQALTKALEDSSFLKRSGRDSGYGDIWCPERGEFLAPPRHHKREDSFESLDSLGSRSLTSCSSDITLRGGREGFESDTDSEFTFKMQDYNKDDMSYRRISAVEPKTALPFNRFLPNKSRQPSYVPAPLRKKKPDKHEDNRRSWASPVYTEADGTFSRLFQKIYGENGSKSMSDVSAEDVQNLRQLRYEEMQKIKSQLKEQDQKWQDDLAKWKDRRKSYTSDLQKKKEEREEIEKQALEKSKRSSKTFKEMLQDRESQNQKSTVPSRRRMYSFDDVLEEGKRPPTMTVSEASYQSERVEEKGATYPSEIPKEDSTTFAKREDRVTTEIQLPSQSPVEEQSPASLSSLRSRSTQMESTRVSASLPRSYRKTDTVRLTSVVTPRPFGSQTRGISSLPRSYTMDDAWKYNGDVEDIKRTPNNVVSTPAPSPDASQLASSLSSQKEVAATEEDVTRLPSPTSPFSSLSQDQAATSKATLSSTSGLDLMSESGEGEISPQREVSRSQDQFSDMRISINQTPGKSLDFGFTIKWDIPGIFVASVEAGSPAEFSQLQVDDEIIAINNTKFSYNDSKEWEEAMAKAQETGHLVMDVRRYGKAGSPETKWIDATSGIYNSEKSSNLSVTTDFSESLQSSNIESKEINGIHDESNAFESKASESISLKNLKRRSQFFEQGSSDSVVPDLPVPTISAPSRWVWDQEEERKRQERWQKEQDRLLQEKYQREQEKLREEWQRAKQEAERENSKYLDEELMVLSSNSMSLTTREPSLATWEATWSEGSKSSDREGTRAGEEERRQPQEEVVHEDQGKKPQDQLVIERERKWEQQLQEEQEQKRLQAEAEEQKRPAEEQKRQAEIERETSVRIYQYRRPVDSYDIPKTEEASSGFLPGDRNKSRSTTELDDYSTNKNGNNKYLDQIGNMTSSQRRSKKEQVPSGAELERQQILQEMRKRTPLHNDNSWIRQRSASVNKEPVSLPGIMRRGESLDNLDSPRSNSWRQPPWLNQPTGFYASSSVQDFSRPPPQLVSTSNRAYMRNPSSSVPPPSAGSVKTSTTGVATTQSPTPRSHSPSASQSGSQLRNRSVSGKRICSYCNNILGKGAAMIIESLGLCYHLHCFKCVACECDLGGSSSGAEVRIRNHQLYCNDCYLRFKSGRPTAM

SEQ ID NO: 40069 - protein, 1011 aa, Homo sapiens
MSLPSGSSLQQMALRCWSLKFKQSDHQFLHQSNVFHHINNILSKSDDGDSEESFSISIQSGFEAMSQELCIVMCLKDLTSIVDIKTSSRPAMIGSLTDGSTETFWESGDEDKNKTKNITINCVKGINARYVSVHVDNSRDLGNKVTSMTFLTGKAVEDLCRIKQVDLDSRHIGWVTSELPGGDNHIIKIELKGPENTLRVRQVKVLGWKDGESTKIAGQISASVAQQRNCEAETLRVFRLITSQVFGKLISGDAEPTPEQEEKALLSSPEGEEKATSDADLKEHMVGIIFSRSKLTNLQKQVCAHIVQAIRMEATRVREEWEHAISSKENANSQPNDEDASSDAYCFELLSMVLALSGSNVGRQYLAQQLTLLQDLFSLLHTASPRVQRQVTSLLRRVLPEVTPSRLASIIGVKSLPPADISDIIHSTEKGDWNKLGILDMFLGCIAKALTVQLKAKGTTITGTAGTTVGKGVTTVTLPMIFNSSYLRRGESHWWMKGSTPTQISEIIIKLIKDMAAGHLSEAWSRVTKNAIAETIIALTKMEEEFRSPVRCIATTRLWLALASLCVLDQDHVDRLSSGRWMGKDGQQKQMPMCDNHDDGETAAIILCNVCGNLCTDCDRFLHLHRRTKTHQRQVFKEEEEAIKVDLHEGCGRTKLFWLMALADSKTMKAMVEFREHTGKPTTSSSEACRFCGSRSGTELSAVGSVCSDADCQEYAKIACSKTHPCGHPCGGVKNEEHCLPCLHGCDKSATSLKQDADDMCMICFTEALSAAPAIQLDCSHIFHLQCCRRVLENRWLGPRITFGFISCPICKNKINHIVLKDLLDPIKELYEDVRRKALMRLEYEGLHKSEAITTPGVRFYNDPAGYAMNRYAYYVCYKCRKAYFGGEARCDAEAGRGDDYDPRELICGACSDVSRAQMCPKHGTDFLEYKCRYCCSVAVFFCFGTTHFCNACHDDFQRMTSIPKEELPHCPAGPKGKQLEGTECPLHVVHPPTGEEFALGCGVCRNAHTF

SEQ ID NO: 40070 - protein, 1282 aa, Homo sapiens
MYSVLPEDRSQHLGEELQGFWDKEVLRAENDAQKPSLTRAIIKCYWKSYLVLGIFTLIEESAKVIQPIFLGKIINYFENYDPMDSVALNTAYAYATVLTFCTLILAILHHLYFYHVQCAGMRLRVAMCHMIYRKALRLSNMAMGKTTTGQIVNLLSNDVNKFDQVTVFLHFLWAGPLQAIAVTALLWMEIGISCLAGMAVLIILLPLQSCFGKLFSSLRSKTATFTDARIRTMNEVITGIRIIKMYAWEKSFSNLITNLRKKEISKILRSSCLRGMNLASFFSASKIIVFVTFTTYVLLGSVITASRVFVAVTLYGAVRLTVTLFFPSAIERVSEAIVSIRRIQTFLLLDEISQRNRQLPSDGKKMVHVQDFTAFWDKASETPTLQGLSFTVRPGELLAVVGPVGAGKSSLLSAVLGELAPSHGLVSVHGRIAYVSQQPWVFSGTLRSNILFGKKYEKERYEKVIKACALKKDLQLLEDGDLTVIGDRGTTLSGGQKARVNLARAVYQDADIYLLDDPLSAVDAEVSRHLFELCICQILHEKITILVTHQLQYLKAASQILILKDGKMVQKGTYTEFLKSGIDFGSLLKKDNEESEQPPVPGTPTLRNRTFSESSVWSQQSSRPSLKDGALESQDTENVPVTLSEENRSEGKVGFQAYKNYFRAGAHWIVFIFLILLNTAAQVAYVLQDWWLSYWANKQSMLNVTVNGGGNVTEKLDLNWYLGIYSGLTVATVLFGIARSLLVFYVLVNSSQTLHNKMFESILKAPVLFFDRNPIGRILNRFSKDIGHLDDLLPLTFLDFIQTLLQVVGVVSVAVAVIPWIAIPLVPLGIIFIFLRRYFLETSRDVKRLESTTRSPVFSHLSSSLQGLWTIRAYKAEERCQELFDAHQDLHSEAWFLFLTTSRWFAVRLDAICAMFVIIVAFGSLILAKTLDAGQVGLALSYALTLMGMFQWCVRQSAEVENMMISVERVIEYTDLEKEAPWEYQKRPPPAWPHEGVIIFDNVNFMYSPGGPLVLKHLTALIKSQEKVGIVGRTGAGKSSLISALFRLSEPEGKIWIDKILTTEIGLHDLRKKMSIIPQEPVLFTGTMRKNLDPFNEHTDEELWNALQEVQLKETIEDLPGKMDTELAESGSNFSVGQRQLVCLARAILRKNQILIIDEATANVDPRTDELIQKKIREKFAHCTVLTIAHRLNTIIDSDKIMVLDSGRLKEYDEPYVLLQNKESLFYKMVQQLGKAEAAALTETAKQVYFKRNYPHIGHTDHMVTNTSNGQPSTLTIFETAL

SEQ ID NO: 40071 - protein, 393 aa, Homo sapiens
MLEAPYKKEEDEQQRKEVKKDYPSNTTSSTSNSGNETSGSSTIGETSNRSRDRDRYRRRNSRSRSPGRQCRHRSRSWDRRHGSESRSRDHRREDRVHYRSPPLATGEPVDNLSPEERDARTVFCMQLAARIRPRDLEDFFSAVGKVRDVRIISDRNSRRSKGIAYVEFCEIQSVPLAIGLTGQRLLGVPIIVQASQAEKNRLAAMANNLQKGNGGPMRLYVGSLHFNITEDMLRGIFEPFGKIDNIVLMKDSDTGRSKGYGFITFSDSECARRALEQLNGFELAGRPMRVGHVTERLDGGTDITFPDGDQELDLGSAGGRFQLMAKLAEGAGIQLPSTAAAAAAAAAQAAALQLNGAVPLGALNPAALTALSPALNLASQCFQLSSLFTPQTM

SEQ ID NO: 40072 - protein, 177 aa, Homo sapiens [sequence omitted]

SEQ ID NO: 40073 - protein, 1270 aa, Homo sapiens
MAELEEVTLDGKPLQALRVTDLKAALEQRGLAKSGQKSALVKRLKGALMLENLQKHSTPHAAFQPNSQIGEEMSQNSFIKQYLEKQQELLRQRLEREAREAAELEEASAESEDEMIHPEGVASLLPPDFQSSLERPELELSRHSPRKSSSISEEKGDSDDEKPRKGERRSSRVRQARAAKLSEGSQPAEEEEDQETPSRNLRVRADRNLKTEEEEEEEEEEEEDDEEEEGDDEGQKSREAPILKEFKEEGEEIPRVKPEEMMDERPKTRSQEQEVLERGGRFTRSQEEARKSHLARQQQEKEMKTTSPLEEEEREIKSSQGLKEKSKSPSPPRLTEDRKKASLVALPEQTASEEETPPPLLTKEASSPPPHPQLHSEEEIEPMEGPAPAVLIQLSPPNTDADTRELLVSQHTVQLVGGLSPLSSPSDTKAESPAEKVPEESVLPLVQKSTLADYSAQKDLEPESDRSAQPLPLKIEELALAKGITEECLKQPSLEQKEGRRASHTLLPSHRLKQSADSSSSRSSSSSSSSSRSRSRSPDSSGSRSHSPLRSKQRDVAQARTHANPRGRPKMGSRSTSESRSRSRSRSRSASSNSRKSLSPGVSRDSSTSYTETKDPSSGQEVATPPVPQLQVCEPKERTSTSSSSVQARRLSQPESAEKHVTQRLQPERGSPKKCEAEEAEPPAATQPQTSETQTSHLPESERIHHTVEEKEEVTMDTSENRPENDVPEPPMPIADQVSNDDRPEGSVEDEEKKESSLPKSFKRKISVVSTKGVPAGNSDTEGGQPGRKRRWGASTATTQKKPSISITTESLKEAVVDLHADDSRISEDETERNGDDGTHDKGLKICRTVTQVVPAEGQENGQREEEEEEKEPEAEPPVPPQVSVEVALPPPAEHEVKKVTLGDTLTRRSISQQKSGVSITIDDPVRTAQVPSPPRGKISNIVHISNLVRPFTLGQLKELLGRTGTLVEEAFWIDKIKSHCFVTYSTVEEAVATRTALHGVKWPQSNPKFLCADYAEQDELDYHRGLLVDRPSETKTEEQGIPRPLHPPPPPPVQPPQHPRAEQREQERAVREQWAEREREMERRERTRSEREWDRDKVREGPRSRSRSRDRRRKERAKSKEKKSEKKEKAQEEPPAKLLDDLFRKTKAAPCIYWLPLTDSQIVQKEAERAERAKEREKRRKEQEEEEQKEREKEAERERNRQLEREKRREHSRERDRERERERERDRGDRDRDRERDRERGRERDRRDTKRHSRSRSRSTPVRDRGGRR

SEQ ID NO: 40074 - protein, 526 aa, Homo sapiens
MPPNKEASGLSSSPAGLICLPPISEELQLVWTQAAQTSELDSNEHLLKTFSYFPYPSLADIALLCLRYGLQMEKVKTWFMAQRLRCGISWSSEEIEETRARVVYRRDQLHFKSLLSFTHHAGRPPEEVPPPPVPAPEQVGIGIGPPTLSKPTQTKGLKVEPEEPSQMPPLPQSHQKLKESLMTPGSGAFPYQSDFWQHLQSSGLSKEQAGRGPNQSHGIGTASWNHSTTVPQPQARDKPPPIALIASSCKEESASSVTPSSSSTSSSFQVLANGATAASKPLQPLGCVPQSVSPSEQALPPHLEPAWPQGLRHNSVPGRVGPTEYLSPDMQRQRKTKRKTKEQLAILKSFFLQCQWARREDYQKLEQITGLPRPEIIQWFGDTRYALKHGQLKWFRDNAVPGAPSFQDPAIPTPPPSTRSLNERAETPPLPIPPPPPDIQPLERYWAAHQQLRETDIPQLSQASRLSTQQVLDWFDSRLPQPAEVVVCLDEEEEEEEEELPEDDEEEEEEEEEDDDDDDDDVIIQD

SEQ ID NO: 40075 - protein, 71 aa, Homo sapiens
MVRLSVSKREKGRRKRANVMSSQLHSLTHFSDISALTGGTVHLDEDQNPIKKRKKIPQKGRKKKALECLCY

SEQ ID NO: 40076 - protein, 33 aa, Homo sapiens
MARLPKLAVFDLDYTLWPFWVDTHVDPPFHKSR

SEQ ID NO: 40077 - protein, 15 aa, Homo sapiens
MLIKVKGTCFSQSLT

SEQ ID NO: 40078 - protein, 197 aa, Homo sapiens
MGQDAPPRGAVRERRRPPPPAPAPRPPPPPGSQRARRAAGRPASPTPPERSPRADPGAAPLCSRLASTSPPAPAGSRATLTCDHADCHLSTFSTTKATRGDPVLPGDRLSPAPPRPWLPLLPLPLPDSARGIASHRHFPASRSSWEVSDLLSALKEEELLGGAFHSSLLPFYWLLDDFYSLSLIQEETAESLGELHY

SEQ ID NO: 40079 - protein, 732 aa, Homo sapiens [sequence omitted]

SEQ ID NO: 40080 - protein, 254 aa, Homo sapiens
MAWVPAESAVEELMPRLLPVEPCDLTEGFDPSVPPRTPQEYLRRVQIEAAQCPDVVVAQIDPKKLKRKQSVNISLSGCQPAPEGYSPTLQWQQQQVAQFSTVRQNVNKHRSHWKSQQLDSNVTMPKSEDEEGWKKFCLGEKLCADGAVGPATNESPGIDYVQATVTSVLEYLSNWFGERDFTPELGRWLYALLACLEKPLLPEAHSLIRQLARRCSEVRLLVDSKDDERVPALNLLICLVSRYFDQRDLADEPS

SEQ ID NO: 40081 - protein, 269 aa, Homo sapiens
MAWVPAESAVEELMPRLLPVEPCDLTEGFDPSVPPRTPQEYLRRVQIEAAQCPDVVVAQIDPKKLKRKQSVNISLSGCQPAPEGYSPTLQWQQQQVAQFSTVRQNVNKHRSHWKSQQLDSNVTMPKSEDEEGWKKFCLGEKLCADGAVGPATNESPGIDYVQIGFPPLLSIVSRMNQATVTSVLEYLSNWFGERDFTPELGRWLYALLACLEKPLLPEAHSLIRQLARRCSEVRLLVDSKDDERVPALNLLICLVSRYFDQRDLADEPS

SEQ ID NO: 40082 - protein, 383 aa, Homo sapiens [sequence omitted]

SEQ ID NO: 40083 - protein, 1272 aa, Homo sapiens [sequence omitted]

SEQ ID NO: 40084 - protein, 357 aa, Homo sapiens
MEKYEKIGKIGEGSYGVVFKCRNRDTGQIVAIKKFLESEDDPVIKKIALREIRMLKQLKHPNLVNLLEVFRRKRRLHLVFEYCDHTVLHELDRYQRGVPEHLVKSITWQTLQAVNFCHKHNCIHRDVKPENILITKHSVIKLCDFGFARLLTGPSDYYTDYVATRWYRSPELLVGDTQYGPPVDVWAIGCVFAELLSGVPLWPGKSDVDQLYLIRKTLGDLIPRHQQVFSTNQYFSGVKIPDPEDMEPLELKFPNISYPALGLLKGCLHMDPTQRLTCEQLLHHPYFENIREIEDLAKEHNKPTRKTLRKSRKHHCFTETSKLQYLPQLTGSSILPALDNKKYYCDTKKLNYRFPNI

SEQ ID NO: 40085 - protein, 603 aa, Homo sapiens
MQDRRSVCIFLPNDESLNIIINVKILCHQLLVQVCDLLRLKDCHLFGLSVIQNNEHVYMELSQKLYKYCPKEWKKEASKGIDQFGPPMIIHFRVQYYVENGRLISDRAARYYYYWHLRKQVLHSQCVLREEAYFLLAAFALQADLGNFKRNKHYGKYFEPEAYFPSWVVSKRGKDYILKHIPNMHKDQFALTASEAHLKYIKEAVRLDDVAVHYYRLYKDKREIEASLTLGLTMRGIQIFQNLDEEKQLLYDFPWTNVGKLVFVGKKFEILPDGLPSARKLIYYTGCPMRSRHLLQLLSNSHRLYMNLQPVLRHIRKLEENEEKKQYRESYISDNLDLDMDQLEKRSRASGSSAGSMKHKRLSRHSTASHSSSHTSGIEADTKPRDTGPEDSYSSSAIHRKLKTCSSMTSHGSSHTSGVESGGKDRLEEDLQDDEIEMLVDDPRDLEQMNEESLEVSPDMCIYITEDMLMSRKLNGHSGLIVKEIGSSTSSSSETVVKLRGQSTDSLPQTICRKPKTSTDRHSLSLDDIRLYQKDFLRIAGLCQDTAQSYTFGCGHELDEEGLYCNSCLAQQCINIQDAFPVKRTSKYFSLDLTHDEVPEFVV

SEQ ID NO: 40086 - protein, 50 aa, Homo sapiens
MKSFEHMKKSGDYYVTVVEDVTLGQIVATATLIIEHKFIHSCAKVCAAYK

SEQ ID NO: 40087 - protein, 659 aa, Homo sapiens
MVELVNIEPVCVRGGLYEVDVTQGECYPVYWNQADKIPVMRGQWFIDGTWQPLEEEESNLIEQEHLNCFRGQQMQENFDIEVSKSIDGKDVVYHLPPFSLPSLFKWRRYKESTDATGLKRKHSQAVHSFKLSRNHVDWHSVDEVYLYSDATTSKIARTVTQKLGFSKASSSGTRLHRGYVEEATLEDKPSQTTHIVFVVHGIGQKMDQGRIIKNTAMMREAARKIEERHFSNHATHVEFLPVEWRSKLTLDGDTVDSITPDKVRGLRDMLNSSAMDIMYYTSPLYRDELVKGLQQELNRLYSLFCSRNPDFEEKGGKVSIVSHSLGCVITYDIMTGWNPVRLYEQLLQKEEELPDERWMSYEERHLLDELYITKRRLKEIEERLHGLKASSMTQTPALKFKVENFFCMGSPLAVFLALRGIRPGNTGSQDHILPREICNRLLNIFHPTDPVAYRLEPLILKHYSNISPVQIHWYNTSNPLPYEHMKPSFLNPAKEPTSVSENEGISTIPSPVTSPVLSRRHYGESITNIGKASILGAASIGKGLGGMLFSRFGRSSTTQSSETSKDSMEDEKKPVASPSATTVGTQTLPHSSSGFLDSALELDHRIDFELREGLVESRYWSAVTSHTAYWSSLDVALFLLTFMYKHEHDDDAKPNLDPI

SEQ ID NO: 40088 - protein, 36 aa, Homo sapiens
MAAVTRTTPVKLRSGRYIQKVPRRNFLLEKMKKQYL

SEQ ID NO: 40089 - protein, 49 aa, Homo sapiens
MRWMWWLFSFFIKTPQQGAQTSLHCALTEGLEILSGNHFRRKEEIDQGF

SEQ ID NO: 40090 - protein, 59 aa, Homo sapiens [sequence omitted]

SEQ ID NO: 40091 - protein, 31 aa, Homo sapiens
MEEFTHVCTRGDACFSQEQDSRLWSPHVDGS

SEQ ID NO: 40092 - protein, 2096 aa, Homo sapiens
MSFREQHLAQLQQLQQMHQKQMQCVLQPHHLPPPPLPPPPVMPGGGYGDWQPPPPPMPPPPGPALSYQKQQQYKHQMLHHQRDGPPGLVPMELESPPESPPVPPGSYMPPSQSYMPPPQPPPSYYPPTSSQPYLPPAQPSPSQSPPSQSYLAPTPSYSSSSSSSQSYLSHSQSYLPSSQASPSRPSQGHSKSQLLAPPPPSAPPGNKTTVQQEPLESGAKNKSTEQQQAAPEPDPSTMTPQEQQQYWYRQHLLSLQQRTKVHLPGHKKGPVVAKDTPEPVKEEVTVPATSQVPESPSSEEPPLPPPNEEVPPPLPPEEPQSEDPEEDARLKQLQAAAAHWQQHQQHRVGFQYQGIMQKHTQLQQILQQYQQIIQPPPHIQTMSVDMQLRHYEMQQQQFQHLYQEWEREFQLWEEQLHSYPHKDQLQEYEKQWKTWQGHMKATQSYLQEKVNSFQNMKNQYMGNMSMPPPFVPYSQMPPPLPTMPPPVLPPSLPPPVMPPALPATVPPPGMPPPVMPPSLPTSVPPPGMPPSLSSAGPPPVLPPPSLSSAGPPPVLPPPSLSSTAPPPVMPLPPLSSATPPPGIPPPGVPQGIPPQLTAAPVPPASSSQSSQVPEKPRPALLPTPVSFGSAPPTTYHPPLQSAGPSEQVNSKAPLSKSALPYSSFSSDQGLGESSAAPSQPITAVKDMPVRSGGLLPDPPRSSYLESPRGPRFDGPRRFEDLGSRCEGPRPKGPRFEGNRPDGPRPRYEGHPAEGTKSKWGMIPRGPASQFYITPSTSLSPRQSGPQWKGPKPAFGQQHQQQPKSQAEPLSGNKEPLADTSSNQQKNFKMQSAAFSIAADVKDVKAAQSNENLSDSQQEPPKSEVSEGPVEPSNWDQNVQSMETQIDKAQAVTQPVPLANKPVPAQSTFPSKTGGMEGGTAVATSSLTADNDFKPVGIGLPHSENNQDKGLPRPDNRDNRLEGNRGNSSSYRGPGQSRMEDTRDKGLVNRGRGQAISRGPGLVKQEDFRDKMMGRREDSREKMNRGEGSRDRGLVRPGSSREKVPGGLQGSQDRGAAGSRERGPPRRAGSQERGPLRRAGSRERIPPRRAGSRERGPPRGPGSRERGLGRSDFGRDRGPFRPEPGDGGEKMYPYHRDEPPRAPWNHGEERGHEEFPLDGRNAPMERERLDDWDRERYWRECERDYQDDTLELYNREDRFSAPPSRSHDGDRRGPWWDDWERDQDMDEDYNREMERDMDRDVDRISRPMDMYDRSLDNEWDRDYGRPLDEQESQFRERDIPSLPPLPPLPPLPPLDRYRDDRWREERNREHGYDRDFRDRGELRIREYPERGDTWREKRDYVPDRMDWERERLSDRWYPSDVDRHSPMAEHMPSSHHSSEMMGSDASLDSDQGLGGVMVLSQRQHEIILKAAQELKMLREQKEQLQKMKDFGSEPQMADHLPPQESRLQNTSSRPGMYPPPGSYRPPPPMGKPPGSIVRPSAPPARSSVPVTRPPVPIPPPPPPPPLPPPPPVIKPQTSAVEQERWDEDSFYGLWDTNDEQGLNSEFKSETAAIPSAPVLPPPPVHSSIPPPGPVPMGMPPMSKPPPVQQTVDYGHGRDISTNKVEQIPYGERITLRPDPLPERSTFETEHAGQRDRYDRERDREPYFDRQSNVIADHRDFKRDRETHRDRDRDRGVIDYDRDRFDRERRPRDDRAQSYRDKKDHSSSRRGGFDRPSYDRKSDRPVYEGPSMFGGERRTYPEERMPLPAPSLSHQPPPAPRVEKKPESKNVDDILKPPGRESRPERIVVIMRGLPGSGKTHVAKLIRDKEVEFGGPAPRVLSLDDYFITEVEKEEKDPDSGKKVKKKVMEYEYEAEMEETYRTSMFKTFKKTLDDGFFPFIILDAINDRVRHFDQFWSAAKTKGFEVYLAEMSADNQTCGKRNIHGRKLKEINKMADHWETAPRHMMRLDIRSLLQDAAIEEVEMEDFDANIEEQKEEKKDAEEEESELGYIPKSKWEMDTSEAKLDKLDGLRTGTKRKRDWEAIASRMEDYLQLPDDYDTRASEPGKKRVRWADLEEKKDADRKRAIGFVVGQTDWEKITDESGHLAEKALNRTKYI

SEQ ID NO: 40093 - protein, 635 aa, Homo sapiens
MAKADSKLPAEIYQEPQPETEEEDFKEGEPDSAKNVQLKPGGTSQEGIAKESKRDVPSETEPGIHQEVKSETSREMGEFFKDLEAPMDETHKESDLEPPEEAKPNVTEDVFLESAMETDPDPVPPTETMSEVSGATVRERNLELLEEETEPGVPEESLRVQHEETGLEPPEQTKQDFPSEKLGESLEETDLQPPKMTKPETPEETQRESTEKKRTEPPEQARLEFLEKEPRKSSEEAGLEPPEETQPEVPEEMQRKATEEKGTELPERTKPDFPDHKPRKSTDENVPEPLEEIKLEFPEEESRKTNEETILEQSEMMKPESPEEIRKSNEKKNPQPPEETGPVLPQEINPQVEEKTQTKPTEKILELPDETKPRETHVEFSKEDRPEPIKSKYSVGNDELEHREPKRGKLSLSDKFRKEYYALGSLRESEESIGTHYEFLQPLQKLLNVSEECSYSDPSESQTELSEFVHEKEVVDLSQELKERVSEDDETQPEKGTELQFEHLNWDPEEVAEWISQLGFPQYKECFITNFISGRKLIHVNCSNLPQMGITNFEDMKAISRHTQELLEIEEPLFKRSISLPYRDIIGLYLEQKGHTGIKSDSLTLSEFVKAAGLQDYAPEITAPEENEELPCTEP

SEQ ID NO: 40094 - protein, 580 aa, Homo sapiens
MSTVKPLREPAPSEDVIDIKPEPDDLIDEDLNFVQENPLSQKKPTVTLTYGSSRPSIEIYRPPASRNADSGVHLNRLQFQQQQNSIHAAKQLDMQSSWVYETGRLCEPEVLNSLEETYSPFFRNNSEKMSMEDENFRKRKLPVVSSVVKVKKFNHDGEEEEEDDDYGSRTGSISSSVSVPAKPERRPSLPPSKQANKNLILKAISEAQESVTKTTNYSTVPQKQTLPVAPRTRTSQEELLAEVVQGQSRTPRISPPIKEEETKGDSVEKNQGTQQRQLLSRLQIDPVMAETLQMSQDYYDMESMVHADTRSFILKKPKLSEEVVVAPNQESGMKTADSLRVLSGHLMQTRDLVQPDKPASPKFIVTLDGVPSPPGYMSDQEEDMCFEGMKPVNQTAASNKGLRGLLHPQQLHLLSRQLEDPNGSFSNAEMSELSVAQKPEKLLERCKYWPACKNGDECAYHHPISPCKAFPNCKFAEKCLFVHPNCKYDAKCTKPDCPFTHVSRRIPVLSPKPVAPPAPPSSSQLCRYFPACKKMECPFYHPKHCRFNTQCTRPDCTFYHPTINVPPRHALKWIRPQTSE

SEQ ID NO: 40095 - protein, 1001 aa, Homo sapiens
MADLYEYKYCTDVDLIFQETCFPVHRAILAARCPFFKTLLSSSPEYGAEIIMDINTAGIDMPMFSALLHYLYTGEFGMEDSRFQNVDILVQLSEEFGTPNSLDVDMRGLFDYMCYYDVVLSFSSDSELVEAFGGNQNCLDEELKAHKAVISARSPFFRNLLQRRIRTGEEITDRTLRTPTRIILDESIIPKKYATVILHCMYTDVVDLSVLHCSPSVGSLSEVQALVAGKPNMTRAEEAMELYHIALFLEFNMLAQGCEDIIAESISLDTLIAILKWSSHPYGSKWVHRQALHFLCEEFSQVMTSDVFYELSKDHLLTAIQSDYLQASEQDILKYLIKWGEHQLMKRIADREPNLLSGTAHSVNKRGVKRRDLDMEELREILSSLLPFVRIEHILPINSEVLSDAMKRGLISTPPSDMLPTTEGGKSNAWLRQKNAGIYVRPRLFSPYVEEAKSVLDEMMVEQTDLVRLRMVRMSNVPDTLYMVNNAVPQCCHMISHQQISSNQSSPPSVVANEIPVPRLLIMKDMVRRLQELRHTEQVQRAYALNCGEGATVSYEIQIRVLREFGLADAAAELLQNPHKFFPDERFGDESPLLTMRQPGRCRVNSTPPAETMFTDLDSFVAFHPPLPPPPPPYHPPATPIHNQLKAGWKQRPPSQHPSRSFSYPCNHSLFHSRTAPKAGPPPVYLPSVKAAPPDCTSTAGLGRQTVAAAAATTTSTATAAAAAASEKQVRTQPVLNDLMPDIAVGVSTLSLKDRRLPELAVDTELSQSVSEAGPGPPQHLSCIPQRHTHTSRKKHTLEQKTDTRENPQEYPDFYDFSNAACRPSTPALSRRTPSPSQGGYFGPDLYSHNKASPSGLKSAYLPGQTSPKKQEEARREYPLSPDGHLHRQKNEPIHLDVVEQPPQRSDFPLAAPENASTGPAHVRGRTAVETDLTFGLTPNRPSLSACSSEAPEERSGRRLADSESLGHGAQRNTDLEREDSISRGRRSPSKPDFLYKKSAL

SEQ ID NO: 40096 - protein, 253 aa, Homo sapiens
MFSIDNILAARPRCKDSVLPVAHSAAAPVVFPALHGDSLYGASGGASSDYGAFYPRPVAPGGAGLPAAVSGSRLGYNNYFYGQLHVQAAPVGPACCGAVPPLGAQQCSCVPTPPGYEGPGSVLVSPVPHQMLPYMNVGTLSRTELQLLNQLHCRRKRRHRTIFTDEQLEALENLFQETKYPDVGTREQLARKVHLREEKVEVWFKNRRAKWRRQKRSSSEESENAEKWNKTSSSKASPEKREEEGKSDLDSDS

SEQ ID NO: 40097 - protein, 97 aa, Homo sapiens
MSLFDENELLRSHWYLYWGNIAYKQEAYSLSGENFFMSETENSCSRLCHPFFSRQKIPKSCNQRSLHLIDKATNKPKCLSMSTAACQTSSIATRCPV

SEQ ID NO: 40098 - protein, 393 aa, Homo sapiens [sequence omitted]

SEQ ID NO: 40099 - protein, 418 aa, Homo sapiens
MKTERPRPNTFIIRCLQWTTVIERTFHVETPEEREEWTTAIQTVADGLKKQEEEEMDFRSGSPSDNSGAEEMEVSLAKPKHRVTMNEFEYLKLLGKGTFGKVILVKEKATGRYYAMKILKKEVIVAKDEVAHTLTENRVLQNSRHPFLTALKYSFQTHDRLCFVMEYANGGELFFHLSRERVFSEDRARFYGAEIVSALDYLHSEKNVVYRDLKLENLMLDKDGHIKITDFGLCKEGIKDGATMKTFCGTPEYLAPEVLEDNDYGRAVDWWGLGVVMYEMMCGRLPFYNQDHEKLFELILMEEIRFPRTLGPEAKSLLSGLLKKDPKQRLGGGSEDAKEIMQHRFFAGIVWQHVYEKKLSPPFKPQVTSETDTRYFDEEFTAQMITITPPDQDDSMECVDSERRPHFPQFSYSASGTA

SEQ ID NO: 40100 - protein, 343 aa, Homo sapiens
MSSSIFIGGSFILKKKGLLRLARKGSMRAGQGGHAYLKEWLWWAGLLSMGAGEVANFAAYAFAPATLVTPLGALSVLVSAILSSYFLNERLNLHGKIGCLLSILGSTVMVIHAPKEEEIETLNEMSHKLGDPGFVVFATLVVIVALILIFVVGPRHGQTNILVYITICSVIGAFSVSCVKGLGIAIKELFAGKPVLRHPLAWILLLSLIVCVSTQINYLNRALDIFNTSIVTPIYYVFFTTSVLTCSAILFKEWQDMPVDDVIGTLSGFFTIIVGIFLLHAFKDVSFSLASLPVSFRKDEKAMNGNLSNMYEVLNNNEESLTCGIEQHTGENVSRRNGNLTAF

SEQ ID NO: 40101 - protein, 763 aa, Homo sapiens
MNKKGARIDFKDVTYLTEEKVYEILELCREREDYSPLIRVIGRVFSSAEALVQSFRKVKQHTKEELKSLQAKDEDKDEDEKEKAACSAAAMEEDSEASSSRIGDSSQGDNNLQKLGPDDVSVDIDAIRRVYTRLLSNEKIETAFLNALVYLSPNVECDLTYHNVYSRDPNYLNLFIIVMENRNLHSPEYLEMALPLFCKAMSKLPLAAQGKLIRLWSKYNADQIRRMMETFQQLITYKVISNEFNSRNLVNDDDAIVAASKCLKMVYYANVVGGEVDTNHNEEDDEEPIPESSELTLQELLGEERRNKKGPRVDPLETELGVKTLDCRKPLIPFEEFINEPLNEVLEMDKDYTFFKVETENKFSFMTCPFILNAVTKNLGLYYDNRIRMYSERRITVLYSLVQGQQLNPYLRLKVRRDHIIDDALVRLEMIAMENPADLKKQLYVEFEGEQGVDEGGVSKEFFQLVVEEIFNPDIGMFTYDESTKLFWFNPSSFETEGQFTLIGIVLGLAIYNNCILDVHFPMVVYRKLMGKKGTFRDLGDSHPVLYQSLKDLLEYEGNVEDDMMITFQISQTDLFGNPMMYDLKENGDKIPITNENRKEFVNLYSDYILNKSVEKQFKAFRRGFHMVTNESPLKYLFRPEEIELLICGSRNLDFQALEETTEYDGGYTRDSVLIREFWEIVHSFTDEQKRLFLQFTTGTDRAPVGGLGKLKMIIAKNGPDTERLPTSHTCFNVLLLPEYSSKEKLKERLLKAITYAKGFGML

SEQ ID NO: 40102 - protein, 513 aa, Homo sapiens
MEPNHVWNHLEMYIHLLLCIPGAKALAGQSVRICKGPRAVFSRILLLFSLTDSMEDEDAACGGQGQLSTVLLVNLGRMEFPSYTINRKTHIFQDRDDLIRYAAATHMLSDISSAMANGNWEEAKELAQCAKRDWNRLKNHPSLRCHEDLPLFLRCFTVGWIYTRILSRFVEILQRLHMYEEAVRELESLLSQRIYCPDSRGRWWDRLALNLHQHLKRLEPTIKCITEGLADPEVRTGHRLSLYQRAVRLRESPSCKKFKHLFQQLPEMAVQDVKHVTITGRLCPQRGMCKSVFVMEAGEAADPTTVLCSVEELALAHYRRSGFDQGIHGEGSTFSTLYGLLLWDIIFMDGIPDVFRNACQAFPLDLCTDSFFTSRRPALEARLQLIHDAPEESLRAWVAATWHEQEGRVASLVSWDRFTSLQQAQDLVSCLGGPVLSGVCRHLAADFRHCRGGLPDLVVWNSQSRHFKLVEVKGPNDRLSHKQMIWLAELQKLGAEVEVCHVVAVGAKSQSLS

SEQ ID NO: 40103 - protein, 690 aa, Homo sapiens [sequence omitted]

SEQ ID NO: 40104 - protein, 1228 aa, Homo sapiens
MLCLAVIFLCTLAGLLGARLPDFSKPLLGFEPRDTDIGSKLVVWRALQALTGPRKLLFLSPDLELNSSSSHNTLRPAPRGSAQESAVRPRRMVEPLEDRRQENFFCGPPEKSYAKLVFMSTSSGSLWNLHAIHSMCRMEQDQIRSHTSFGALCQRTAANQCCPSWSLGNYLAVLSNRSSCLDTTQADAARTLALLRTCALYYHSGALVPSCLGPGQNKSPRCAQVPTKCSQSSAIYQLLHFLLDRDFLSPQTTDYQVPSLKYSLLFLPTPKGASLMDIYLDRLATPWGLADNYTSVTGMDLGLKQELLRHFLVQDTVYPLLALVAIFFGMALYLRSLFLTLMVLLGVLGSLLVAFFLYQVAFRMAYFPFVNLAALLLLSSVCANHTLIFFDLWRLSKSQLPSGGLAQRVGRTMHHFGYLLLVSGLTTSAAFYASYLSRLPAVRCLALFMGTAVLVHLALTLVWLPASAVLHERYLARGCARRARGRWEGSAPRRLLLALHRRLRGLRRAAAGTSRLLFQRLLPCGVIKFRYIWICWFAALAAGGAYIAGVSPRLRLPTLPPPGGQVFRPSHPFERFDAEYRQLFLFEQLPQGEGGHMPVVLVWGVLPVDTGDPLDPRSNSSLVRDPAFSASGPEAQRWLLALCHRARNQSFFDTLQEGWPTLCFVETLQRWMESPSCARLGPDLCCGHSDFPWAPQFFLHCLKMMALEQGPDGTQDLGLRFDAHGSLAALVLQFQTNFRNSPDYNQTQLFYNEVSHWLAAELGMAPPGLRRGWFTSRLELYSLQHSLSTEPAVVLGLALALAFATLLLGTWNVPLSLFSVAAVAGTVLLTVGLLVLLEWQLNTAEALFLSASVGLSVDFTVNYCISYHLCPHPDRLSRVAFSLRQTSCATAVGAAALFAAGVLMLPATVLLYRKLGIILMMVKCVSCGFASFFFQSLCCFFGPEKNCGQILWPCAHLPWDAGTGDPGGEKAGRPRPGSVGGMPGSCSEQYELQPLARRRSPSFDTSTATSKLSHRPSVLSEDLQLHDGPCCSRPPPAPASPRELLLDHQAVFSQCPALQTSSPYKQAGPSPKTRARQDSQGEEAEPLPASPEAPAHSPKAKAADPPDGFCSSASTLEGLSVSDETCLSTSEPSARVPDSVGVSPDDLDDTGQPVLERGQLNGKRDTLWLALRETVYDPSLPASHHSSLSWKGRGGPGDGSPVVLPNSQPDLPDVWLRRPSTHTSGYSS

SEQ ID NO: 40105 - protein, 511 aa, Homo sapiens [sequence omitted]

SEQ ID NO: 40106 - protein, 523 aa, Homo sapiens [sequence omitted]

SEQ ID NO: 40107 - protein, 884 aa, Homo sapiens [sequence omitted]

SEQ ID NO: 40108 - protein, 5 aa, Homo sapiens
MKYWL

SEQ ID NO: 40109 - protein, 63 aa, Homo sapiens
MIGELVGGYIANSLAIMTDALHMLTDLSAIILTLLALWLSSKSPTKRFTFGFHRLGWNTMTPS

SEQ ID NO: 40110 - protein, 331 aa, Homo sapiens
MRKKKEEYLTFSPLTVVIFVVICCVMMVLLYFFYKWLVYVMIAIFCIASAMSLYNCLAALIHKIPYGQCTIACRGKNMEVRLIFLSGLCIAVAVVWAVFRNEDRWAWILQDILGIAFCLNLIKTLKLPNFKSCVILLGLLLLYDVFFVFITPFITKNGESIMVELAAGPFGNNEKNDGNLVEATGQPSAPHEKLPVVIRVPKLIYFSVMSVCLMPVSILGFGDIIVPGLLIAYCRRFDVQTGSSYIYYVSSTVAYAIGMILTFVVLVLMKKGQPALLYLVPCTLITASVVAWRRKEMKKFWKGNSYQMMDHLDCATNEENPVISGEQIVQQ

SEQ ID NO: 40111 - protein, 1128 aa, Homo sapiens
MDDVPSHSKALSDGNGSSGIEWSNVTSSQYDWSQPIVKVDEEPLNLDWGEDHDSALDEEEDDAVGLVMKSTDAREKDKQSDQKASDPNMLLTPQEEDDPEGDTEVDVIAEQLKFRACLKILMTELRTLATGYEVDGGKLRFQLYNWLEKEIAALHEICNHESVIKEYSSKTYSKVESDLLDQEEMVDKPDIGSYERHQIERRRLQAKREHAERRKSWLQKNQDLLRVFLSYCSLHGAQGGGLASVRMELKFLLQESQQETTVKQLQSPLPLPTTLPLLSASIASTKTVIANPVLYLNNHIHDILYTIVQMKTPPHPSIEDVKVHTLHSLAASLSASIYQALCDSHSYSSQTEGNQFTGMAYQGLLLSDRRRLRTESIEEHATPNSSPAQWPGVSSLINLLSSAQDEDQPKLNILLCEAVVAVYLSLLIHALATNSSSELFRLAAHPLNNRMWAAVFGGGVKLVVKPRRQSENISAPPVLSEDIDKHRRRFNMRMLVPGRPVKDATPPPVPAERPSYKEKFIPPELSMWDYFVAKPFLPLSDSGVIYDSDESIHSDEEDDAFFSDTQIQEHQDPNSYSWALLHLTMVKLALHNVKNFFPIAGLEFSELPVTSPLGIAVIKNLENWEQILQEKMDQFEGPPPNYINTYPTDLSVGAGPAILRNKAMLEPENTPFKSRDSSAFPVKRLWHFLVKQEVLQETFIRYIFTKKRKQSESIEEHVEQVNQNCIAEDCHIKVEADLGYPGGKAKVIHKESDMIMAFSVNKANCNEIVLASTHDVQELDVTSLLACQSYIWIGEEYDRESKSSDDVDYRGSTTTLYQPSATSYSASQVHPPSSLPWLGTGQTSTGASVLMKRNLHNVKRMTSHPVHQYYLTGAQDGSVRMFEWTRPQQLVCFRQAGNARVTRLYFNSQGNKCGVADGEGFLSIWQVNQTASNPKPYMSWQCHSKATSDFAFITSSSLVATSGHSNDNRNVCLWDTLISPGNSLIHGFTCHDHGATVLQYAPKQQLLISGGRKGHVCIFDIRQRQLIHTFQAHDSAIKALALDPYEEYFTTGSAEGNIKVWRLTGHGLIHSFKSEHAKQSIFRNIGAGVMQIDIIQGNRLFSCGADGTLKTRVLPNAFNIPNRILDIL

SEQ ID NO: 40112 - protein, 130 aa, Homo sapiens
MVKLALHNVKNFFPIAGLEFSELPVTSPLGIAVIKNLENWEQILQEKMDQFEGPPPNYINTYPTDLSVGAGPAILRNKAMLEPENTPFKSRDSSAFPVKRLWHFLVKQEVLQETFIRYIFTKKRKQSEVF

SEQ ID NO: 40113 - protein, 713 aa, Homo sapiens [sequence omitted]

SEQ ID NO: 40114 - protein, 545 aa, Homo sapiens [sequence omitted]

SEQ ID NO: 40115 - protein, 782 aa, Homo sapiens
MLNSVTPTDSCEPAPECSSLEQEELQALQIEQGESSQNGTVLMEETAYPALEETSSTIEAEEQKIPEDSIYIGTASDDSDIVTLEPPKLEEIGNQEVVIVEEAQSSEDFNMGSSSSSQYTFCQPETVFSSQPSDDESSSDETSNQPSPAFRRRRARKKTVSASESEDRLVAEQETEPSKELSKRQFSSGLNKCVILALVIAISMGFGHFYGTIQIQKRQQLVRKIHEDELNDMKDYLSQCQQEQESFIDYKSLKENLARCWTLTEAEKMSFETQKTNLATENQYLRVSLEKEEKALSSLQEELNKLREQIRILEDKGTSTELVKENQKLKQHLEEEKQKKHSFLSQRETLLTEAKMLKRELERERLVTTALRGELQQLSGSQLHGKSDSPNVYTEKKEIAILRERLTELERKLTFEQQRSDLWERLYVEAKDQNGKQGTDGKKKGGRGSHRAKNKSKETFLGSVKETFDAMKNSTKEFVRHHKEKIKQAKEAVKENLKKFSDSVKSTFRHFKDTTKNIFDEKGNKRFGATKEAAEKPRTVFSDYLHPQYKAPTENHHNRGPTMQNDGRKEKPVHFKEFRKNTNSKKCSPGHDCRENSHSFRKACSGVFDCAQQESMSLFNTVVNPIRMDEFRQIIQRYMLKELDTFCHWNELDQFINKFFLNGVFIHDQKLFTDFVNDVKDYLRNMKEYEVDNDGVFEKLDEYIYRHFFGHTFSPPYGPSRPDKKQRMVNIENSRHRKQEQKHLQPQPYKREGKWHKYGRTNGRQMANLEIELGQLPFDPQY

SEQ ID NO: 40116 - protein, 1460 aa, Homo sapiens
MAEEQQQPPPQQPDAHQQLPPSAPNSGVALPALVPGLPGTEASALQHKIKNSICKTVQSKVDCILQEVEKFTDLEKLYLYLQLPSGLSNGEKSDQNAMSSSRAQQMHAFSWIRNTLEEHPETSLPKQEVYDEYKSYCDNLGYHPLSAADFGKIMKNVFPNMKARRLGTRGKSKYCYSGLRKKAFVHMPTLPNLDFHKTGDGLEGAEPSGQLQNIDEEVISSACRLVCEWAQKVLSQPFDTVLELARFLVKSHYIGTKSMAALTVMAAAPAGMKGITQPSAFIPTAESNSFQPQVKTLPSPIDAKQQLQRKIQKKQQEQKLQSPLPGESAAKKSESATSNGVTNLPNGNPSILSPQPIGIVVAAVPSPIPVQRTRQLVTSPSPMSSSDGKVLPLNVQVVTQHMQSVKQAPKTPQNVPASPGGDRSARHRYPQILPKPANTSALTIRSPTTVLFTSSPIKTAVVPASHMSSLNVVKMTTISLTPSNSNTPLKHSASVSSATGTTEESRSVPQIKNGSVVSLQSPGSRSSSAGGTSAVEVKVEPETSSDEHPVQCQENSDEAKAPQTPSALLGQKSNTDGALQKPSNEGVIEIKATKVCDQRTKCKSRCNEMLPGTSTGNNQSTITLSVASQNLTFTSSSSPPNGDSINKDPKLCTKSPRKRLSSTLQETQVPPVKKPIVEQLSAATIEGQKQGSVKKDQKVPHSGKTEGSTAGAQIPSKVSVNVSSHIGANQPLNSSALVISDSALEQQTTPSSSPDIKVKLEGSVFLLDSDSKSVGSFNPNGWQQITKDSEFISASCEQQQDISVMTIPEHSDINDLEKSVWELEGMPQDTYSQQLHSQIQESSLNQIQAHSSDQLPLQSELKEFEPSVSQTNESYFPFDDELTQDSIVEELVLMEQQMSMNNSHSYGNCLGMTLQSQSVTPGAPMSSHTSSTHFYHPIHSNGTPIHTPTPTPTPTPTPTPTPTPTSEMIAGSQSLSRESPCSRLAQTTPVDSALGSSRHTPIGTPHSNCSSSVPPSPVECRNPFAFTPISSSMAYHDASIVSSSPVKPMQRPMATHPDKTKLEWMNNGYSGVGNSSVSGHGILPSYQELVEDRFRKPHAFAVPGQSYQSQSRHHDTHFGRLTPVSPVQHQGATVNNTNKQEGFAVPAPLDNKGTNSSASSNFRCRSVSPAVHRQRNLSGSTLYPVSNIPRSNVTPFGSPVTPEVHVFTNVHTDACANNIAQRSQSVPLTVMMQTAFPNALQKQANSKKITNVLLSKLDSDNDDAVRGLGMNNLPSNYTARMNLTQILEPSTVFPSANPQNMIDSSTSVYEFQTPSYLTKSNSTGQINFSPGDNQAQSEIGEQQLDFNSTVKDLLSGDSLQTNQQLVGQGASDLTNTASDFSSDIRLSSELSGSINDLNTLDPNLLFDPGRQQGQDDEATLEELKNDPLFQQICSESMNSMTSSGFEWIESKDHPTVEMLG

SEQ ID NO: 40117 - protein, 497 aa, Homo sapiens
MYYYNGKTVYAPSPNSDDFNRESPSYPSPKPPTSMFASTFFMQDGTHNSSDLWSSSNGMSQPGFGGILGTSTSHMSQSSSYGNLHSHDRLSYPPHSVSPTDINTSLPPMSSFHRGSTSSSPYVAASHTPPINGSDSILGTRGNAAGSSQTGDALGKALASIYSPDHTSSSFPSNPSTPVGSPSPLTGTSQWPRPGGQAPSSPSYENSLHSLQSRMEDRLDRLDDAIHVLRNHAVGPSTSLPAGHSDIHSLLGPSHNAPIGSLNSNYGGSSLVASSRSASMVGTHREDSVSLNGNHSVLSSTVTTSSTDLNHKTQENYRGGLQSQSGTVVTTEIKTENKEKDENLHEPPSSDDMKSDDESSQKDIKVSSRGRTSSTNEDEDLNPEQKIEREKERRMANNARERLRVRDINEAFKELGRMCQLHLKSEKPQTKLLILHQAVAVILSLEQQVRERNLNPKAACLKRREEEKVSAVSAEPPTTLPGTHPGLSETTNPMGHM

SEQ ID NO: 40118 - protein, 806 aa, Homo sapiens
MEAHTTVKEAEDDNISVTIQAEDAITLDFDGDDLLETGKNVKITDSEASKPKDGQDAIAQSPEKESKDYEMNANHKDGKKEDCVKGDPVEKEARESSKKAESGDKEKDTLKKGPSSTGASGQAKSSSKESKDSKTSSKDDKGSTSSTSGSSGSSTKNIWVSGLSSNTKAADLKNLFGKYGKVLSAKVVTNARSPGAKCYGIVTMSSSTEVSRCIAHLHRTELHGQLISVEKVKGDPSKKEMKKENDEKSSSRSSGDKKNTSDRSSKTQASVKKEEKRSSEKSEKKESKDTKKIEGKDEKNDNGASGQTSESIKKSEEKKRISSKSPGHMVILDQTKGDHCRPSRRGRYEKIHGRSKEKERASLDKKRDKDYRRKEILPFEKMKEQRLREHLVRFERLRRAMELRRRREIAERERRERERIRIIREREERERLQRERERLEIERQKLERERMERERLERERIRIEQERRKEAERIAREREELRRQQQQLRYEQEKRNSLKRPRDVDHRRDDPYWSENKKLSLDTDARFGHGSDYSRQQNRFNDFDHRERGRFPESSAVQSSSFERRDRFVGQSEGKKARPTARREDPSFERYPKNFSDSRRNEPPPPRNELRESDRREVRGERDERRTVIIHDRPDITHPRHPREAGPNPSRPTSWKSEGSMSTDKRETRVERPERSGREVSGHSVRGAPPGNRSSASGYGSREGDRGVITDRGGGSQHYPEERHVVERHGRDTSGPRKEWHGPPSQGPSYHDTRRMGDGRAGAGMITQHSSNASPINRIVQISGNSMPRGSGSGFKPFKGGPPRRF

SEQ ID NO: 40119 - protein, 431 aa, Homo sapiens
MNALLLSAWFGHLRILQILVNSGAKIHCESKDGLTLLHCAAQKGHVPVLAFIMEDLEDVALDHVDKLGRTAFHRAAEHGQLDALDFLVGSGCDHNVKDKEGNTALHLAAGRGHMAVLQRLVDIGLDLEEQNAEGLTALHSAAGGSHPDCVQLLLRAGSTVNALTQKNLSCLHYAALSGSEDVSRVLIHAGGCANVVDHQGASPLHLAVRHNFPALVRLLINSDSDVNAVDNRQQTPLHLAAEHAWQDIADMLLIAGVDLNLRDKQGKTALAVAVRSNHVSLVDMIIKADRFYRWEKDHPSDPSGKSLSFKQDHRQETQQLRSVLWRLASRYLQPREWKKLAYSWEFTEAHVDAIEQQWTGTRSYQEHGHRMLLIWLHGVATAGENPSKALFEGLVAIGRRDLAGWSTMARSQLTATSASRVQMILVPQPPE

SEQ ID NO: 40120 - protein, 815 aa, Homo sapiens
MFVKRNDPDGPHSDRIYYLAMSGENRENTLFYSEIPKTINRAAVLMLSWKPLLDLFQATLDYGMYSREEELLRERKRIGTVGIASYDYHQGSGTFLFQAGSGIYHVKDGGPQGFTQQPLRPNLVETSCPNIRMDPKLCPADPDWIAFIHSNDIWISNIVTREERRLTYVHNELANMEEDARSAGVATFVLQEEFDRYSGYWWCPKAETTPSGGKILRILYEENDESEVEIIHVTSPMLETRRADSFRYPKTGTANPKVTFKMSEIMIDAEGRIIDVIDKELIQPFEILFEGVEYIARAGWTPEGKYAWSILLDRSQTRLQIVLISPELFIPVEDDVMERQRLIESVPDSVTPLIIYEETTDIWINIHDIFHVFPQSHEEEIEFIFASECKTGFRHLYKITSILKESKYKRSSGGLPAPSDFKCPIKEEIAITSGEWEVLGRHGSNIQVDEVRRLVYFEGTKDSPLEHHLYVVSYVNPGEVTRLTDRGYSHSCCISQHCDFFISKYSNQKNPHCVSLYKLSSPEDDPTCKTKEFWATILDSAGPLPDYTPPEIFSFESTTGFTLYGMLYKPHDLQPGKKYPTVLFIYGGPQVQLVNNRFKGVKYFRLNTLASLGYVVVVIDNRGSCHRGLKFEGAFKYKMGQIEIDDQVEGLQYLASRYDFIDLDRVGIHGWSYGGYLSLMALMQRSDIFRVAIAGAPVTLWIFYDTGYTERYMGHPDQNEQGYYLGSVAMQAEKFPSEPNRLLLLHGFLDENVHFAHTSILLSFLVRAGKPYDLQIYPQERHSIRVPESGEHYELHLLHYLQENLGSRIAALKVI

SEQ ID NO: 40121 - protein, 142 aa, Homo sapiens
MACARPLISVYSEKGESSGKNVTLPAVFKAPIRPDIVNFVHTNLRKNNRQPYAVSELAGHQTSAESWGTGRAVARIPRVRGGGTHRSGQGAFGNMCRGGRMFAPTKTWRRWHRRVNTTQKRYAICSALAASALPALVMSKGL

SEQ ID NO: 40122 - protein, 445 aa, Homo sapiens
MVECIREVNEVIQNPATITRILLSHFNWDKEKLMERYFDGNLEKLFAECHVINPSKKSRTRQMNTRSSAQDMPCQICYLNYPNSYFTGLECGHKFCMQCWSEYLTTKIMEEGMGQTISCPAHGCDILVDDNTVMRLITDSKVKLKYQHLITNSFVECNRLLKWCPAPDCHHVVKVQYPDAKPVRCKCGRQFCFNCGENWHDPVKCKWLKKWIKKCDDDSETSNWIAANTKECPKCHVTIEKDGGCNHMVCRNQNCKAEFCWVCLGPWEPHGSAWYNCNRYNEDDAKAARDAQERSRAALQRYLFYCNRYMNHMQSLRFEHKLYAQVKQKMEEMQQHNMSWIEVQFLKKAVDVLCQCRATLMYTYVFAFYLKKNNQSIIFENNQADLENATEVLSGYLERDISQDSLQDIKQKVQDKYRYCESRRRVLLQHVHEGYEKDLWEYIED

SEQ ID NO: 40123 - protein, 1099 aa, Homo sapiens
MDIVFECEVTGKPTPTVKWVKNGDMVIPSDYFKIVKEHNLQVLGLVKSDEGFYQCIAENDVGNAQAGAQLIILEHDVAIPTLPPTSLTSATTDHLAPATTGPLPSAPRDVVASLVSTRFIKLTWRTPASDPHGDNLTYSVFYTKEGIARERVENTSHPGEMQVTIQNLMPATVYIFRVMAQNKHGSGESSAPLRVETQPEVQLPGPAPNLRAYAASPTSITVTWETPVSGNGEIQNYKLYYMEKGTDKEQDVDVSSHSYTINGLKKYTEYSFRVVAYNKHGPGVSTPDVAVRTLSDVPSAAPQNLSLEVRNSKSIMIHWQPPAPATQNGQITGYKIRYRKASRKSDVTETLVSGTQLSQLIEGLDRGTEYNFRVAALTINGTGPATDWLSAETFESDLDETRVPEVPSSLHVRPLVTSIVVSWTPPENQNIVVRGYAIGYGIGSPHAQTIKVDYKQRYYTIENLDPSSHYVITLKAFNNVGEGIPLYESAVTRPHTVPDPTPMMPPVGVQASILSHDTIRITWADNSLPKHQKITDSRYYTVRWKTNIPANTKYKNANATTLSYLVTGLKPNTLYEFSVMVTKGRRSSTWSMTAHGTTFELVPTSPPKDVTVVSKEGKPKTIIVNWQPPSEANGKITGYIIYYSTDVNAEIHDWVIEPVVGNRLTHQIQELTLDTPYYFKIQARNSKGMGPMSEAVQFRTPKASGSGGKGSRLPDLGSDYKPPMSGSNSPHGSPTSPLDSNMLLVIIVSVGVITIVVVVIIAVFCTRRTTSHQKKKRAACKSVNGSHKYKGNSKDVKPPDLWIHHERLELKPIDKSPDPNPIMTDTPIPRNSQDITPVDNSMDSNIHQRRNSYRGHESEDSMSTLAGRRGMRPKMMMPFDSQPPQPVISAHPIHSLDNPHHHFHSSSLASPARSHLYHPGSPWPIGTSMSLSDRANSTESVRNTPSTDTMPASSSQTCCTDHQDPEGATSSSYLASSQEEDSGQSLPTAHVRPSHPLKSFAVPAIPPPGPPTYDPALPSTPLLSQQALNHHIHSVKTASIGTLGRSRPPMPVVVPSAPEVQETTRMLEDSESSYEPDELTKEMAHLEGLMKDLNAITTA

SEQ ID NO: 40124 - protein, 420 aa, Homo sapiens
MMTITRTYLALQDSSAVRVSDLFSGVPCMPGRKRERERERMSLSDWHLAVKLADQPLTPKSILRLPETELGEYSLGGYSISFLKQLIAGKLQESVPDPELIDLIYCGRKLKDDQTLDFYGIQPGSTVHVLRKSWPEPDQKPEPVDKVAAMREFRVLHTALHSSSSYREAVFKMLSNKESLDQIIVATPGLSSDPIALGVLQDKDLFSVFADPNMLDTLVPAHPALVNAIVLVLHSVAGSAPMPGTDSSSRSMPSSSYRDMPGGFLFEGLSDDEDDFHPNTRSTPSSSTPSSRPASLGYSGAAGPRPITQSELATALALASTPESSSHTPTPGTQGHSSGTSPMSSGVQSGTPITNDLFSQALQHALQASGQPSLQSQWQPQLQQLRDMGIQDDELSLRALQATGGDIQAALELIFAGGAP

SEQ ID NO: 40125 - protein, 1399 aa, Homo sapiens
MASFQRSNSHDKVRRIVAEEGRTARNLIAWSVPLESKDDDGKPKCQTGGKSKRTIQGTHKTTKQSTAVDCKITSSTTGDKHFDKSPTKTRHPRKIDLRARYWAFLFDNLRRAVDEIYVTCESDQSVVECKEVLMMLDNYVRDFKALIDWIQLQEKLEKTDAQSRPTSLAWEVKKMSPGRHVIPSPSTDRINVTSNARRSLNFGGSTGTVPAPRLAPTGVSWADKVKAHHTGSTASSEITPAQSCPPMTVQKASRKNERKDAEGWETVQRGRPIRSRSTAVMPKVSLATEATRSKDDSDKENVCLLPDESIQKGQFVGDGTSNTIESHPKDSLHSCDHPLAEKTQFTVSTLDDVKNSGSIRDNYVRTSEISAVHIDTECVSVMLQAGTPPLQVNEEKFPAEKARIENEMDPSDISNSMAEVLAKKEELADRLEKANEEAIASAIAEEEQLTREIEAEENNDINIETDNDSDFSASMGSGSVSFCGMSMDWNDVLADYEARESWRQNTSWGDIVEEEPARPPGHGIHMHEKLSSPSRKRTIAESKKKHEEKQMKAQQLREKLREEKTLKLQKLLEREKDVRKWKEELLDQRRRMMEEKLLHAEFKREVQLQAIVKKAQEEEAKVNEIAFINTLEAQNKRHDVLSKLKEYEQRLNELQEERQRRQEEKQARDEAVQERKRALEAERQARVEELLMKRKEQEARIEQQRQEKEKAREDAARERARDREERLAALTAAQQEAMEELQKKIQLKHDESIRRHMEQIEQRKEKAAELSSGRHANTDYAPKLTPYERKKQCSLCNVLISSEVYLFSHVKGRKHQQAVRENTSIQGRELSDEEVEHLSLKKYIIDIVVESTAPAEALKDGEERQKNKKKAKKIKARMNFRAKEYESLMETKNSGSDSPYKAKLQRLAKDLLKQVQVQDSGSWANNKVSALDRTLGEITRILEKENVADQIAFQAAGGLTALEHILQAVVPATNVNTVLRIPPKSLCNAINVYNLTCNNCSENCSDVLFSNKITFLMDLLIHQLTVYVPDENNTILGRNTNKQVFEGLTTGLLKVSAVVLGCLIANRPDGNCQPATPKIPTQEMKNKPSQGDPFNNRVQDLISYVVNMGLIDKLCACFLSVQGPVDENPKMAIFLQHAAGLLHAMCTLCFAVTGRSYSIFDNNRQDPTGLTAALQATDLAGVLHMLYCVLFHGTILDPSTASPKENYTQNTIQVAIQSLRFFNSFAALHLPAFQSIVGAEGLSLAFRHMASSLLGHCSQVSCESLLHEVIVCVGYFTVNHPDNQVIVQSGRHPTVLQKLCQLPFQYFSDPRLIKVLFPSLIAACYNNHQNKIILEQEMSCVLLATFIQDLAQTPGQAENQPYQPKGKCLGSQDYLELANRFPQQAWEEARQFFLKKEKK

SEQ ID NO: 40126 - protein, 570 aa, Homo sapiens
MVPVLPRVRGRWKPSGGEAERSPARLRPHGSRSGVCAGAARGEAVSATAAPAPDRPGPRPARPPAMGSGPLSLPLALSPPRLLLLLLLSLLPVARASEAEHRLFERLFEDYNEIIRPVANVSDPVIIHFEVSMSQLVKVDEVNQIMETNLWLKQIWNDYKLKWNPSDYGGAEFMRVPAQKIWKPDIVLYNNAVGDFQVDDKTKALLKYTGEVTWIPPAIFKSSCKIDVTYFPFDYQNCTMKFGSWSYDKAKIDLVLIGSSMNLKDYWESGEWAIIKAPGYKHDIKYNCCEEIYPDITYSLYIRRLPLFYTINLIIPCLLISFLTVLVFYLPSDCGEKVTLCISVLLSLTVFLLVITETIPSTSLVIPLIGEYLLFTMIFVTLSIVITVFVLNVHYRTPTTHTMPSWVKTVFLNLLPRVMFMTRPTSNEGNAQKPRPLYGAELSNLNCFSRAESKGCKEGYPCQDGMCGYCHHRRIKISNFSANLTRSSSSESVDAVLSLSALSPEIKEAIQSVKYIAENMKAQNEAKEIQDDWKYVAMVIDRIFLWVFTLVCILGTAGLFLQPLMAREDA

SEQ ID NO: 40127 - protein, 319 aa, Homo sapiens [sequence omitted]

SEQ ID NO: 40128 - protein, 501 aa, Homo sapiens
MSLQKRVFPRRQNGTHEVAAKPCPVATRQPRARDQERKKGSFTSSLRMESHSRAGKSRKSAKFRSISRSLMLCNAKTSDDGSSPDEKYPDPFEISLAQGKEGIFHSSVQLADTSEAGPSSVPDLALASEAAQLQAAGNDRGKTCRRIFFMKESSTASSREKPGKLEAQSSNFLFPKACHQRARSNSTSVNPYCTREIDFPMTKKSAAPTDRQPYSLCSNRKSLSQQLDCPAGKAAGTSRPTRSLSTAQLVQPSGGLQASVISNIVLMKGQAKGLGFSIVGGKDSIYGPIGIYVKTIFAGGAAAADGRLQEGDEILELNGESMAGLTHQDALQKFKQAKKGLLTLTVRTRLTAPPSLCSHLSPPLCRSLSSSTCITKDSSSFALESPSAPISTAKPNYRIMVEVSLQKEAGVGLGIGLCSVPYFQCISGIFVHTLSPGSVAHLDGRLRCGDEIVEISDSPVHCLTLNEVYTILSHCDPGPVPIIVSRHPDPQKEEMEAQEVK

SEQ ID NO: 40129 - protein, 130 aa, Homo sapiens
MDARTILLNTKRLIVDVIRFQPGETLTEILETPATSEQEAEHQRAMQRRAIRDAKTPDKMKKSKSVKEDSNLTLQEKKEKIQTGLKKLTELGTVDPKNKYQELINDIARVLHSGDRGDPALFKAERLERQ

SEQ ID NO: 40130 - protein, 174 aa, Homo sapiens
MAEVAAGGWHSVCVSETGDIYIWGWNESGQLALPTRNLAEDGETVAREATELNEDGSQVKRTGGAEDGAPAPFIAVQPFPALLDLPMGSDAVKASCGSRHTAVVTREWGWEALCSTRAGAYGRGCGRRKNFCLKASVAHTEQLPCSVDKPQPPCCFTVVPQPVRPRSFFLLVGG

SEQ ID NO: 40131 - protein, 1246 aa, Homo sapiens
MTNLKDIGLYNLRNITRGAIRIEKNADLCYLSTVDWSLILDAVSNNYIVGNKPPKECGDLCPGTMEEKPMCEKTTINNEYNYRCWTTNRCQKMCPSTCGKRACTENNECCHPECLGSCSAPDNDTACVACRHYYYAGVCVPACPPNTYRFEGWRCVDRDFCANILSAESSDSEGFVIHDGECMQECPSGFIRNGSQSMYCIPCEGPCPKVCEEEKKTKTIDSVTSAQMLQGCTIFKGNLLINIRRGNNIASELENFMGLIEVVTGYVKIRHSHALVSLSFLKNLRLILGEEQLEGNYSFYVLDNQNLQQLWDWDHRNLTIKAGKMYFAFNPKLCVSEIYRMEEVTGTKGRQSKGDINTRNNGERASCESDVLHFTSTTTSKNRIIITWHRYRPPDYRDLISFTVYYKEAPFKNVTEYDGQDACGSNSWNMVDVDLPPNKDVEPGILLHGLKPWTQYAVYVKAVTLTMVENDHIRGAKSEILYIRTNASVPSIPLDVLSASNSSSQLIVKWNPPSLPNGNLSYYIVRWQRQPQDGYLYRHNYCSKDKIPIRKYADGTIDIEEVTENPKTEVCGGEKGPCCACPKTEAEKQAEKEEAEYRKVFENFLHNSIFVPRPERKRRDVMQVANTTMSSRSRNTTAADTYNITDPEELETEYPFFESRVDNKERTVISNLRPFTLYRIDIHSCNHEAEKLGCSASNFVFARTMPAEGADDIPGPVTWEPRPENSIFLKWPEPENPNGLILMYEIKYGSQVEDQRECVSRQEYRKYGGAKLNRLNPGNYTARIQATSLSGNGSWTDPVFFYVQAKTGYENFIHLIIALPVAVLLIVGGLVIMLYVFHRKRNNSRLGNGVLYASVNPEYFSAADVYVPDEWEVAREKITMSRELGQGSFGMVYEGVAKGVVKDEPETRVAIKTVNEAASMRERIEFLNEASVMKEFNCHHVVRLLGVVSQGQPTLVIMELMTRGDLKSYLRSLRPEMENNPVLAPPSLSKMIQMAGEIADGMAYLNANKFVHRDLAARNCMVAEDFTVKIGDFGMTRDIYETDYYRKGGKGLLPVRWMSPESLKDGVFTTYSDVWSFGVVLWEIATLAEQPYQGLSNEQVLRFVMEGGLLDKPDNCPDMLFELMRMCWQYNPKMRPSFLEIISSIKEEMEPGFREVSFYYSEENKLPEPEELDLEPENMESVPLDPSASSSSLPLPDRHSGHKAENGPGPGVLVLRASFDERQPYAHMNGGRKNERALPLPQSSTC

SEQ ID NO: 40132 - protein, 270 aa, Homo sapiens
MFKNGSGDSGDSSEEESHRVVLRPRGKERHKSGVHQPPQAGAGDVVLLQRELAQEDSLNKLALQYGCKVADIKKVNNFIREQDLYALKSVKIPVRNHGILMETHKELKPLLSPSSETTVTVELPEADRAGAGTGAQAGQLMGFFKGIDQDIERAVQSEIFLHESYCMDTSHQPLLPAPPKTPMDGADCGIQWWNAVFIMLLIGIVLPVFYLVYFKIQASGETPNSLNTTVIPNGSMAMGTVPGQAPRLAVAVPAVTSADSQFSQTTQAGS

SEQ ID NO: 40133 - protein, 409 aa, Homo sapiens
MKVFCEVLEELYKKVLLGATLENDSHDYIFYLNPAVSDQDCSTATSLEWANTCGIQGRHQPISVGVAPIAVAPVCLKTNSQMSGSREVMLLQLTVIKVMTTRILSVKTEFHAKEQYRDVIKILLESAKVDSKLICMFQNSDKLLSHMAAQCLALLLYFQLREKITLSNSWIAFCQKNLSEYSESNKAIYCLWTLTAIIKEIFKDSCSQKTEILKQFLTHFDTIFEVFYNSLFSQHFENCRDTSKIVNILMCFLDLLELLIASRIHLKLHFTCQRILFLKPSCMLEVITWPIQAFVKRKVIIFLKKCLLCKVGEDLCRGSVPALMPPDHHVAVDMLALANAVLQAVNSGLLKTLSVYEKHSFFGGDEVQPECELITSPDHVILRAASLVIMKSLEIKFQNYSSASEVKGA

SEQ ID NO: 40134 - protein, 560 aa, Homo sapiens [sequence omitted]

SEQ ID NO: 40135 - protein, 796 aa, Homo sapiens
MEPPALPREKEEFASAHFSPVLRCLASRLSPAWLELLPHGRLEELWASFFLEGPADQAFLVLMETIEGAAGPSFRLMKMARLLARFLREGRLAVLMEAQCRQQTQPGFILLRETLLGKVVALPDHLGNRLQQENLAEFFPQNYFRLLGEEVVRVLQAVVDSLQGGLDSSVSFVSQVLGKACVHGRQQEILGVLVPRLAALTQGSYLHQRVCWRLVEQVPDRAMEAVLTGLVEAALGPEVLSRLLGNLVVKNKKAQFVMTQKLLFLQSRLTTPMLQSLLGHLAMDSQRRPLLLQVLKELLETWGSSSAIRHTPLPQQRHVSKAVLICLAQLGEPELRDSRDELLASMMAGVKCRLDSSLPPVRRLGMIVAEVVSARIHPEGPPLKFQYEEDELSLELLALASPQPAGDGASEAGTSLVPATAEPPAETPAEIVDGGVPQAQLAGSDSDLDSDDEFVPYDMSGDRELKSSKAPAYVRDCVEALTTSEDIERWEAALRALEGLVYRSPTATREVSVELAKVLLHLEEKTCVVGFAGLRQRALVAVTVTDPAPVADYLTSQFYALNYSLRQRMDILDVLTLAAQELSRPGCLGRTPQPGSPSPNTPCLPEAAVSQPGSAVASDWRVVVEERIRSKTQRLSKGGPRQGPAGSPSRFNSVAGHFFFPLLQRFDRPLVTFDLLGEDQLVLGRLAHTLGALMCLAVNTTVAVAMGKALLEFVWALRFHIDAYVRQGLLSAVSSVLLSLPAARLLEDLMDELLEARSWLADVAEKDPDEDCRTLALRALLLLQRLKNRLLPPASP

SEQ ID NO: 40136 - protein, 245 aa, Homo sapiens
MAASRPLSRFWEWGKNIVCVGRNYADHVREMRSAVLSEPVLFLKPSTAYAPEGSPILMPAYTRNLHHELELGVVMGKRCRAVPEAAAMDYVGGYALCLDMTARDVQDECKKKGLPWTLAKSFTASCPVSAFVPKEKIPDPHKLKLWLKVNGELRQEGETSSMIFSIPYIISYVSKIITLEEGDIILTGTPKGVGPVKENDEIEAGIHGLRQGLTLSPKLECSSAITAHCSLELPGSSNPPSASRF

SEQ ID NO: 40137 - protein, 221 aa, Homo sapiens
MAASRPLSRFWEWGKNIVCVGRNYADHVREMRSAVLSEPVLFLKPSTAYAPEGSPILMPAYTRNLHHELELGVVMGKRCRAVPEAAAMDYVGGYALCLDMTARDVQDECKKKGLPWTLAKSFTASCPVSAFVPKEKIPDPHKLKLWLKVNGELRQEGETSSMIFSIPYIISYVSKIITLEEGDIILTGTPKGVGPVKENDEIEAGIHGLVSMTFKVEKPEY

SEQ ID NO: 40138 - protein, 334 aa, Homo sapiens [sequence omitted]

SEQ ID NO: 40139 - protein, 159 aa, Homo sapiens
MTSVRLPCYFENLLSHFLPQKAPDGKSYLLSLPTGDVPMDGMSVSDLGPVVLSLLKMPEKYVGQNIGLSTCRHTAEEYAALLTKHTRKVVHDAKVGLPPQMTPEDYEKLGFPGARDLANMFRFYALRPDRDIELTLRLNPKALTLDQWLEQHKGDFNLL

SEQ ID NO: 40140 - protein, 173 aa, Homo sapiens
MDELKHQVMINQFVLTAGCAADQAKQLLQAAHWQFETALSAFFQETNIPYSHHHHQMMCTPANTPATPPNFPDALTMFSRLKASESFHSGGSGSPMAATATSPPPHFPHAATSSSAASSWPTAASPPGGPQHHQPQPPLWTPTPPSPASDWPPLAPQQATSEPRAHPAMEAER

SEQ ID NO: 40141 - protein, 395 aa, Homo sapiens
MDEVTFRSDTVLSDVHLYTPNHRHLMVRLNSVGQPVFLSQFKLLWSQDSWTDSGAKGGSHRDVHTKEPPSAETGSTGSPPGSGHGNEGFSLQAGTDTTGQEVAEAQLDEDGDLDVVRRPRAASDSNPAGPLRDKVHPMILAQEEDDVLGEEAQGSPHDIIRIEHTMATPLEDVGKQVWRGALLLADYILFRQDLFRGCTALELGAGTGLASIIAATMARTVYCTDVGADLLSMCQRNIALNSHLAATGGGIVRVKELDWLKDDLCTDPKVPFSWSQEEISDLYDHTTILFAAEVFYDDDLTDAVFKTLSRLAHRLKNACTAILSVEKRLNFTLRHLDVTCEAYDHFRSCLHALEQLADGKLRFVVEPVEASFPQLLVYERLQQLELWKIIAEPVT

SEQ ID NO: 40142 - protein, 497 aa, Homo sapiens [sequence omitted]

SEQ ID NO: 40143 - protein, 870 aa, Homo sapiens
MGFHDKVLEDCNIVLSLNASNCKALYRKSKALSDLGRYKKAYDAVAKCSLAVPQDEHVIKLTQELAQKLGFKIRKAYVRAELSLKSVPGDGATKALNHSVEDIEPDLLTPRQEAVPVVSLPAPSFSHEVGSELASVPVMPLTSILPLQVEESALPSAVLANGGKMPFTMPEAFLDDGDMVLGDELDDLLDSAPETNETVMPSALVRGPLQTASVSPSMPFSASLLGTLPIGARYAPPPSFSEFYPPLTSSLEDFCSSLNSFSMSESKRDLSTSTSREGTPLNNSNSSLLLMNGPGSLFASENFLGISSQPRNDFGNFFGSAVTKPSSSVTPRHPLEGTHELRQACQICFVKSGPKLMDFTYHANIDHKCKKDILIGRIKNVEDKSWKKIRPRPTKTNYEGPYYICKDVAAEEECRYSGHCTFAYCQEEIDVWTLERKGAFSREAFFGGNGKINLTVFKLLQEHLGEFIFLCEKCFDHKPRMISKRNKDNSTACSHPVTKHEFEDNKCLVHILRETTVKYSKIRSFHGQCQLDLCRHEVRYGCLREDECFYAHSLVELKVWIMQNETGISHDAIAQESKRYWQNLEANVPGAQVLGNQIMPGFLNMKIKFVCAQCLRNGQVIEPDKNRKYCSAKARHSWTKDRRAMRVMSIERKKWMNIRPLPTKKQMPLQFDLCNHIASGKKCQYVGNCSFAHSPEEREVWTYMKENGIQDMEQFYELWLKSQKNEKSEDIASQSNKENGKQIHMPTDYAEVTVDFHCWMCGKNCNSEKQWQGHISSEKHKEKVFHTEDDQYCWQHRFPTGYFSICDRYMNGTCPEGNSCKFAHGNAELHEWEERRDALKMKLNKARKDHLIGPNDNDFGKYSFLFKDLN

SEQ ID NO: 40144 - protein, 1028 aa, Homo sapiens
MPPLKSPAAFHEQIKSLERARTENFLKHKIRSRPDRSELVRMHILEETFAEPSLQATQMKLKRARLADDLNEKIAQRPGPMELVEKNILPVDSSVKEAIIGVGKEDYPHTQGDFSFDEDSSDALSPDQPASQESQGSAASPSEPKVSESPSPVTTNTPAQFASVSPTVPEFLKTPPTADQPPPRPAAPVLPTNTVSSAKPGPALVKQSHPKNPNDKHRSKKCKDPKPRVKKLKYHQYIPPDQKGEKNEPQMDSNYARLLQQQQLFLQLQILSQQKQHYNYQTILPAPFKPLNDKNSNSGNSALNNATPNTPRQNTSTPVRKPGPLPSSLDDLKVSELKTELKLRGLPVSGTKPDLIERLKPYQEVNSSGLAAGGIVAVSSSAIVTSNPEVTVALPVTTLHNTVTSSVSTLKAELPPTGTSNATRVENVHSPLPISPSPSEQSSLSTDDTNMADTFTEIMTMMSPSQFLSSSPLRMTNNEDSLSPTSSTLSNLELDAAEKDRKLQEKEKQIEELKRKLEQEQKLVEVLKMQLEVEKRGQQQRPLEAQPSAPGHSVKSDQKHGSLGSSIKDEASLPDCSSSRQPIPVASHAVGQPVSTGGQTLVAKKAVVIKQEVPVGQAEQQSVVSQFYVSSQGQPPPAVVAQPQALLTTQTAQLLLPVSIQGSSVTSVQLPVGSLKLQTSPQAGMQTQPQIATAAQIPTAALASGLAPTVPQTQDTFPQHVLSQPQQVRKVFTNSASSNTVLPYQRHPAPAVQQPFINKASNSVLQSRNAPLPSLQNGPNTPNKPSSPPPPQQFVVQHSLFGSPVAKTKDPPRYEEAIKQTRSTQAPLPEISNAHSQQMDDLFDILIKSGEISLPIKEEPSPISKMRPVTASITTMPVNTVVSRPPPQVQMAPPVSLEPMGSLSASLENQLEAFLDGTLPSANEIPPLQSSSEDREPFSLIEDLQNDLLSHSGMLDHSHSPMETSETQFAAGTPCLSLDLSDSNLDNMEWLDITMPNSSSGLTPLSTTAPSMFSADFLDPQDLPLPWD

SEQ ID NO: 40145 - protein, 1144 aa, Homo sapiens
MIPLYDKGDFILKIEPPLGWSFEPTTVELHVDGVSDICTKGGDINFVFTGFSVNGKVLSKGQPLGPAGVQVSLRNTGTEAKIQSTVTQPGGKFAFFKVLPGDYEILATHPTWALKEASTTVRVTNSNANAASPLIVAGYNVSGSVRSDGEPMKGVKFLLFSSLVTKEDVLGCNVSPVPGFQPQDESLVYLCYTVSREDGSFSFYSLPSGGYTVIPFYRGERITFDVAPSRLDFTVEHDSLKIEPVFHVMGFSVTGRVLNGPEGDGVPEAVVTLNNQIKVKTKADGSFRLENITTGTYTIHAQKEHLYFETVTIKIAPNTPQLADIIATGFSVCGQISIIRFPDTVKQMNKYKVVLSSQDKDKSLVTVETDAHGSFCFKAKPGTYKVQVMVPEAETRAGLTLKPQTFPLTVTNRPMMDVAFVQFLASVSGKVSCLDTCGDLLVTLQSLSRQGEKRSLQLSGKVNAMTFTFDNVLPGKYKISIMHEDWCWKNKSLEVEVLEDDMSAVEFRQTGYMLRCSLSHAITLEFYQDGNGRENVGIYNLSKGVNRFCLSKPGVYKVTPRSCHRFEQAFYTYDTSSPSILTLTAIRHHVLGTITTDKMMDVTVTIKSSIDSEPALVLGPLKSVQELRREQQLAEIEARRQEREKNGNEEGEERMTKPPVQEMVDELQGPFSYDFSYWARSGEKITVTPSSKELLFYPPSMEAVVSGESCPGKLIEIHGKAGLFLEGQIHPELEGVEIVISEKGASSPLITVFTDDKGAYSVGPLHSDLEYTVTSQKEGYVLTAVEGTIGDFKAYALAGVSFEIKAEDDQPLPGVLLSLSGGLFRSNLLTQDNGILTFSNLSPGQYYFKPMMKEFRFEPSSQMIEVQEGQNLKITITGYRTAYSCYGTVSSLNGEPEQGVAMEAVGQNDCSIYGEDTVTDEEGKFRLRGLLPGCVYHVQLKAEGNDHIERALPHHRVIEVGNNDIDDVNIIVFRQINQFDLSGNVITSSEYLPTLWVKLYKSENLDNPIQTVSLGQSLFFHFPPLLRDGENYVVLLDSTLPRSQYDYILPQVSFTAVGYHKHITLIFNPTRKLPEQDIAQGSYIALPLTLLVLLAGYNHDKLIPLLLQLTSRLQGVRALGQAASDNSGPEDAKRQAKKQKTRRT

SEQ ID NO: 40146 - protein, 3521 aa, Homo sapiens
MSYSDESRLSNLLRRITREDDRDRRLATVKQLKEFIQQPENKLVLVKQLDNILAAVHDVLNESSKLLQELRQEGACCLGLLCASLSYEAEKIFKWIFSKFSSSAKDEVKLLYLCATYKALETVGEKKAFSSVMQLVMTSLQSILENVDTPELLCKCVKCILLVARCYPHIFSTNFRDTVDILVGWHIDHTQKPSLTQQVSGWLQSLEPFWVADLAFSTTLLGQFLEDMEAYAEDLSHVASGESVDEDVPPPSVSLPKLAALLRVFSTVVRSIGERFSPIRGPPITEAYVTDVLYRVMRCVTAANQVFFSEAVLTAANECVGVLLGSLDPSMTIHCDMVITYGLDQLENCQTCGTDYIISVLNLLTLIVEQINTKLPSSFVEKLFIPSSKLLFLRYHKEKEVVAVAHAVYQAVLSLKNIPVLETAYKLILGEMTCALNNLLHSLQLPEACSEIKHEAFKNHVFNVDNAKFVVIFDLSALTTIGNAKNSLIGMWALSPTVFALLSKNLMIVHSDLAVHFPAIQYAVLYTLYSHCTRHDHFISSSLSSSSPSLFDGAVISTVTTATKKHFSIILNLLGILLKKDNLNQDTRKLLMTWALEAAVLMKKSETYAPLFSLPSFHKFCKGLLANTLVEDVNICLQACSSLHALSSSLPDDLLQRCVDVCRVQLVHSGTRIRQAFGKLLKSIPLDVVLSNNNHTEIQEISLALRSHMSKAPSNTFHPQDFSDVISFILYGNSHRTGKDNWLERLFYSCQRLDKRDQSTIPRNLLKTDAVLWQWAIWEAAQFTVLSKLRTPLGRAQDTFQTIEGIIRSLAAHTLNPDQDVSQWTTADNDEGHGNNQLRLVLLLQYLENLEKLMYNAYEGCANALTSPPKVIRTFFYTNRQTCQDWLTRIRLSIMRVGLLAGQPAVTVRHGFDLLTEMKTTSLSQGNELEVTIMMVVEALCELHCPEAIQGIAVWSSSIVGKNLLWINSVAQQAEGRFEKASVEYQEHLCAMTGVDCCISSFDKSVLTLANAGRNSASPKHSLNGESRKTVLSKPTDSSPEVINYLGNKACECYISIADWAAVQEWQNAIHDLKKSTSSTSLNLKADFNYIKSLSSFESGKFVECTEQLELLPGENINLLAGGSKEKIDMKKLLPNMLSPDPRELQKSIEVQLLRSSVCLATALNPIEQDQKWQSITENVVKYLKQTSRIAIGPLRLSTLTVSQSLPVLSTLQLYCSSALENTVSNRLSTEDCLIPLFSEALRSCKQHDVRPWMQALRYTMYQNQLLEKIKEQTVPIRSHLMELGLTAAKFARKRGNVSLATRLLAQCSEVQLGKTTTAQDLVQHFKKLSTQGQVDEKWGPELDIEKTKLLYTAGQSTHAMEMLSSCAISFCKSVKAEYAVAKSILTLAKWIQAEWKEISGQLKQVYRAQHQQNFTGLSTLSKNILTLIELPSVNTMEEEYPRIESESTVHIGVGEPDFILGQLYHLSSVQAPEVAKSWAALASWAYRWGRKVVDNASQGEGVRLLPREKSEVQNLLPDTITEEEKERIYGILGQAVCRPAGIQDEDITLQITESEDNEEDDMVDVIWRQLISSCPWLSELDESATEGVIKVWRKVVDRIFSLYKLSCSAYFTFLKLNAGQIPLDEDDPRLHLSHRVEQSTDDMIVMATLRLLRLLVKHAGELRQYLEHGLETTPTAPWRGIIPQLFSRLNHPEVYVRQSICNLLCRVAQDSPHLILYPAIVGTISLSSESQASGNKFSTAIPTLLGNIQGEELLVSECEGGSPPASQDSNKDEPKSGLNEDQAMMQDCYSKIVDKLSSANPTMVLQVQMLVAELRRVTVLWDELWLGVLLQQHMYVLRRIQQLEDEVKRVQNNNTLRKEEKIAIMREKHTALMKPIVFALEHVRSITAAPAETPHEKWFQDNYGDAIENALEKLKTPLNPAKPGSSWIPFKEIMLSLQQRAQKRASYILRLEEISPWLAAMTNTEIALPGEVSARDTVTIHSVGGTITILPTKTKPKKLLFLGSDGKSYPYLFKGLEDLHLDERIMQFLSIVNTMFATINRQETPRFHARHYSVTPLGTRSGLIQWVDGATPLFGLYKRWQQREAALQAQKAQDSYQTPQNPGIVPRPSELYYSKIGPALKTVGLSLDVSRRDWPLHVMKAVLEELMEATPPNLLAKELWSSCTTPDEWWRVTQSYARSTAVMSMVGYIIGLGDRHLDNVLIDMTTGEVVHIDYNVCFEKGKSLRVPEKVPFRMTQNIETALGVTGVEGVFRLSCEQVLHIMRRGRETLLTLLEAFVYDPLVDWTAGGEAGFAGAVYGGGGQQAESKQSKREMEREITRSLFSSRVAEIKVNWFKNRDEMLVVLPKLDGSLDEYLSLQEQLTDVEKLQGKLLEEIEFLEGAEGVDHPSHTLQHRYSEHTQLQTQQRAVQEAIQVKLNEFEQWITHYQAAFNNLEATQLASLLQEISTQMDLGPPSYVPATAFLQNAGQAHLISQCEQLEGEVGALLQQRRSVLRGCLEQLHHYATVALQYPKAIFQKHRIEQWKTWMEELICNTTVERCQELYRKYEMQYAPQPPPTVCQFITATEMTLQRYAADINSRLIRQVERLKQEAVTVPVCEDQLKEIERCIKVFLHENGEEGSLSLASVIISALCTLTRRNLMMEGAASSAGEQLVDLTSRDGAWFLEELCSMSGNVTCLVQLLKQCHLVPQDLDIPNPMEASETVHLANGVYTSLQELNSNFRQIIFPEALRCLMKGEYTLESMLHELDGLIEQTTDGVPLQTLVESLQAYLRNAAMGLEEETHAHYIDVARLLHAQYGELIQPRNGSVDETPKMSAGQMLLVAFDGMFAQVETAFSLLVEKLNKMEIPIAWRKIDIIREARSTQVNFFDDDNHRQVLEEIFFLKRLQTIKEFFRLCGTFSKTLSGSSSLEDQNTVNGPVQIVNVKTLFRNSCFSEDQMAKPIKAFTADFVRQLLIGLPNQALGLTLCSFISALGVDIIAQVEAKDFGAESKVSVDDLCKKAVEHNIQIGKFSQLVMNRATVLASSYDTAWKKHDLVRRLETSISSCKTSLQRVQLHIAMFQWQHEDLLINRPQAMSVTPPPRSAILTSMKKKLHTLSQIETSIATVQEKLAALESSIEQRLKWAGGANPALAPVLQDFEATIAERRNLVLKESQRASQVTFLCSNIIHFESLRTRTAEALNLDAALFELIKRCQQMCSFASQFNSSVSELELRLLQRVDTGLEHPIGSSEWLLSAHKQLTQDMSTQRAIQTEKEQQIETVCETIQNLVDNIKTVLTGHNRQLGDVKHLLKAMAKDEEAALADGEDVPYENSVRQFLGEYKSWQDNIQTVLFTLVQAMGQVRSQEHVEMLQEITPTLKELKTQSQSIYNNLVSFASPLVTDATNECSSPTSSATYQPSFAAAVRSNTGQKTQPDVMSQNARKLIQKNLATSADTPPSTVPGTGKSVACSPKKAVRDPKTGKAVQERNSYAVSVWKRVKAKLEGRDVDPNRRMSVAEQVDYVIKEATNLDNLAQLYEGWTAWV

SEQ ID NO: 40147 - protein, 398 aa, Homo sapiens [sequence omitted]

SEQ ID NO: 40148 - protein, 631 aa, Homo sapiens
MPDPWAEFHLEDIATERATRHRYNAVTGEWLDDEVLIKMASQPFGRGAMRECFRTKKLSNFLHAQQWKGASNYVAKRYIEPVDRDVYFEDVRLQMEAKLWGEEYNRHKPPKQVDIMQMCIIELKDRPGKPLFHLEHYIEGKYIKYNSNSGFVRDDNIRLTPQAFSHFTFERSGHQLIVVDIQGVGDLYTDPQIHTETGTDFGDGNLGVRGMALFFYSHACNRICESMGLAPFDLSPRERDAVNQNTKLLQSAKTILRGTEEKCGSPQVRTLSGSRPPLLRPLSENSGDENMSDVTFDSLPSSPSSATPHSQKLDHLHWPVFSDLDNMASRDHDHLDNHRESENSGDSGYPSEKRGELDDPEPREHGHSYSNRKYESDEDSLGSSGRVCVEKWNLLNSSRLHLPRASAVALEVQRLNALDLEKKIGKSILGKVHLAMVRYHEGGRFCEKGEEWDQESAVFHLEHAANLGELEAIVGLGLMYSQLPHHILADVSLKETEENKTKGFDYLLKAAEAGDRQSMILVARAFDSGQNLSPDRCQDWLEALHWYNTALEMTDCDEGGEYDGMQDEPRYMMLAREAEMLFTGGYGLEKDPQRSGDLYTQAAEAAMEAMKGRLANQYYQKAEEAWAQMEE

SEQ ID NO: 40149 - protein, 612 aa, Homo sapiens
MDKQTFCSSQTTSNTSRYAAALYRQGELHLTPLHGILQLRPSFSYLDKADAKHREREAANEAGDSSQDEAEDDVKQITVRFSRPESEQARQRRVQSYEFLQKKHAEEPWVHLHYYGLRDSRSEHERQYLLCPGSSGVENTELVKSPSEYLMMLMPPSQEEEKDKPVAPSNVLSMAQLRTLPLADQIKILMKNVKVMPFANLMSLLGPSIDSVAVLRGIQKVAMLVQGNWVVKSDILYPKDSSSPHSGVPAEVLCRGRDFVMWKFTQSRWVVRKEVATVTKLCAEDVKDFLEHMAVVRINKGWEFILPYDGEFIKKHPDVVQRQHMLWTGIQAKLEKVYNLVKETMPKKPDAQSGPAGLVCGDQRIQVAKTKAQQNHALLERELQRRKEQLRVPAVPPGVRIKEEPVSEEGEEDEEQEAEEEPMDTSPSGLHSKLANGLPLGRAAGTDSFNGHPPQGCASTPVARELKAFVEATFQRQFVLTLSELKRLFNLHLASLPPGHTLFSGISDRMLQDTVLAAGCKQILVPFPPQTAASPDEQKVFALWESGDMSDQHRQVLLEIFSKNYRVRRNMIQSRLTQECGEDLSKQEVDKVLKDCCVSYGGMWYLKGTVQS

SEQ ID NO: 40150 - protein, 115 aa, Homo sapiens
MHTKPNSQGPPNPMALPSEHGLEQPSHTPPQTPTPPSTPPLGKQNPSLPAPQTLAGGNPETAQPHAGTLPRPRPVPKPRNRPSVPPPPQPPGVHSAGDSSLTNTAPTASKIVTDV

SEQ ID NO: 40151 - protein, 234 aa, Homo sapiens
MDTTFWRLKDEDLLPSKYFEVDFPMIVTRKLHSIKCKPPLSSPILELHSEDTLQMDGHILDSKRYAVIGADLRDLSELEEKLKKCNMNTQLPTLLIAECVLVYMTPEQSANLLKWAANSFERAMFINYEQVNMGDRFGQIMIENLRRRQCDLAGVETCKSLESQKERLLSNGWETASAVDMMELYNRLPRAEVSRIESLEFLDEMELLEQLMRHYCLCWATKGGNELGLKEITY

SEQ ID NO: 40152 - protein, 249 aa, Homo sapiens
MQTENKISPYYRTKLRGLYTTAKADAEAECNILRKALDKIAEIKSLLEERRIAAKIAGLYNDSEPPRKTMRRGVLMTLLQQSAMTLPLWIGKPGDKPPPLCGAIPASGDYVARPGDKVAARVKAVDGDEQWILAEVVSYSHATNKYEVDDIDEEGKERHTLSRRRVIPLPQWKANPETDPEALFQKEQLVLALYPQTTCFYRALIHAPPQRPQDDYSVLFEDTSYADGYSPPLNVAQRYVVACKEPKKK

SEQ ID NO: 40153 - protein, 149 aa, Homo sapiens
MPPPSEIQRLYELLAAHGTLELQAEILPRRPPTPEAQSEEERSDEEPEAKEEEEEKPHMPTEFDFDDEPVTPKDSLIDRRRTPGSSARSQKREARLDKVLSDMKRHKKLEEQILRTGRDLFSLDSEDPSPASPPLRSSGSSLFPRQRKY

SEQ ID NO: 40154 - protein, 991 aa, Homo sapiens
MSYSGKQSNEKWQDIIKEVRFLQKLRHPNTIQYRGCYLREHTAWLVMEYCLGSASDLLEVHKKPLQEVEIAAVTHGALQGLAYLHSHNMIHRDVKAGNILLSEPGLVKLGDFGSASIMAPANSFVGTPYWMAPEVILAMDEGQYDGKVDVWSLGITCIELAERKPPLFNMNAMSALYHIAQNESPVLQSGHWSEYFRNFVDSCLQKIPQDRPTSEVLLKHRFVLRERPPTVIMDLIQRTKDAVRELDNLQYRKMKKILFQEAPNGPGAEAPEEEEEAEPYMHRAGTLTSLESSHSVPSMSISASSQSSSVNSLADASDNEEEEEEEEEEEEEEEGPEAREMAMMQEGEHTVTSHSSIIHRLPGSDNLYDDPYQPEITPSPLQPPAAPAPTSTTSSARRRAYCRNRDHFATIRTASLVSRQIQEHEQDSALREQLSGYKRMRRQHQKQLLALESRLRGEREEHSARLQRELEAQRAGFGAEAEKLARRHQAIGEKEARAAQAEERKFQQHILGQQKKELAALLEAQKRTYKLRKEQLKEELQENPSTPKREKAEWLLRQKEQLQQCQAEEEAGLLRRQRQYFELQCRQYKRKMLLARHSLDQDLLREDLNKKQTQKDLECALLLRQHEATRELELRQLQAVQRTRAELTRLQHQTELGNQLEYNKRREQELRQKHAAQVRQQPKSLKSKELQIKKQFQETCKIQTRQYKALRAHLLETTPKAQHKSLLKRLKEEQTRKLAILAEQYDQSISEMLSSQALRLDETQEAEFQALRQQLQQELELLNAYQSKIKIRTESQHERELRELEQRVALRRALLEQRVEEELLALQTGRSERIRSLLERQAREIEAFDAESMRLGFSSMALGGIPAEAAAQGYPAPPPAPAWPSRPVPRSGAHWSHGPPPPGMPPPAWRQPSLLAPPGPPNWLGPPTQSGTPRGGALLLLRNSPQPLRRAASGGSGSENVGPPAAAVPGPLSRSTSVASHILNGSSHFYS

SEQ ID NO: 40155 - protein, 1177 aa, Homo sapiens
MSYSGKQSNEKWQDIIKEVRFLQKLRHPNTIQYRGCYLREHTAWLVMEYCLGSASDLLEVHKKPLQEVEIAAVTHGALQGLAYLHSHNMIHRDVKAGNILLSEPGLVKLGDFGSASIMAPANSFVGTPYWMAPEVILAMDEGQYDGKVDVWSLGITCIELAERKPPLFNMNAMSALYHIAQNESPVLQSGHWSEYFRNFVDSCLQKIPQDRPTSEVLLKHRFVLRERPPTVIMDLIQRTKDAVRELDNLQYRKMKKILFQEAPNGPGAEAPEEEEEAEPYMHRAGTLTSLESSHSVPSMSISASSQSSSVNSLADASDNEEEEEEEEEEEEEEEGPEAREMAMMQEGEHTVTSHSSIIHRLPGSDNLYDDPYQPEITPSPLQPPAAPAPTSTTSSARRRAYCRNRDHFATIRTASLVSRQIQEHEQDSALREQLSGYKRMRRQHQKQLLALESRLRGEREEHSARLQRELEAQRAGFGAEAEKLARRHQAIGEKEARAAQAEERKFQQHILGQQKKELAALLEAQKRTYKLRKEQLKEELQENPSTPKREKAEWLLRQKEQLQQCQAEEEAGLLRRQRQYFELQCRQYKRKMLLARHSLDQDLLREDLNKKQTQKDLECALLLRQHEATRELELRQLQAVQRTRAELTRLQHQTELGNQLEYNKRREQELRQKHAAQVRQQPKSLKVRAGQRPPGLPLPIPGALGPPNTGTPIEQQPCSPGQEAVLDQRMLGEEEEAVGERRILGKEGATLEPKQQRILGEESGAPSPSPQKHGSLVDEEVWGLPEEIEELRVPSLVPQERSIVGQEEAGTWSLWGKEDESLLDEEFELGWVQGPALTPVPEEEEEEEEGAPIGTPRDPGDGCPSPDIPPEPPPTHLRPCPASQLPGLLSHGLLAGLSFAVGSSSGLLPLLLLLLLPLLAAQGGGGLQAALLALEVGLVGLGASYLLLCTALHLPSSLFLLLAQGTALGAVLGLSWRRGLMGVPLGLGAAWLLAWPGLALPLVAMAAGGRWVRQQGPRVRRGISRLWLRVLLRLSPMAFRALQGCGAVGDRGLFALYPKTNKDGFRSRLPVPGPRRRNPRTTQHPLALLARVWVLCKGWNWRLARASQGLASHLPPWAIHTLASWGLLRGERPTRIPRLLPRSQRQLGPPASRQPLPGTLAGRRSRTRQSRALPPWR

SEQ ID NO: 40156 - protein, 62 aa, Homo sapiens
MENANVLARYASICQQNGIVPIVEPEILPDGDHDLKRCQYVTEKVNGYLPDQCKVAGRGPWG

SEQ ID NO: 40157 - protein, 330 aa, Homo sapiens
MDSCVIPLRHGGLSLVQTTDFFYPLVEDPYMMGRIACANVLSDLYAMGITECDNMLMLLSVSQSMSEEEREKVTPLMVKGFRDAAEEGGTAVTGGQTVVNPWIIIGGVATVVCQPNEFIMPDSAVVGDVLVLTKPLGTQVAVNAHQWLDNPERWNKVKMVVSREEVELAYQEAMFNMATLNRTAAGLMHTFNAHAATDITGFGILGHSQNLAKQQRNEVSFVIHNLPIIAKMAAVSKASGRFGLLQGTSAETSGGLLICLPREQAARFCSEIKSSKYGEGHQAWIVGIVEKGNRTARIIDKPRVIEVLPRGATAAVLAPDSSNASSEPSS

SEQ ID NO: 40158 - protein, 1160 aa, Homo sapiens
MALLSGFFFFAPASSYNLDVRGARSFSPPRAGRHFGYRVLQVGNGVIVGAPGEGNSTGSLYQCQSGTGHCLPVTLRGSNYTSKYLGMTLATDPTDGSILACDPGLSRTCDQNTYLSGLCYLFRQNLQGPMLQGRPGFQECIKGNVDLVFLFDGSMSLQPDEFQKILDFMKDVMKKLSNTSYQFAAVQFSTSYKTEFDFSDYVKRKDPDALLKHVKHMLLLTNTFGAINYVATEVFREELGARPDATKVLIIITDGEATDSGNIDAAKDIIRYIIGIGKHFQTKESQETLHKFASKPASEFVKILDTFEKLKDLFTELQKKIYVIEGTSKQDLTSFNMELSSSGISADLSRGHAVVGAVGAKDWAGGFLDLKADLQDDTFIGNEPLTPEVRAGYLGYTVTWLPSRQKTSLLASGAPRYQHMGRVLLFQEPQGGGHWSQVQTIHGTQIGSYFGGELCGVDVDQDGETELLLIGAPLFYGEQRGGRVFIYQRRQLGFEEVSELQGDPGYPLGRFGEAITALTDINGDGLVDVAVGAPLEEQGAVYIFNGRHGGLSPQPSQRIEGTQVLSGIQWFGRSIHGVKDLEGDGLADVAVGAESQMIVLSSRPVVDMVTLMSFSPAEIPVHEVECSYSTSNKMKEGVNITICFQIKSLIPQFQGRLVANLTYTLQLDGHRTRRRGLFPGGRHELRRNIAVTTSMSCTDFSFHFPVCVQDLISPINVSLNFSLWEEEGTPRDQRAQGKDIPPILRPSLHSETWEIPFEKNCGEDKKCEANLRVSFSPARSRALRLTAFASLSVELSLSNLEEDAYWVQLDLHFPPGLSFRKVEMLKPHSQIPVSCEELPEESRLLSRALSCNVSSPIFKAGHSVALQMMFNTLVNSSWGDSVELHANVTCNNEDSDLLEDNSATTIIPILYPINILIQDQEDSTLYVSFTPKGPKIHQVKHMYQVRIQPSIHDHNIPTLEAVVGVPQPPSEGPITHQWSVQMEPPVPCHYEDLERLPDAAEPCLPGALFRCPVVFRQEILVQVIGTLELVGEIEASSMFSLCSSLSISFNSSKHFHLYGSNASLAQVVMKVDVVYEKQMLYLYVLSGIGGLLLLLLIFIVLYKVGFFKRNLKEKMEAGRGVPNGIPAEDSEQLASGQEAGDPGCLKPLHEKDSESGGGKD

SEQ ID NO: 40159 - protein, 1076 aa, Homo sapiens
MALLSGFFFFAPASSYNLDVRGARSFSPPRAGRHFGYRVLQVGNGVIVGAPGEGNSTGSLYQCQSGTGHCLPVTLRGSNYTSKYLGMTLATDPTDGSILFAAVQFSTSYKTEFDFSDYVKRKDPDALLKHVKHMLLLTNTFGAINYVATEVFREELGARPDATKVLIIITDGEATDSGNIDAAKDIIRYIIGIGKHFQTKESQETLHKFASKPASEFVKILDTFEKLKDLFTELQKKIYVIEGTSKQDLTSFNMELSSSGISADLSRGHAVVGAVGAKDWAGGFLDLKADLQDDTFIGNEPLTPEVRAGYLGYTVTWLPSRQKTSLLASGAPRYQHMGRVLLFQEPQGGGHWSQVQTIHGTQIGSYFGGELCGVDVDQDGETELLLIGAPLFYGEQRGGRVFIYQRRQLGFEEVSELQGDPGYPLGRFGEAITALTDINGDGLVDVAVGAPLEEQGAVYIFNGRHGGLSPQPSQRIEGTQVLSGIQWFGRSIHGVKDLEGDGLADVAVGAESQMIVLSSRPVVDMVTLMSFSPAEIPVHEVECSYSTSNKMKEGVNITICFQIKSLIPQFQGRLVANLTYTLQLDGHRTRRRGLFPGGRHELRRNIAVTTSMSCTDFSFHFPVCVQDLISPINVSLNFSLWEEEGTPRDQRAGKDIPPILRPSLHSETWEIPFEKNCGEDKKCEANLRVSFSPARSRALRLTAFASLSVELSLSNLEEDAYWVQLDLHFPPGLSFRKVEMLKPHSQIPVSCEELPEESRLLSRALSCNVSSPIFKAGHSVALQMMFNTLVNSSWGDSVELHANVTCNNEDSDLLEDNSATTIIPILYPINILIQDQEDSTLYVSFTPKGPKIHQVKHMYQVRIQPSIHDHNIPTLEAVVGVPQPPSEGPITHQWSVQMEPPVPCHYEDLERLPDAAEPCLPGALFRCPVVFRQEILVQVIGTLELVGEIEASSMFSLCSSLSISFNSSKHFHLYGSNASLAQVVMKVDVVYEKQMLYLYVLSGIGGLLLLLLIFIVLYKVGFFKRNLKEKMEAGRGVPNGIPAEDSEQLASGQEAGDPGCLKPLHEKDSESGGGKD

SEQ ID NO: 40160 - protein, 365 aa, Homo sapiens [sequence omitted]

SEQ ID NO: 40161 - protein, 272 aa, Homo sapiens
MATIEKVRRWEKRWVTVGDTSLRIFKWVPVVDPQEEERRRAGGGAERSRGRERRGRGASPRGGGPLILLDLNDENSNQSFHSEGSLQKGTEPSPGGTPQPSRPVSPAGPPEGVPEEAQPPRLGQERDPGGITAGSTDEPPMLTKEEPVPELLEAETMEMMLDKKQIQAIFLFELKMGHKAVETLRNINNTLGPGTANEHIVQWWFKKFCKEDKSLEDEKHSVWPSEVDNDQLKALIEADPVKTTQEVAQELNHRPFYGRLAFEANWKGEKAQ

SEQ ID NO: 40162 - protein, 1739 aa, Homo sapiens
MRTHAPEGRRRHRPPRPKEATPHLQGETVSTDSWGQRLGSSEGWENQTKHTEETPDCESVPDPRAASGTWEDLPTRQREGLASHPGPEDGADGWGPSTNSARAPPLPIPASSLLSNLEQYLAESVVNFTGGQEPTQSPPAEEERRYKCSQCGKTYKHAGSLTNHRQSHTLGIYPCAICFKEFSNLMALKNHSRLHAQYRPYHCPHCPRVFRLPRELLEHQQSHEGERQEPRWEEKGMPTTNGHTDESSQDQLPSAQMLNGSAELSTSGELEDSGLEEYRPFRCGDCGRTYRHAGSLINHRKSHQTGVYPCSLCSKQLFNAAALKNHVRAHHRPRQGVGENGQPSVPPAPLLLAETTHKEEEDPTTTLDHRPYKCSECGRAYRHRGSLVNHRHSHRTGEYQCSLCPRKYPNLMALRNHVRVHCKAARRSADIGAEGAPSHLKVELPPDPVEAEAAPHTDQDHVCKHEEEATDITPAADKTAAHICSICGLLFEDAESLERHGLTHGAGEKENSRTETTMSPPRAFACRDCGKSYRHSGSLINHRQTHQTGDFSCGACAKHFHTMAAMKNHLRRHSRRRSRRHRKRAGGASGGREAKLLAAESWTRELEDNEGLESPQDPSGESPHGAEGNLESDGDCLQAESEGDKCGLERDETHFQGDKESGGTGEGLERKDASLLDNLDIPGEEGGGTHFCDSLTGVDEDQKPATGQPNSSSHSANAVTGWQAGAAHTCSDCGHSFPHATGLLSHRPCHPPGIYQCSLCPKEFDSLPALRSHFQNHRPGEATSAQPFLCCLCGMIFPGRAGYRLHRRQAHSSSGMTEGSEEEGEEEGVAEAAPARSPPLQLSEAELLNQLQREVEALDSAGYGHICGCCGQTYDDLGSLERHHQSQSSGTTADKAPSPLGVAGDAMEMVVDSVLEDIVNSVSGEGGDAKSQEGAGTPLGDSLCIQGGESLLEAQPRPFRCNQCGKTYRHGGSLVNHRKIHQTGDFLCPVCSRCYPNLAAYRNHLRNHPRCKGSEPQVGPIPEAAGSSELQVGPIPEGGSNKPQHMAEEGPGQAEVEKLQEELKVEPLEEVARVKEEVWEETTVKGEEIEPRLETAEKGCQTEASSERPFSCEVCGRSYKHAGSLINHRQSHQTGHFGCQACSKGFSNLMSLKNHRRIHADPRRFRCSECGKAFRLRKQLASHQRVHMERRGGGGTRKATREDRPFRCGQCGRTYRHAGSLLNHRRSHETGQYSCPTCPKTYSNRMALKDHQRLHSENRRRRAGRSRRTAVRCALCGRSFPGRGSLERHLREHEETEREPANGQGGLDGTAASEANLTGSQGLETQLGGAEPVPHLEDGVPRPGERSQSPIRAASSEAPEPLSWGAGKAGGWPVGGGLGNHSGGWVPQFLTRSEEPEDSVHRSPCHAGDCQLNGPTLSHMDSWDNRDNSSQLQPGSHSSCSQCGKTYCQSGSLLNHNTNKTDRHYCLLCSKEFLNPVATKSHSHNHIDAQTFACPDCGKAFESHQELASHLQAHARGHSQVPAQMEEARDPKAGTGEDQVVLPGQGKAQEAPSETPRGPGESVERARGGQAVTSMAAEDKERPFRCTQCGRSYRHAGSLLNHQKAHTTGLYPCSLCPKLLPNLLSLKNHSRTHTDPKRHCCSICGKAFRTAARLEGHGRVHAPREGPFTCPHCPRHFRRRISFVQHQQQHQEEWTVAGSGAPVAPVTGRGDLPLPPPPTPTTPLLDPSPQWPADLSFSL

SEQ ID NO: 40163 - protein, 255 aa, Homo sapiens
MASNDYTQQATQSYGAYPTQPGQGYSQQSSQPYGQQSYSGYSQSTDTSGYGQSSYSSYGQSQNTGYGTQSTPQGYGSTGGYGSSQSSQSSYGQQSSYPGYGQQPAPSSTSGSYGSSSQSSSYGQPQSGSYSQQPSYGGQQQSYGQQQSYNPPQGYGQQNQYNSSSGGGGGGGGGGNYGQDQSSMSSGGGSGGGYGNQDQSGGGGSGGYGQQDRGGRGRGGSGGGGGGGGGGYNRSSGGYEPRGRGGGRGGRGGMG

SEQ ID NO: 40164 - protein, 471 aa, Homo sapiens [sequence omitted]

SEQ ID NO: 40165 - protein, 713 aa, Homo sapiens
MDPRIAWFQPEQLGPSNSLWMQIWETTQGLRNLYFNHHCHSSGGASGGGGSSSSSSTATGGSGSSTGSPGGAASAPAPAPAGMYRSGERLLGSHALPAEQRDFLPLETTNNNNNHHQPGAWARRAGSSASSPPSASSSPHPSAAVPAADPADSASGSSNKRKRDNKASTYGLNYSLLQPSGGRAAGGGRADGGGVVYSGTPWKRRNYNQGVVGLHEEISDFYEYMSPRPEEEKMRMEVVNRIESVIKELWPSADVQIFGSFKTGLYLPTSDIDLVVFGKWENLPLWTLEEALRKHKVADEDSVKVLDKATVPIIKLTDSFTEVKVDISFNVQNGVRAADLIKDFTKKYPVLPYLVLVLKQFLLQRDLNEVFTGGIGSYSLFLMAVSFLQLHPREDACIPNTNYGVLLIEFFELYGRHFNYLKTGIRIKDGGSYVAKDEVQKNMLDGYRPSMLYIEDPLQPGNDVGRSSYGAMQVKQAFDYAYVVLSHAVSPIAKYYPNNETESILGRIIRVTDEVATYRDWISKQWGLKNRPEPSCNGNGVTLIVDTQQLDKCNNNLSEENEALGKCRSKTSESLSKHSSNSSSGPVSSSSATQSSSSDVDSDATPCKTPKQLLCRPSTGNRVGSQDVSLESSQAVGKMQSTQTTNTSNSTNKSQHGSARLFRSSSKGFQGTTQTSHGSLMTNKQHQGKSNNQYYHGKKRKHKRDAPLSDLCR

SEQ ID NO: 40166 - protein, 287 aa, Homo sapiens [sequence omitted]

SEQ ID NO: 40167 - protein, 45 aa, Homo sapiens
MKLTIPVFLFKSLQFIMELLYWLLEGGDSEDKEVILSLLKEYFPL

SEQ ID NO: 40168 - protein, 1835 aa, Homo sapiens
MKFFLPNTDLDSRNETLDPEQRVILQLNKLHVQGSDTWQSFIHCVCMQLEVPLDLEVLLLSTFGYDDGFTSQLGAEGKSQPESQLHHGLKRPHQSCGSSPRRKQCKKQQLELAKKYLQLLRTSAQQRYRSQIPGSGQPHAFHQVYVPPILRRATASLDTPEGAIMGDVKVEDGADVSISDLFNTRVNKGPRVTVLLGKAGMGKTTLAHRLCQKWAEGHLNCFQALFLFEFRQLNLITRFLTPSELLFDLYLSPESDHDTVFQYLEKNADQVLLIFDGLDEALQPMGPDGPGPVLTLFSHLCNGTLLPGCRVMATSRPGKLPACLPAEAAMVHMLGFDGPRVEEYVNHFFSAQPSREGALVELQTNGRLRSLCAVPALCQVACLCLHHLLPDHAPGQSVALLPNMTQLYMQMVLALSPPGHLPTSSLLDLGEVALRGLETGKVIFYAKDIAPPLIAFGATHSLLTSFCVCTGPGHQQTGYAFTHLSLQEFLAALHLMASPKVNKDTLTQYVTLHSRWVQRTKARLGLSDHLPTFLAGLASCTCRPFLSHLAQGNEDCVGAKQAAVVQVLKKLATRKLTGPKVVELCHCVDETQEPELASLTAQSLPYQLPFHNFPLTCTDLATLTNILEHREAPIHLDFDGCPLEPHCPEALVGCGQIENLSFKSRKCGDAFAEALSRSLPTMGRLQMLGLAGSKITARGISHLVKALPLCPQLKEVSFRDNQLSDQVVLNIVEVLPHLPRLRKLDLSSNSICVSTLLCLARVAVTCPTVRMLQAREADLIFLLSPPTETTAELQRAPDLQESDGQRKGAQSRSLTLRLQKCQLQVHDAEALIALLQEGPHLEEVDLSGNQLEDEGCRLMAEAASQLHIARKLDLSNNGLSVAGVHCVLRAVSACWTLAELHISLQHKTVIFMFAQEPEEQKGPQERAAFLDSLMLQMPSELPLSSRRMRLTHCGLQEKHLEQLCKALGGSCHLGHLHLDFSGNALGDEGAARLAQLLPGLGALQSLNLSENGLSLDAVLGLVRCFSTLQWLFRLDISFESQHILLRGDKTSRDMWATGSLPDFPAAAKFLGFRQRCIPRSLCLSECPLEPPSLTRLCATLKDCPGPLELQLSCEFLSDQSLETLLDCLPQLPQLSLLQLSQTGLSPKSPFLLANTLSLCPRVKKVDLRSLHHATLHFRSNEEEEGVCCGRFTGCSLSQEHVESLCWLLSKCKDLSQVDLSANLLGDSGLRCLLECLPQVPISGLLDLSHNSISQESALYLLETLPSCPRVREASVNLGSEQSFRIHFSREDQAGKTLRLSECSFRPEHVSRLATGLSKSLQLTELTLTQCCLGQKQLAILLSLVGRPAGLFSLRVQEPWADRARVLSLLEVCAQASGSVTEISISETQQQLCVQLEFPRQEENPEAVALRLAHCDLGAHHSLLVGQLMETCARLQQLSLSQVNLCEDDDASSLLLQSLLLSLSELKTFRLTSSCVSTEGLAHLASGLGHCHHLEELDLSNNQFDEEGTKALMRALEGKWMLKRLDLSHLLLNSSTLALLTHRLSQMTCLQSLRLNRNSIGDVGCCHLSEALRAATSLEELDLSHNQIGDAGVQHLATILPGLPELRKIDLSGNSISSAGGVQLAESLVLCRRLEELMLGCNALGDPTALGLAQELPQHLRVLHLPFSHLGPGGALSLAQALDGSPHLEEISLAENNLAGGVLRFCMELPLLRQIDLVSCKIDNQTAKLLTSSFTSCPALEVILLSWNLLGDEAAAELAQVLPQMGRLKRVDLEKNQITALGAWLLAEGLAQGSSIQVIRLWNNPIPCDMAQHLKSQEPRLDFAFFDNQPQAPWGT

SEQ ID NO: 40169 - protein, 446 aa, Homo sapiens
MRLDEHDFLGQFSCSLGTIVSSKKITRPLLLLNDKPAGKGLITIAAQELSDNRVITLSLAGRRLDKKDLFGKSDPFLEFYKPGDDGKWMLVHRTEVIKYTLDPVWKPFTVPLVSLCDGDMEKPIQVMCYDYDNDGGHDFIGEFQTSVSQMCEARDSVPLEFECINPKKQRKKKNYKNSGIIILRSCKINRDYSFLDYILGGCQLMFTVGIDFTASNGNPLDPSSLHYINPMGTNEYLSAIWAVGQIIQDYDSDKMFPALGFGAQLPPDWKVSHEFAINFNPTNPFCSGVDGIAQAYSACLPHIRFYGPTNFSPIVNHVARFAAQATQQRTATQYFILLIITDGVISDMEETRHAVVQASKLPMSIIIVGVGNADFAAMEFLDGDSRMLRSHTGEEAARDIVQFVPFREFRNAAKETLAKAVLAELPQQVVQYFKHKNLPPTNSEPA

SEQ ID NO: 40170 - protein, 2141 aa, Homo sapiens [sequence omitted]

SEQ ID NO: 40171 - protein, 1316 aa, Homo sapiens
MDRILPDSGGVAKTMMESSLADFMQEVGYGFCASIEECRNIIVQFGVREVTAAQVARVLGMMARTHSGLTDGIPLQSISAPGSGIWSDGKDKSDGAQAHTWNVEVLIDVLKELNPSLNFKEVTYELDHPGFQIRDSKGLHNVVYGIQRGLGMEVFPVDLIYRPWKHAEGQLSFIQHSLINPEIFCFADYPCHTVATDILKAPPEDDNREIATWKSLDLIESLLRLAEVGQYEQVKQLFSFPIKHCPDMLVLALLQINTSWHTLRHELISTLMPIFLGNHPNSAIILHYAWHGQGQSPSIRQLIMHAMAEWYMRGEQYDQAKLSRILDVAQDLKALSMLLNGTPFAFVIDLAALASRREYLKLDKWLTDKIREHGEPFIQACMTFLKRRCPSILGGLAPEKDQPKSAQLPPETLATMLACLQACAGSVSQELSETILTMVANCSNVMNKARQPPPGVMPKGRPPSASSLDAISPVQIDPLAGMTSLSIGGSAAPHTQSMQGFPPNLGSAFSTPQSPAKAFPPLSTPNQTTAFSGIGGLSSQLPVGGLGTGSLTGIGTGALGLPAVNNDPFVQRKLGTSGLNQPTFQQSKMKPSDLSQVWPEANQHFSKEIDDEANSYFQRIYNHPPHPTMSVDEVLEMLQRFKDSTIKREREVFNCMLRNLFEEYRFFPQYPDKELHITACLFGGIIEKGLVTYMALGLALRYVLEALRKPFGSKMYYFGIAALDRFKNRLKDYPQYCQHLASISHFMQFPHHLQEYIEYGQQSRDPPVKMQGSITTPGSIALAQAQAQAQVPAKAPLAGQVSTMVTTSTTTTVAKTVTVTRPTGVSFKKDVPPSINTTNIDTLLVATDQTERIVEPPENIQEKIAFIFNNLSQSNMTQKVEELKETVKEEFMPWVSQYLVMKRVSIEPNFHSLYSNFLDTLKNPEFNKMVLNETYRNIKVLLTSDKAAANFSDRSLLKNLGHWLGMITLAKNKPILHTDLDVKSLLLEAYVKGQQELLYVVPFVAKVLESSIRSVVFRPPNPWTMAIMNVLAELHQEHDLKLNLKFEIEVLCKNLALDINELKPGNLLKDKDRLKNLDEQLSAPKKDVKQPEELPPITTTTTSTTPATNTTCTATVPPQPQYSYHDINVYSLAGLAPHITLNPTIPLFQAHPQLKQCVRQAIERAVQELVHPVVDRSIKIAMTTCEQIVRKDFALDSEESRMRIAAHHMMRNLTAGMAMITCREPLLMSISTNLKNSFASALRVSWLFPWYRYKTYYCLSVIIFFFVYIWHWALPLILNNHHICLMSSIILDCNSVRQSIMSVCFFFFLLYSQHDV

SEQ ID NO: 40172 - protein, 78 aa, Homo sapiens
MWCLVIAVSVALPCFPGWVFASHHGGFCTTGTWLSCGWSSIAHQAGGENEEDRGLLTASHHSSAAQGQSGHEREEADI

SEQ ID NO: 40173 - protein, 1162 aa, Homo sapiens
MFSVAHPAAKVPQPERLDLVYTALKRGLTAYLEVHQQEQEKLQGQIRESKRNSRLGFLYDLDKQVKSIERFLRRLEFHASKIDELYEAYCVQRRLRDGAYNMVRAYTTGSPGSREARDSLAEATRGHREYTESMCLLESELEAQLGEFHLRMKGLAGFARLCVGDQYEICMKYGRQRWKLRGRIEGSGKQVWDSEETIFLPLLTEFLSIKVTELKGLANHVVVGSVSCETKDLFAALPQVVAVDINDLGTIKLSLEVTWSPFDKDDQPSAASSVNKASTVTKRFSTYSQSPPDTPSLREQAFYNMLRRQEELENGTAWSLSSESSDDSSSPQLSGTARHSPAPRPLVQQPEPLPIQVAFRRPETPSSGPLDEEGAVAPVLANGHAPYSRTLSHISEASVDAALAEASVEAVGPESLAWGPSPPTHPAPTHGEHPSPVPPALDPGHSATSSTLGTTGSVPTSTDPAPSAHLDSVHKSTDSGPSELPGPTHTTTGSTYSAITTTHSAPSPLTHTTTGSTHKPIISTLTTTGPTLNIIGPVQTTTSPTHTMPSPTHTTASPTHTSTSPTHTPTSPTHKTSMSPPTTTSPTPSGMGLVQTATSPTHPTTSPTHPTTSPILINVSPSTSLELATLSSPSKHSDPTLPGTDSLPCSPPVSNSYTQADPMAPRTPHPSPAHSSRKPLTSPAPDPSESTVQSLSPTPSPPTPAPQHSDLCLAMAVQTPVPTAAGGSGDRSLEEALGALMAALDDYRGQFPELQGLEQEVTRLESLLMQRQGLTRSRASSLSITVEHALESFSFLNEDEDEDNDVPGDRPPSSPEAGAEDSIDSPSARPLSTGCPALDAALVRHLYHCSRLLLKLGTFGPLRCQEAWALERLLREARVLEAVCEFSRRWEIPASSAQEVVQFSASRPGFLTFWDQCTERLSCFLCPVERVLLTFCNQYGARLSLRQPGLAEAVCVKFLEDALGQKLPRRPQPGPGEQLTVFQFWSFVETLDSPTMEAYVTETAEEVLLVRNLNSDDQAVVLKALRLAPEGRLRRDGLRALSSLLVHGNNKVMAAVSTQLRSLSLGPTFRERALLCFLDQLEDEDVQTRVAGCLALGCIKAPEGIEPLVYLCQTDTEAVREAARQSLQQCGEEGQSAHRRLEESLDALPRIFGPGSMASTAF

SEQ ID NO: 40174 - protein, 655 aa, Homo sapiens
MKTEVMEGTVAPEAEAAVDDTQIITLQVVNMEEQPINIGELQLVQVPVPVTVPVATTSVEELQGAYENEVSKEGLAESEPMICHTLPLPEGFQVVKVGANGEVETLEQGELPPQEDPSWQKDPDYQPPAKKTKKTKKSKLRYTEEGKDVDVSVYDFEEEQQEGLLSEVNAEKVVGNMKPPKPTKIKKKGVKKTFQCELCSYTCPRRSNLDRHMKSHTDERPHKCHLCGRAFRTVTLLRNHLNTHTGTRPHKCPDCDMAFVTSGELVRHRRYKHTHEKPFKCSMCDYASVEVSKLKRHIRSHTGERPFQCSLCSYASRDTYKLKRHMRTHSGEKPYECYICHARFTQSGTMKMHILQKHTENVAKFHCPHCDTVIARKSDLGVHLRKQHSYIEQGKKCRYCDAVFHERYALIQHQKSHKNEKRFKCDQCDYACRQERHMIMHKRTHTGEKPYACSHCDKTFRQKQLLDMHFKRYHDPNFVPAAFVCSKCGKTFTRRNTMARHADNCAGPDGVEGENGGETKKSKRGRKRKMRSKKEDSSDSENAEPDLDDNEDEEEPAVEIEPEPEPQPVTPAPPPAKKRRGRPPGRTNQPKQNQPTAIIQVEDQNTGAIENIIVEVKKEPDAEPAEGEEEEAQPAATDAPNGDLTPEMILSMMDR

SEQ ID NO: 40175 - protein, 534 aa, Homo sapiens [sequence omitted]

SEQ ID NO: 40176 - protein, 479 aa, Homo sapiens
MKIFCSRANPTTGSVEWLEEDEHYDYHQEIARSSYADMLHDKDRNVKYYQGIRAAVSRVKDRGQKALVLDIGTGTGLLSMMAVTAGADFCYAIEVFKPMADAAVKIVEKNGFSDKIKVINKHSTEVTVGPEGDMPCRANILVTELFDTELIGEGALPSYEHAHRHLVEENCEAVPHRATVYAQLVESGRMWSWNKLFPIHVQTSLGEQVIVPPVDVESCPGAPSVCDIQLNQVSPADFTVLSDVLPMFSIDFSKQVSSSAACHSRRFEPLTSGRAQVVLSWWDIEMDPEGKIKCTMAPFWAHSDPEEMQWRDHWMQCVYFLPQEEPVVQGSALYLVAHHDDYCVWYSLQRTSPEKNERVRQMRPVCDCQAHLLWNRPRFGEINDQDRTDRYVQALRTVSLLLGEPFFTTSLLPWHNLYFWYVRTAVDQHLGPGAMVMPQAASLHAVVVEFRVGHPGDVGEKSRGGGWGTLFSCRNLGCL

SEQ ID NO: 40177 - protein, 525 aa, Homo sapiens [sequence omitted]

SEQ ID NO: 40178 - protein, 169 aa, Homo sapiens [sequence omitted]

SEQ ID NO: 40179 - protein, 208 aa, Homo sapiens
MLRFLESHLDDAEPYLLTMAKKALKSESAASSTGKEDKQPAPGPVEKPPREPARQLRNPPTTIGMMTLKAAFKTLSGAQDSEAAFAKLDQKDLVLPTQALPASPALKNKRPRKDENESSAPADGEGGSELQPKNKRMTISRLVLEEDSQSTEPSAGLNSSQEAASAPPSKPTVLNQPLPGEKNPKYEDLLCRNFGAGWWSWLGLVLLP

SEQ ID NO: 40180 - protein, 878 aa, Homo sapiens
MFYRLLSIVGRQRASPGWQNWSSARNSTSAAEARSMALPTQAQVVICGGGITGTSVAYHLSKMGWKDIVLLEQGRLAAGSTRFCAGILSTARHLTIEQKMADYSNKLYYQLEQETGIQTGYTRTGSIFLAQTQDRLISLKRINAGLNVIGIPSEIISPKKVAELHHLLNVHDLVGAMHVPEDAVVSSADVALALASAASQNGVQIYDRTSVLHVMVKKGQVTGVETDKGQIECQYFVNCAGQWAYELGLSNEEPVSIPLHACEHFYLLTRPLETPLQSSTPTIVDADGRIYIRNWQGGILSGGFEKNPKPIFTEGKNQLEIQNLQEDWDHFEPLLSSLLRRMPELETLEIMKLVNCPETFTPDMRCIMGESPAVQGYFVLAGMNSAGLSFGGGAGKYLAEWMVHGYPSENVWELDLKRFGALQSSRTFLRHRVMEVMPLMYDLKVPRWDFQTGRQLRTSPLYDRLDAQGARWMEKHGFERPKYFVPPDKDLLALEQSKTFYKPDWFDIVESEVKCCKEAVCVIDMSSFTKFEITSTGDQALEVLQYLFSNDLDVPVGHIVHTGMLNEGGGYENDCSIARLNKRSFFMISPTDQQVHCWAWLKKHMPKDSNLLLEDVTWKYTALNLIGPRAVDVLSELSYAPMTPDHFPSLFCKEMSVGYANGIRVMSMTHTGEPGFMLYIPIEYALHVYNEVMSVGQKYGIRNAGYYALRSLRIEKFFAFWGQDINNLTTPLECGRESRVKLEKGMDFIGRDALLQQKQNGVYKRLTMFILDDHDSDLDLWPWWGEPIYRNGQYVGKTTSSAYSYSLERHVCLGFVHNFSEDTGEEQVVTADFINRGEYEIDIAGYRFQAKAKLYPVASLFTQKRRKDDMELSDLHGK

SEQ ID NO: 40181 - protein, 785 aa, Homo sapiens
MADLDSPPKLSGVQQPSEGVGGGRCSEISAELIRSLTELQELEAVYERLCGEEKVVERELDALLEQQNTIESKMVTLHRMGPNLQLIEGDAKQLAGMITFTCNLAENVSSKVRQLDLAKNRLYQAIQRADDILDLKFCMDGVQTALRSEDYEQAAAHTHRYLCLDKSVIELSRQGKEGSMIDANLKLLQEAEQRLKAIVAEKFAIATKEGDLPQVERFFKIFPLLGLHEEGLRKFSEYLCKQVASKAEENLLMVLGTDMSDRRAAVIFADTLTLLFEGIARIVETHQPIVETYYGPGRLYTLIKYLQVECDRQVEKVVDKFIKQRDYHQQFRHVQNNLMRNSTTEKIEPRELDPILTEVTLMNARSELYLRFLKKRISSDFEVGDSMASEEVKQEHQKCLDKLLNNCLLSCTMQELIGLYVTMEEYFMRETVNKAVALDTYEKGQLTSSMVDDVFYIVKKCIGRALSSSSIDCLCAMINLATTELESDFRDVLCNKLRMGFPATTFQDIQRGVTSAVNIMHSSLQQGKFDTKGIESTDEAKMSFLVTLNNVEVCSENISTLKKTLESDCTKLFSQGIGGEQAQAKFDSCLSDLAAVSNKFRDLLQEGLTELNSTAIKPQVQPWINSFFSVSHNIEEEEFNDYEANDPWVQQFILNLEQQMAEFKASLSPVIYDSLTGLMTSLVAVELEKVVLKSTFNRLGGLQFDKELRSLIAYLTTVTTWTIRDKFARLSQMATILNLERVTEILDYWGPNSGPLTWRLTPAEVRQVLALRIDFRSEDIKRLRL

SEQ ID NO: 40182 - protein, 127 aa, Homo sapiens
MHLSPGSFYLQLMHKLSVEAPPKILVERYLIEIAKNYNVPYEPDSVVMAEAPPGVETDLIDVGFTDDVKKGGPGRGGSGGFTAPVGGPDGTVPMPMPMPMPMPSANTPFSYPLPKGPVSIYKCGCKL

SEQ ID NO: 40183 - protein, 953 aa, Homo sapiens [sequence omitted]

SEQ ID NO: 40184 - protein, 412 aa, Homo sapiens
MGVMTALVSFVQSAGDAIRAIYAEDHKLVFLQQGPLLLVAMSRTSQSAAQLRGELLAVHAQIVSTLTRASVARIFAHKQNYDLRRLLAGSERTLDRLLDSMEQDPGALLLGAVRCVPLARPLRDALGALLRRCTAPGLALSVLAVGGRLITAAQERNVLAECRLDPADLQLLLDWVGAPAFAAGEAWAPVCLPRFNPDGFFYAYVARLDAMPVCLLLLGTQREAFHAMAACRRLVEDGMHALGAMRALGEAASFSNASSASAPAYSVQAVGAPGLRHFLYKPLDIPDHHRQLPQFTSPELEAPYSREEERQRLSDLYHRLHARLHSTSRPLRLIYHVAEKETLLAWVTSKFELYTCLSPLVTKAGAILVVTKLLRWVKKEEDRLFIRYPPKYSTPPATSTDQAAHNGLFTGL

SEQ ID NO: 40185 - protein, 322 aa, Homo sapiens [sequence omitted]

SEQ ID NO: 40186 - protein, 395 aa, Homo sapiens
MVTRLYDGMRRVDLTGKAKGPSENVSQEQFTASMSHLLKGNSEEKSLMIMKMISATEGPVKAREVQKFTEDLVGSVVHVLSHRQELRGWTGKEAPGPNPRVQVLAAQLLSDMKLQDGKRLLGPQWLDYDCDRAVIEDWVFRVPHVAIFLSVVICKGFLILCSSLDLTTLVPERQVDQGRGFESILDVLSVMYINAQLPREQRHRWCLLFSSELHGHSFSQLCGHITHRGPCVAVLEDHDKHVFGGFASCSWEVKPQFQGDNRCFLFSICPSMAVYTHTGYNDHYMYLNHGQQTIPNGLGMGGQHNYFGLWVDVDFGKGHSRAKPTCTTYNSPQLSAQENFQFDKMEVWAVGDPSEEQLAKGNKSILDADPEAQALLEISGHSRHSEGLREVPDDE

SEQ ID NO: 40187 - protein, 615 aa, Homo sapiens
MEGSRQTRVSRPYKISESSKVYRWADHSSTVLQRLNEQRLRGLFCDVVLVADEQRVPAHRNLLAVCSDYFNSMFTIGMREAFQKEVELIGASYIGLKAVVDFLYGGELVLDGGNIDYVLETAHLLQIWTVVDFCCEYLEQEVSEDNYLYLQELASIYSLKRLDAFIDGFILNHFGTLSFTPDFLQNVSMQKLCVYLSSSEVQRECEHDLLQAALQWLTQQPEREAHARQVLENIHFPLIPKNDLLHRVKPAVCSLLPKEANCEGFIEEAVRYHNNLAAQPVMQTKRTALRTNQERLLFVGGEVSERCLELSDDTCYLDAKSEQWVKETPLPARRSHHCVAVLGGFIFIAGGSFSRDNGGDAASNLLYRYDPRCKQWIKVASMNQRRVDFYLASIEDMLVAIGGRNENGALSSVETYSPKTDSWSYVAGLPRFTYGHAGTIYKDFVYISGGHDYQIGPYRKNLLCYDHRTDVWEERRPMTTARGWHSMCSLGDSIYSIGGSDDNIESMERFDVLGVEAYSPQCNQWTRVAPLLHANSESGVAVWEGRIYILGGYSWENTAFSKTVQVYDREADKWSRGVDLPKAIAGGSACVCALEPRPEDKKKKGKGKRHQDRGQ

SEQ ID NO: 40188 - protein, 1203 aa, Homo sapiens
MLSTATRTTATVNPLTPSPLNGALVPSGSPATSSALSAQAAPSSSFAAALRKLAKQAEEPRGSSLSSESSPVSSPATNHSSPASTPKRVPMGPIIVPPGGHSVPSTPPVVTIAPTKTVNGVWRSESRQDAGSRSSSGGRERLIVEPPLPQEKAGGPAIPSHLLSTPYPFGLSPSSVVQDSRFPPLNLQRPVHHVVPPSTVTEDYLRSFRPYHTTDDLRMSSLPPLGLDPATAAAYYHPSYLAPHPFPHPAFRMDDSYCLSALRSPFYPIPTPGSLPPLHPSAMHLHLSGVRYPPELSHSSLAALHSERMSGLSAERLQMDEELRREREREREREREREADREREKEREREREKEREQEKEREREKERERELERQREQRAREKELLAAKALEPSFLPVAELHGLRGHATEERGKPSEQLTPTRAEKLKDAGLQAPKPVQHPLHPVPTPHHTVPSLISNHGIFSLPSSSAATALLIQRTNEEEKWLARQRRLRQEKEDRQSQVSEFRQQVLEQHLDMGRPPVPAEAEHRPESTTRPGPNRHEPGGRDPPQHFGGPPPLISPKPQLHAAPTALWNPVSLMDNTLETRRAESHSLHSHPAAFEPSRQAAVPLVKVERVFCPEKAEEGPRKREPAPLDKYQPPPPPPREGGSLEHQPFLPGPGPFLAELEKSTQTILGQQRASLPQAATFGELSGPLKPGSPYRPPVPRAPDPAYIYDEFLQQRRRLVSKLDLEERRRREAQEKGYYYDLDDSYDESDEEEVRAHLRCVAEQPPLKLDTSSEKLEFLQLFGLTTQQQKEELVAQKRRKRRRMLRERSPSPPTIQSKRQTPSPRLALSTRYSPDEMNNSPNFEEKKKFLTIFNLTHISAEKRKDKERLVEMLRAMKQKALSAAVADSLTNSPRDSPAVSLSEPATQQASLDVEKPVGVAASLSDIPKAAEPGKLEQVRPQELSRVQELAPASGEKARLSEAPGGKKSLSMLHYIRGAAPKDIPVPLSHSTNGKSKPWEPFVAEEFAHQFHESVLQSTQKALQKHKGSVAVLSAEQNHKVDTSVHYNIPELQSSSRAPPPQHNGQQEPPTARKGPPTQELDRDSEEEEEEDDEDGEDEEEVPKRKWQGIEAVFEAYQEHIEEQNLERQVLQTQCRRLEARHYSLSLTAEQLSHSVAELRSQKQKMVSERERLQAELDHLRKCLALPAMHWPRGYLKGYPR

SEQ ID NO: 40189 - protein, 2597 aa, Homo sapiens
MEVPRSKKKEKQGPERKRIKKEPVTRKAGLLFGMGLSGIRAGYPLSERQQVALLMQMTAEESANSPVDTTPKHPSQSTVCQKGTPNSASKTKDKVNKRNERGETRLHRAAIRGDARRIKELISEGADVNVKDFAGWTALHEACNRGYYDVAKQLLAAGAEVNTKGLDDDTPLHDAANNGHYKVVKLLLRYGGNPQQSNRKGETPLKVANSPTMVNLLLGKGTYTSSEESSTESSEEEDAPSFAPSSSVDGNNTDSEFEKGLKHKAKNPEPQKATAPVKDEYEFDEDDEQDRVPPVDDKHLLKKDYRKETKSNSFISIPKMEVKSYTKNNTIAPKKASHRILSDTSDEEDASVTVGTGEKLRLSAHTILPGSKTREPSNAKQQKEKNKVKKKRKKETKGREVRFGKRSDKFCSSESESESSESGEDDRDSLGSSGCLKGSPLVLKDPSLFSSLSASSTSSHGSSAAQKQNPSHTDQHTKHWRTDNWKTISSPAWSEVSSLSDSTRTRLTSESDYSSEGSSVESLKPVRKRQEHRKRASLSEKKSPFLSSAEGAVPKLDKEGKVVKKHKTKHKHKNKEKGQCSISQELKLKSFTYEYEDSKQKSDKAILLENDLSTENKLKVLKHDRDHFKKEEKLSKMKLEEKEWLFKDEKSLKRIKDTNKDISRSFREEKDRSNKAEKERSLKEKSPKEEKLRLYKEERKKKSKDRPSKLEKKNDLKEDKISKEKEKIFKEDKEKLKKEKVYREDSAFDEYCNKNQFLENEDTKFSLSDDQRDRWFSDLSDSSFDFKGEDSWDSPVTDYRDMKSDSVAKLILETVKEDSKERRRDSRAREKRDYREPFFRKKDRDYLDKNSEKRKEQTEKHKSVPGYLSEKDKKRRESAEAGRDRKDALESCKERRDGRAKPEEAHREELKECGCESGFKDKSDGDFGKGLEPWERHHPAREKEKKDGPDKERKEKTKPERYKEKSSDKDKSEKSILEKCQKDKEFDKCFKEKKDTKEKHKDTHGKDKERKASLDQGKEKKEKAFPGIISEDFSEKKDDKKGKEKSWYIADIFTDESEDDRDSCMGSGFKMGEASDLPRTDGLQEKEEGREAYASDRHRKSSDKQHPERQKDKEPRDRRKDRGAADAGRDKKEKVFEKHKEKKDKESTEKYKDRKDRASVDSTQDKKNKQKLPEKAEKKHAAEDKAKSKHKEKSDKEHSKERKSSRSADAEKSLLEKLEEEALHEYREDSNDKISEVSSDSFTDRGQEPGLTAFLEVSFTEPPGDDKPRESACLPEKLKEKERHRHSSSSSKKSHDRERAKKEKAEKKEKGEDYKEGGSRKDSGQYEKDFLEADAYGVSYNMKADIEDELDKTIELFSTEKKDKNDSEREPSKKIEKELKPYGSSAINILKEKKKREKHREKWRDEKERHRDRHADGLLRHHRDELLRHHRDEQKPATRDKDSPPRVLKDKSRDEGPRLGDAKLKEKFKDGAEKEKGDPVKMSNGNDKVAPSKDPGKKDARPREKLLGDGDLMMTSFERMLSQKDLEIEERHKRHKERMKQMEKLRHRSGDPKLKEKAKPADDGRKKGLDIPAKKPPGLDPPFKDKKLKESTPIPPAAENKLHPASGADSKDWLAGPHMKEVLPASPRPDQSRPTGVPTPTSVLSCPSYEEVMHTPRTPSCSADDYADLVFDCADSQHSTPVPTAPTSACSPSFFDRFSVASSGLSENASQAPARPLSTNLYRSVSVDIRRTPEEEFSVGDKLFRQQSVPAASSYDSPMPPSMEDRAPLPPVPAEKFACLSPGYYSPDYGLPSPKVDALHCPPAAVVTVTPSPEGVFSSLQAKPSPSPRAELLVPSLEGALPPDLDTSEDQQATAAIIPPEPSYLEPLDEGPFSAVITEEPVEWAHPSEQALASSLIGGTSENPVSWPVGSDLLLKSPQRFPESPKRFCPADPLHSAAPGPFSASEAPYPAPPASPAPYALPVAEPGLEDVKDGVDAVPAAISTSEAAPYAPPSGLESFFSNCKSLPEAPLDVAPEPACVAAVAQVEALGPLENSFLDGSRGLSHLGQVEPVPWADAFAGPEDDLDLGPFSLPELPLQTKDAADGEAEPVEESLAPPEEMPPGAPGVINGGDVSTVVAEEPPALPPDQASTRLPAELEPEPSGEPKLDVALEAAVEAETVPEERARGDPDSSVEPAPVPPEQRPLGSGDQGAEAEGPPAASLCAPDGPAPNTVAQAQAADGAGPEDDTEASRAAAPAEGPPGGIQPEAAEPKPTAEAPKAPRVEEIPQRMTRNRAQMLANQSKQGPPPSEKECAPTPAPVTRAKARGSEDDDAQAQHPRKRRFQRSTQQLQQQLNTSTQQTREVIQQTLAAIVDAIKLDAIEPYHSDRANPYFEYLQIRKKIEEKRKILCCITPQAPQCYAEYVTYTGSYLLDGKPLSKLHIPVIAPPPSLAEPLKELFRQQEAVRGKLRLQHSIEREKLIVSCEQEILRVHCRAARTIANQAVPFSACTMLLDSEVYNMPLESQGDENKSVRDRFNARQFISWLQDVDDKYDRMKTCLLMRQQHEAAALNAVQRMEWQLKVQELDPAGHKSLCVNEVPSFYVPMVDVNDDFVLLPA

SEQ ID NO: 40190 - protein, 201 aa, Homo sapiens [sequence omitted]

SEQ ID NO: 40191 - protein, 323 aa, Homo sapiens
MAVLLLLLRALRRGPGPGPRPLWGPGPAWSPGFPARPGRGRPYMASRPPGDLAEAGGRALQSLQLRLLTPTFEGINGLLLKQHLVQNPVRLWQLLGGTFYFNTSRLKQKNKEKDKSKGKAPEEDEEERRRRERDDQMYRERLRTLLVIAVVMSLLNALSTSGGSISWNDFVHEMLAKGEVQRVQVVPESDVVEVYLHPGAVVFGRPRLALMYRMQVANIDKFEEKLRAAEDELNIEAKDRIPVSYKRTGFFGNALYSVGMTAVGLAILWYVFRLAGMTGREGGFSAFVSSVNQSSLNSFWFVFAEYFSHKLYDEYTGKTCCRE

SEQ ID NO: 40192 - protein, 555 aa, Homo sapiens [sequence omitted]

SEQ ID NO: 40193 - protein, 30 aa, Homo sapiens
MALVSGLHGVHLESGARLCVQFGSVTKRCN

SEQ ID NO: 40194 - protein, 1085 aa, Homo sapiens
MGNAPSHSSEDEAAAAGGEGWGPHQDWAAVSGTTPGPGVAAPALPPAAALLEPARLREAAAALLPTPPCESLVSRHRGALFRWLEERLGRGEESVTLEQFRELLEARGAGCSSEQFEEAFAQFDAEGDGTVDAENMLEALKNSSGANLQGELSHIIRQLQACSLVPGFTDIFSESKEGLDIHSSMILRFLHRNRLSSAVMPYPMLEHCNNMCTMRSSVLKESLDQLVQKEKESPGDLTRSPEMDKLKSVAKCYAYIETSSNSADIDKMTNGETSSYWQSDGSACSHWIRLKMKPDVVLRHLSIAVAATDQSYMPQQVTVAVGRNASDLQEVRDVHIPSNVTGYVTLLENANVSQLYVQINIKRCLSDGCDTRIHGLRAVGFQRVKKSGVSVSDASAIWYWSLLTSLVTASMETNPAFVQTVLHNTQKALRHMPPLSLSPGSTDFSTFLSPNVLEEVDSFLIRITSCCSTPEVELTLLAFALARGSVAKVMSSLCTITDHLDTQYDASSLILSMASVRQNLLLKYGKPLQLTLQACDVKGKEDKSGPENLLVEPWTRDGFLTETGKTRASTIFSTGTESAFQVTQIRIMVRRGGIGAQCGLVFAYNSSSDKFCAEEHFKRFEKYDKWKLQELRQFVKSRIGCSSDDLGEDDPIGWFELEEEWDEADVKLQQCRVAKYLMVKFLCTRQESAERLGVQGLTISGYLRPARAEAEQSVTCAHCRKDTEESVCGATLLLRTLQFIQQLAHDLVQQKESGLKYKSFLDFAGLDLQIFWNFYSKLKQNPREECVSAQTLLLQLLQSCFSVLQGDVLAASEEEKAPIQSPKGVEAAKELYTHLCDVVDKVDGDSVPMEILKQEVRNTLLNGAAIFFPNRQTRRNHLFTMMKNVTEQEHKQSLQLTFRSLCTYFSDKDPGGLLLLPEKNDLAKMNISEVLAVMDTLVSVAARECELLMLSGAPGEVGSVLFSLFWSVQGSLLSWCYLQLKSTDSGAKDLAVDLIEKYVGQFLASMRAILESLFSQYSGKTIVERLCNSVFSMAARQLVIFLLDFCTLDIPHCVLLREFSVLTELLKKLCSGPEGGLRKVTRVST

SEQ ID NO: 40195 - protein, 674 aa, Homo sapiens [sequence omitted]

SEQ ID NO: 40196 - protein, 41 aa, Homo sapiens
MGSRVLRTGKLLEAAGAGPGSPALAVFAFGRGQSLLFQVPA

SEQ ID NO: 40197 - protein, 1980 aa, Homo sapiens
MHGGGPPSGDSACPLRTIKRVQFGVLSPDELKRMSVTEGGIKYPETTEGGRPKLGGLMDPRQGVIERTGRCQTCAGNMTECPGHFGHIELAKPVFHVGFLVKTMKVLRCVCFFCSKLLVDSNNPKIKDILAKSKGQPKKRLTHVYDLCKGKNICEGGEEMDNKFGVEQPEGDEDLTKEKGHGGCGRYQPRIRRSGLELYAEWKHVNEDSQEKKILLSPERVHEIFKRISDEECFVLGMEPRYARPEWMIVTVLPVPPLSVRPAVVMQGSARNQDDLTHKLADIVKINNQLRRNEQNGAAAHVIAEDVKLLQFHVATMVDNELPGLPRAMQKSGRPLKSLKQRLKGKEGRVRGNLMGKRVDFSARTVITPDPNLSIDQVGVPRSIAANMTFAEIVTPFNIDRLQELVRRGNSQYPGAKYIIRDNGDRIDLRFHPKPSDLHLQTGYKVERHMCDGDIVIFNRQPTLHKMSMMGHRVRILPWSTFRLNLSVTTPYNADFDGDEMNLHLPQSLETRAEIQELAMVPRMIVTPQSNRPVMGIVQDTLTAVRKFTKRDVFLERGEVMNLLMFLSTWDGKVPQPAILKPRPLWTGKQIFSLIIPGHINCIRTHSTHPDDEDSGPYKHISPGDTKVVVENGELIMGILCKKSLGTSAGSLVHISYLEMGHDITRLFYSNIQTVINNWLLIEGHTIGIGDSIADSKTYQDIQNTIKKAKQDVIEVIEKAHNNELEPTPGNTLRQTFENQVNRILNDARDKTGSSAQKSLSEYNNFKSMVVSGAKGSKINISQVIAVVGQQNVEGKRIPFGFKHRTLPHFIKDDYGPESRGFVENSYLAGLTPTEFFFHAMGGREGLIDTAVKTAETGYIQRRLIKSMESVMVKYDATVRNSINQVVQLRYGEDGLAGESVEFQNLATLKPSNKAFEKKFRFDYTNERALRRTLQEDLVKDVLSNAHIQNELEREFERMREDREVLRVIFPTGDSKVVLPCNLLRMIWNAQKIFHINPRLPSDLHPIKVVEGVKELSKKLVIVNGDDPLSRQAQENATLLFNIHLRSTLCSRRMAEEFRLSGEAFDWLLGEIESKFNQAIAHPGEMVGALAAQSLGEPATQMTLNTFHYAGVSAKNVTLGVPRLKELINISKKPKTPSLTVFLLGQSARDAERAKDILCRLEHTTLRKVTANTAIYYDPNPQSTVVAEDQEWVNVYYEMPDFDVARISPWLLRVELDRKHMTDRKLTMEQIAEKINAGFGDDLNCIFNDDNAEKLVLRIRIMNSDENKMQEEEEVVDKMDDDVFLRCIESNMLTDMTLQGIEQISKVYMHLPQTDNKKKIIITEDGEFKALQEWILETDGVSLMRVLSEKDVDPVRTTSNDIVEIFTVLGIEAVRKALERELYHVISFDGSYVNYRHLALLCDTMTCRGHLMAITRHGVNRQDTGPLMKCSFEETVDVLMEAAAHGESDPMKGVSENIMLGQLAPAGTGCFDLLLDAEKCKYGMEIPTNIPGLGAAGPTGMFFGSAPSPMGGISPAMTPWNQGATPAYGAWSPSVGSGMTPGAAGFSPSAASDASGFSPGYSPAWSPTPGSPGSPGPSSPYIPSPGGAMSPSYSPTSPAYEPRSPGGYTPQSPSYSPTSPSYSPTSPSYSPTSPNYSPTSPSYSPTSPSYSPTSPSYSPTSPSYSPTSPSYSPTSPSYSPTSPSYSPTSPSYSPTSPSYSPTSPSYSPTSPSYSPTSPSYSPTSPSYSPTSPSYSPTSPSYSPTSPNYSPTSPNYTPTSPSYSPTSPSYSPTSPNYTPTSPNYSPTSPSYSPTSPSYSPTSPSYSPSSPRYTPQSPTYTPSSPSYSPSSPSYSPTSPTSTPQPVLLTVPAPQSIPQPLPSTHLPVPNIHPPLPSTRLPVPPIHPPPQNTPQHLLLIPQPLQSTPQPLPSTHLLAPLTRPLPPSTRPPAPPTRPPPPKAQPTLPLPLVTRPPAPPTVSQARLSARMTVTRRTEGTWGAAAG

SEQ ID NO: 40198 - protein, 1935 aa, Homo sapiens
MPDKDDIRLLPSALGVKKRKRGPKKQKENKPGKPRKRKKRDSEEEFGSERDEYREKSESGGSEYGTGPGRKRRRKHREKKEKKTKRRKKGEGDGGQKQVEQKSSATLLLTWGLEDVEHVFSEEDYHTLTNYKAFSQFMRPLIAKKNPKIPMSKMMTILGAKWREFSANNPFKGSAAAVAAAAAAAAAAVAEQVSAAVSSATPIAPSGPPALPPPPAADIQPPPIRRAKTKEGKGPGHKRRSKSPRVPDGRKKLRGKKMAPLKIKLGLLGGKRKKGGSYVFQSDEGPEPEAEESDLDSGSVHSASGRPDGPVRTKKLKRGRPGRKKKKVLGCPAVAGEEEVDGYETDHQDYCEVCQQGGEIILCDTCPRAYHLVCLDPELDRAPEGKWSCPHCEKEGVQWEAKEEEEEYEEEGEEEGEKEEEDDHMEYCRVCKDGGELLCCDACISSYHIHCLNPPLPDIPNGEWLCPRCTCPVLKGRVQKILHWRWGEPPVAVPAPQQADGNPDVPPPRPLQGRSEREFFVKWVGLSYWHCSWAKELQLEIFHLVMYRNYQRKNDMDEPPPLDYGSGEDDGKSDKRKVKDPHYAEMEEKYYRFGIKPEWMTVHRIINHSVDKKGNYHYLVKWRDLPYDQSTWEEDEMNIPEYEEHKQSYWRHRELIMGEDPAQPRKYKKKKKELQGDGPPSSPTNDPTVKYETQPRFITATGGTLHMYQLEGLNWLRFSWAQGTDTILADEMGLGKTIQTIVFLYSLYKEGHTKGPFLVSAPLSTIINWEREFQMWAPKFYVVTYTGDKDSRAIIRENEFSFEDNAIKGGKKAFKMKREAQVKFHVLLTSYELITIDQAALGSIRWACLVVDEAHRLKNNQSKFFRVLNGYKIDHKLLLTGTPLQNNLEELFHLLNFLTPERFNNLEGFLEEFADISKEDQIKKLHDLLGPHMLRRLKADVFKNMPAKTELIVRVELSPMQKKYYKYILTRNFEALNSRGGGNQVSLLNIMMDLKKCCNHPYLFPVAAMESPKLPSGAYEGGALIKSSGKLMLLQKMLRKLKEQGHRVLIFSQMTKMLDLLEDFLDYEGYKYERIDGGITGALRQEAIDRFNAPGAQQFCFLLSTRAGGLGINLATADTVIIFDSDWNPHNDIQAFSRAHRIGQANKVMIYRFVTRASVEERITQVAKRKMMLTHLVVRPGLGSKAGSMSKQELDDILKFGTEELFKDENEGENKEEDSSVIHYDNEAIARLLDRNQDATEDTDVQNMNEYLSSFKVAQYVVREEDKIEEIEREIIKQEENVDPDYWEKLLRHHYEQQQEDLARNLGKGKRVRKQVNYNDAAQEDQDNQSEYSVGSEEEDEDFDERPEGRRQSKRQLRNEKDKPLPPLLARVGGNIEVLGFNTRQRKAFLNAVMRWGMPPQDAFTTQWLVRDLRGKTEKEFKAYVSLFMRHLCEPGADGSETFADGVPREGLSRQQVLTRIGVMSLVKKKVQEFEHINGRWSMPELMPDPSADSKRSSRASSPTKTSPTTPEASATNSPCTSKPATPAPSEKGEGIRTPLEKEEAENQEEKPEKNSRIGEKMETEADAPSPAPSLGERLEPRKIPLEDEVPGVPGEMEPEPGYRGDREKSEDVKGDRELRPGPRDEPRSNGRREEKTEKPRFMFNIADGGFTELHTLWQNEERAAISSGKLNEIWHRRHDYWLLAGIVLHGYARWQDIQNDAQFAIINEPFKTEANKGNFLEMKNKFLARRFKLLEQALVIEEQLRRAAYLNLSQEPAHPAMALHARFAEAECLAESHQHLSKESLAGNKPANAVLHKVLNQLEELLSDMKADVTRLPATLSRIPPIAARLQMSERSILSRLASKGTEPHPTPAYPPGPYATPPGYGAAFSAAPVGALAAAGANYSQMPAGSFITAATNGPPVLVKKEKEMVGALVSDGLDRKEPRAGEVICIDD

SEQ ID NO: 40199 - protein, 843 aa, Homo sapiens
MSVDYQASFVGHPPGSAYPKLNFVEDSKVVLGDSKEGAFAYVHHLTLYDLEARGFVRPFCMAYISADQHKIMQQFQELSAEFSRASECLKTGNRKAFAGELEKKLKDLDYTRTVLHTETEIQKKANDKGFYSSQAIEKANELASVEKSIIEHQDLLKQIRSYPHRKLKGHDLCPGEMEHIQDQASQASTTSNPDESADTDLYTCRPAYTPKLIKAKSTKCFDKKLKTLEELCDTEYFTQTLAQLSHIEHMFRGDLCYLLTSQIDRALLKQQHITNFLFEDFVEVDDRMVEKQESIPSKPSQDRPPSSSLEECPIPKVLISVGSYKSSVESVLIKMEQELGDEEYKEVEVTELSSFDPQENLDYLDMDMKGSISSGESIEVLGTEKSTSVLSKSDSQASLTVPLSPQVVRSKAVSHRTISEDSIEVLSTCPSEALIPDDFKASYPSAINEEESYPDGNEGAIRFQASISPPELGETEEGSIENTPSQIDSSCCIGKESDGQLVLPSTPAHTHSDEDGVVSSPPQRHRQKDQGFRVDFSVENANPSSRDNSCEGFPAYELDPSHLLASRDISKTSLDNYSDTTSYVSSVASTSSDRIPSAYPAGLSSDRHKKRAGQNALKFIRQYPFAHPAIYSLLSGRTLVVLGEDEAIVRKLVTALAIFVPSYGCYAKPVKHWASSPLHIMDFQKWKLIGLQRVASPAGAGTLHALSRYSRYTSILDLDNKTLRCPLYRGTLVPRLADHRTQIKRGSTYYLHVQSMLTQLCSKAFLYTFCHHLHLPTHDKETEELVASRQMSFLKLTLGLVNEDVRVVQYLAELLKLHYMQESPGTSHPMLRFDYVPSFLYKI

SEQ ID NO: 40200 - protein, 48 aa, Homo sapiens
MKKLPIVACFHLKRFEHSAKLRRKITTYVSFPLELDMTPFMASRYVGL

SEQ ID NO: 40201 - protein, 172 aa, Homo sapiens
MVSLSATDCYIVHEIYNGENAQDQFEYELEQALEAQYKYIVIEPTRIGDETARWITVGNCLHKTAVLAGTACLFTPLALPLDYSHYISLPAGVLSLACCTLYGISWQFDPCCKYQVEYDAYKLSRLPLHTLTSSTPVVLVRKDDLHRKRLHNTIALAALVYCVKKIYELYAV

SEQ ID NO: 40202 - protein, 73 aa, Homo sapiens
MSVLSFSNTSKQWKLITCGFPANSLAMIFHTMWHCALEKCVSERTYRKFLTCLPHSPRALGWIKRNCPSAHPY

SEQ ID NO: 40203 - protein, 81 aa, Homo sapiens
MAVVPLLLLGGLWSAVGASSLGVVTCGSVVKLLNTRHNVRLHSHDVRYGSALLHLTLAPQFPSLAPFYPNLNLLLVRNLEQ

SEQ ID NO: 40204 - protein, 48 aa, Homo sapiens [sequence omitted]

SEQ ID NO: 40205 - protein, 1000 aa, Homo sapiens [sequence omitted]

SEQ ID NO: 40206 - protein, 845 aa, Homo sapiens
METKTIVYDLDTSGGLMEQIQALLAPPKTDEAEKRSRKPEKEPRRSGRATNHDSCDSCKEGGDLLCCDHCPAAFHLQCCNPPLSEEMLPPGEWMCHRCTVRRKKREQKKELGHVNGLVDKSGKRTTSPSSDTDLLDRSASKTELKAIAHARILERRASRPGTPTSSASTETPTSEQNDVDEDIIDVDEEPVAAEPDYVQPQLRRPFELLIAAAMERNPTQFQLPNELTCTTALPGSSKRRRKEETTGKNVKKTQHELDHNGLVPLPVKVCFTCNRSCRVAPLIQCDYCPLLFHMDCLEPPLTAMPLGRWMCPNHIEHVVLNQKNMTLSNRCQVFDRFQDTVSQHVVKVDFLNRIHKKHPPNRRVLQSVKRRSLKVPDAIKSQYQFPPPLIAPAAIRDGELICNGIPEESQMHLLNSEHLATQAEQQEWLCSVVALQCSILKHLSAKQMPSHWDSEQTEKADIKPVIVTDSSVTTSLQTADKTPTPSHYPLSCPSGISTQNSLSCSPPHQSPALEDIGCSSCAEKSKKTPCGTANGPVNTEVKANGPHLYSSPTDSTDPRRLPGANTPLPGLSHRQGWPRPLTPPAAGGLQNHTVGIIVKTENATGPSSCPQRSLVPVPSLPPSIPSSCASIENTSTLQRKTVQSQIGPPLTDSRPLGSPPNATRVLTPPQAAGDGILATTANQRFSSPAPSSDGKVSPGTLSIGSALTVPSFPANSTAMVDLTNSLRAFMDVNGEIEINMLDEKLIKFLALQRIHQLFPSRVQPSPGSVGTHQLASGGHHIEGAHVHTCHHIIRSPLYVCEWSPCLHGESELPVSQTSLCAFHGLNKAPWFFSEESRNKMATTAF

SEQ ID NO: 40207 - protein, 1361 aa, Homo sapiens [sequence omitted]

SEQ ID NO: 40208 - protein, 103 aa, Homo sapiens
MDEEDSDGELNTWELSEGTNCPPKEQPGDLFNEDWDSELKADQGNPYDADDIQESISQELKPWVCCAPQGDMIYDPSWHHPPPLIPYYSKMVFETGQFDDAED

SEQ ID NO: 40209 - protein, 735 aa, Homo sapiens
MPPWIYNESLVPDAYKKILETTMTPTGIDTAKLYPILMSSGLPRETLGQIWALANRTTPGKLTKEELYTVLAMIAVTQRGVPAMSPDALNQFPAAPIPTLSGFSMTLPTPVSQPTVIPSGPAGSMPLSLGQPVMGINLVGPVGGAAAQASSGFIPTYPANQVVKPEEDDFQDFQDASKSGSLDDSFSDFQELPASSKTSNSQHGNSAPSLLMPLPGTKALPSMDKYAVFKGIAADKSSENTVPPGDPGDKYSAFRELEQTAENKPLGESFAEFRSAGTDDGFTDFKTADSVSPLEPPTKDKTFPPSFPSGTIQQKQQTQVKNPLNLADLDMFSSVNCSSEKPLSFSAVFSTSKSVSTPQSTGSAATMTALAATKTSSLADDFGEFSLFGEYSGLAPVGEQDDFADFMAFSNSSISSEQKPDDKYDALKEEASPVPLTSNVGSTVKGGQNSTAASTKYDVFRQLSLEGSGLGVEDLKDNTPSGKSDDDFADFHSSKFSSINSDKSLGEKAVAFRHTKEDSASVKSLDLPSIGGSSVGKEDSEDALSVQFDMKLADVGGDLKHVMSDSSLDLPTVSGQHPPAAGSGSPSATSILQKKETSFGSSENITMTSLSKVTTFVSEDALPETTFPALASFKDTIPQTSEQKEYENRDYKDFTKQDLPTAERSQEATCPSPASSGASQETPNECSDDFGEFQSEKPKISKFDFLVATSQSKMKSSEEMIKSELATFDLSVQGE

SEQ ID NO: 40210 - protein, 279 aa, Homo sapiens
MRLFSYPTLFTLSSLPGGLCGNKMAAPIPQGFSCLSRFLGWWSRQPVLVTQSAAIVPVRTKKRFTPPIYQPKFKTEKEFMQHARKAGLVIPPEKSDRSIHLACTAGIFDAYVPPEGDARISSLSKEGLIERTERMKKTMASQVSIRRIKDYDANFKIKDFPEKAKDIFIEAHLCLNNSDHDRLHTLVTEHCFPTLAIYDRFGRLMYGQEDVPKDVLEYVVFEKQLTNPYGSWRMHTKIVPPWAPPKQPILKTVMIPGPQLKPEEEYEEAQGEAQKPQLA

SEQ ID NO: 40211 - protein, 278 aa, Homo sapiens
MSLKALSEGCPLLEQLNISWCDQVTKDGIQALVRGCGGLKALFLKGCTQLEDEALKYIGAHCPELVTLNLQTCLQITDEGLITICRGCHKLQSLCASGCSNITDAILNALGQNCPRLRILEVARCSQLTDVGFTTLARNCHELEKMDLEECVQITDSTLIQLSIHCPRLQVLSLSHCELITDDGIRHLGNGACAHDQLEVIELDNCPLITDASLEHLKSCHSLERIELYDCQQITRAGIKRLRTHLPNIKVHAYFAPVTPPPSVGGSRQRFCRCCIIL

SEQ ID NO: 40212 - protein, 612 aa, Homo sapiens
MRSAVFKAAAAPAGGNPEQRLDYERAAALGGPEDEPGAAEAHFLPRHRKLKEPGPPLASSQGGSPAPSPAGCGGKGRGLLLPAGAAPGQQEESWGGSVPLPCPPPATKQAGIGGEPAAAGAGCSPRPKYQAVLPIQTGSLVAAAKEPTPWAGDKGGAASPAATASDPAGPPPLPLPGPPPLAPTATAGTLAASEGRWKSMRKSPLGGGGGSGASSQAACLKQILLLQLDLIEQQQQQLQAKEKEIEELKSERDTLLARIERMERRMQLVKKDNEKERHKLFQGYETEEREETELSEKIKLECQPELSETSQTLPPKPFSCGRSGKGHKRKSPFGSTERKTPVKKLAPEFSKVKTKTPKHSPIKEEPCGSLSETVCKRELRSQETPEKPRSSVDTPPRLSTPQKGPSTHPKEKAFSSEIEDLPYLSTTEMYLCRWHQPPPSPLPLRESSPKKEETVARCLMPSSVAGETSVLAVPSWRDHSVEPLRDPNPSDLLENLDDSVFSKRHAKLELDEKRRKRWDIQRIREQRILQRLQLRMYKKKGIQESEPEVTSFFPEPDDVESLMITPFLPVVAFGRPLPKLTPQNFELPWLDERSRCRLEIQKKQTPHRTCRK

SEQ ID NO: 40213 - protein, 16 aa, Homo sapiens
MELTPIMEINHFSSGF

SEQ ID NO: 40214 - protein, 62 aa, Homo sapiens
MLLLGLIRFPLCLQKFACNGTVIEHPEYGEVIQLQGDQRKNICQFLVEIGLAKDDQLKVHGF

SEQ ID NO: 40215 - protein, 777 aa, Homo sapiens
MQVLYGQHFPIEVRHYLAQWIESQPWDAIDLDNPQDRAQATQLLEGLVQELQKKAEHQVGEDGFLLKIKLGHYATQLQKTYDRCPLELVRCIRHILYNEQRLVREANNCSSPAGILVDAMSQKHLQINQTFEELRLVTQDTENELKKLQQTQEYFIIQYQESLRIQAQFAQLAQLSPQERLSRETALQQKQVSLEAWLQREAQTLQQYRVELAEKHQKTLQLLRKQQTIILDDELIQWKRRQQLAGNGGPPEGSLDVLQSWCEKLAEIIWQNRQQIRRAEHLCQQLPIPGPVEEMLAEVNATITDIISALVTSTFIIEKQPPQVLKTQTKFAATVRLLVGGKLNVHMNPPQVKATIISEQQAKSLLKNENTRNECSGEILNNCCVMEYHQATGTLSAHFRNMSLKRIKRADRRGAESVTEEKFTVLFESQFSVGSNELVFQVKTLSLPVVVIVHGSQDHNATATVLWDNAFAEPGRVPFAVPDKVLWPQLCEALNMKFKAEVQSNRGLTKENLVFLAQKLFNNSSSHLEDYSGLSVSWSQFNRENLPGWNYTFWQWFDGVMEVLKKHHKPHWNDGAILGFVNKQQAHDLLINKPDGTFLLRFSDSEIGGITIAWKFDSPERNLWNLKPFTTRDFSIRSLADRLGDLSYLIYVFPDRPKDEVFSKYYTPVLAKAVDGYVKPQIKQVVPEFVNASADAGGSSATYMDQAPSPAVCPQAPYNMYPQNPDHVLDQDGEFDLDETMDVARHVEELLRRPMDSLDSRLSPPAGLFTSARGSLS

SEQ ID NO: 40216 - protein, 991 aa, Homo sapiens
MLAAKRQQELEQQRQREQQRQEELEKQRLEQQLLILRNKEKSKESAIASTEVKLRLQEFLLSKSKEPTPGGLNHSLPQHPKCWGAHHASLDQSSPPQSGPPGTPPSYKLPLPGPYDSRDDFPLRKTASEPNLKVRSRLKQKVAERRSSPLLRRKDGTVISTFKKRAVEITGAGPGASSVCNSAPGSGPSSPNSSHSTIAENGFTGSVPNIPTEMLPQHRALPLDSSPNQFSLYTSPSLPNISLGLQATVTVTNSHLTASPKLSTQQEAERQALQSLRQGGTLTGKFMSTSSIPGCLLGVALEGDGSPHGHASLLQHVLLLEQARQQSTLIAVPLHGQSPLVTGERVATSMRTVGKLPRHRPLSRTQSSPLPQSPQALQQLVMQQQHQQFLEKQKQQQLQLGKILTKTGELPRQPTTHPEETEEELTEQQEVLLGEGALTMPREGSTESESTQEDLEEEDEEDDGEEEEDCIQVKDEEGESGAEEGPDLEEPGAGYKKLFSDAQPLQPLQVYQAPLSLATVPHQALGRTQSSPAAPGGMKSPPDQPVKHLFTTGVVYDTFMLKHQCMCGNTHVHPEHAGRIQSIWSRLQETGLLSKCERIRGRKATLDEIQTVHSEYHTLLYGTSPLNRQKLDSKKLLGPISQKMYAVLPCGGIGVDSDTVWNEMHSSSAVRMAVGCLLELAFKVAAGELKNGFAIIRPPGHHAEESTAMGFCFFNSVAITAKLLQQKLNVGKVLIVDWDIHHGNGTQQAFYNDPSVLYISLHRYDNGNFFPGSGAPEEVGGGPGVGYNVNVAWTGGVDPPIGDVEYLTAFRTVVMPIAHEFSPDVVLVSAGFDAVEGHLSPLGGYSVTARCFGHLTRQLMTLAGGRVVLALEGGHDLTAICDASEACVSALLSVELQPLDEAVLQQKPNINAVATLEKVIEIQSKHWSCVQKFAAGLGRSLREAQAGETEEAETVSAMALLSVGAEQAQAAAAREHSPRPAEEPMEQEPAL

SEQ ID NO: 40217 - protein, 715 aa, Homo sapiens
MAAPKGQDRWSQEDMLTLLECMKNNLPSNDSSKFKTTESHMDWEKVAFKDFSGDMCKLKWVEISNEVRKFRTLTELILDAQEHVKNPYKGKKLKKHPDFPKKPLTPYFRFFMEKRAKYAKLHPEMSNLDLTKILSKKYKELPEKKKMKYIQDFQREKQEFERNLARFREDHPDLIQNAKKSDIPEKPKTPQQLWYTHEKKVYLKVRPDEIMRDYIQKHPELNISEEGITKSTLTKAERQLKDKFDGRPTKPPPNSYSLYCAELMANMKDVPSTERMVLCSQQWKLLSQKEKDAYHKKCDQKKKDYEVELLRFLESLPEEEQQRVLGEEKMLNINKKQATSPASKKPAQEGGKGGSEKPKRPVSAMFIFSEEKRRQLQEERPELSESELTRLLARMWNDLSEKKKAKYKAREAALKAQSERKPGGEREERGKLPESPKRAEEIWQQSVIGDYLARFKNDRVKALKAMEMTWNNMEKKEKLMWIKKAAEDQKRYERELSEMRAPPAATNSSKKMKFQGEPKKPPMNGYQKFSQELLSNGELNHLPLKERMVEIGSRWQRISQSQKEHYKKLAEEQQKQYKVHLDLWVKSLSPQDRAAYKEYISNKRKSMTKLRGPNPKSSRTTLQSKSESEEDDEEDEDDEDEDEEEEDDENGDSSEDGGDSSESSSEDESEDGDENEEDDEDEDDDEDDDEDEDNESEGSSSSSSSSGDSSDSDSN

SEQ ID NO: 40218 - protein, 752 aa, Homo sapiens
MAAPKGQDRWSQEDMLTLLECMKNNLPSNDSSKFKTTESHMDWEKVAFKDFSGDMCKLKWVEISNEVRKFRTLTELILDAQEHVKNPYKGKKLKKHPDFPKKPLTPYFRFFMEKRAKYAKLHPEMSNLDLTKILSKKYKELPEKKKMKYIQDFQREKQEFERNLARFREDHPDLIQNAKKSDIPEKPKTPQQLWYTHEKKVYLKVRPDATTKEVKDSLGKQWSQLSDKKRLKWIHKALEQRKEYEEIMRDYIQKHPELNISEEGITKSTLTKAERQLKDKFDGRPTKPPPNSYSLYCAELMANMKDVPSTERMVLCSQQWKLLSQKEKDAYHKKCDQKKKDYEVELLRFLESLPEEEQQRVLGEEKMLNINKKQATSPASKKPAQEGGKGGSEKPKRPVSAMFIFSEEKRRQLQEERPELSESELTRLLARMWNDLSEKKKAKYKAREAALKAQSERKPGGEREERGKLPESPKRAEEIWQQSVIGDYLARFKNDRVKALKAMEMTWNNMEKKEKLMWIKKAAEDQKRYERELSEMRAPPAATNSSKKMKFQGEPKKPPMNGYQKFSQELLSNGELNHLPLKERMVEIGSRWQRISQSQKEHYKKLAEEQQKQYKVHLDLWVKSLSPQDRAAYKEYISNKRKSMTKLRGPNPKSSRTTLQSKSESEEDDEEDEDDEDEDEEEEDDENGDSSEDGGDSSESSSEDESEDGDENEEDDEDEDDDEDDDEDEDNESEGSSSSSSSSGDSSDSDSN

SEQ ID NO: 40219 - protein, 875 aa, Homo sapiens
MPEKRPFERLPADVSPINYSLCLKPDLLDFTFEGKLEAAAQVRQATNQIVMNCADIDIITASYAPEGDEEIHATGFNYQNEDEKVTLSFPSTLQTGTGTLKIDFVGELNDKMKGFYRSKYTTPSGEVRYAAVTQFEATDARRAFPCWDEPAIKATFDISLVVPKDRVALSNMNVIDRKPYPDDENLVEVKFARTPVMSTYLVAFVVGEYDFVETRSKDGVCVRVYTPVGKAEQGKFALEVAAKTLPFYKDYFNVPYPLPKIDLIAIADFAAGAMENWGLVTYRETALLIDPKNSCSSSRQWVALVVGHELAHQWFGNLVTMEWWTHLWLNEGFASWIEYLCVDHCFPEYDIWTQFVSADYTRAQELDALDNSHPIEVSVGHPSEVDEIFDAISYSKGASVIRMLHDYIGDKDFKKGMNMYLTKFQQKNAATEDLWESLENASGKPIAAVMNTWTKQMGFPLIYVEAEQVEDDRLLRLSQKKFCAGGSYVGEDCPQWMVPITISTSEDPNQAKLKILMDKPEMNVVLKNVKPDQWVKLNLGTVGFYRTQYSSAMLESLLPGIRDLSLPPVDRLGLQNDLFSLARAGIISTVEVLKVMEAFVNEPNYTVWSDLSCNLGILSTLLSHTDFYEEIQEFVKDVFSPIGERLGWDPKPGEGHLDALLRGLVLGKLGKAGHKATLEEARRRFKDHVEGKQILSADLRSPVYLTVLKHGDGTTLDIMLKLHKQADMQEEKNRIERVLGATLLPDLIQKVLTFALSEEVRPQDTVSVIGGVAGGSKHGRKAAWKFIKDNWEELYNRYQGGFLISRLIKLSVEGFAVDKMAGEVKAFFESHPAPSAERTIQQCCENILLNAAWLKRDAESIHQYLLQRKASPPTV

SEQ ID NO: 40220 - protein, 540 aa, Homo sapiens [sequence omitted]

SEQ ID NO: 40221 - protein, 1030 aa, Homo sapiens [sequence omitted]

SEQ ID NO: 40222 - protein, 1172 aa, Homo sapiens [sequence omitted]

SEQ ID NO: 40223 - protein, 888 aa, Homo sapiens
MLALLGWWWFFSRKKGHVSSHDEQQVEAGAVQLRADPAIKEPLPVEDVCPKVVSTPPSVTEPPEKELSTVSKLPAEPPALLQTHPPCRRSESSGILPNTTDMRLRPGTRRDDSTKLELALTGGEAKSIPLECPLSSPKGVLFSSKSAEVCKQDSPFSRVPRKVQPGYPVVPAEKRSSGERARETGGAEGTGDAVLGEKVLEEALLSREHVLELENSKGPSLASLEGEEDKGKSSSSQVVGPVQEEEYVAEKLPSRFIESAHTELAKDDAAPAPPVADAKAQDRGVEGELGNEESLDRNEEGLDRNEEGLDRNEESLDRNEEGLDRNEEIKRAAFQIISQVISEATEQVLATTVGKVAGRVCQASQLQGQKEESCVPVHQKTVLGPDTAEPATAEAAVAPPDAGLPLPGLPAEGSPPPKTYVSCLKSLLSSPTKDSKPNISAHHISLASCLALTTPSEELPDRAGILVEDATCVTCMSDSSQSVPLVASPGHCSDSFSTSGLEDSCTETSSSPRDKAITPPLPESTVPFSNGVLKGELSDLGAEDGWTMDAEADHSGGSDRNSMDSVDSCCSLKKTESFQNAQAGSNPKKVDLIIWEIEVPKHLVGRLIGKQGRYVSFLKQTSGAKIYISTLPYTQSVQICHIEGSQHHVDKALNLIGKKFKELNLTNIYAPPLPSLALPSLPMTSWLMLPDGITVEVIVVNQVNAGHLFVQQHTHPTFHALRSLDQQMYLCYSQPGIPTLPTPVEITVICAAPGADGAWWRAQVVASYEETNEVEIRYVDYGGYKRVKVDVLRQIRSDFVTLPFQGAEVLLDSVMPLSDDDQFSPEADAAMSEMTGNTALLAQVTSYSPTGLPLIQLWSVVGDEVVLINRSLVERGLAQWVDSYYTSL

SEQ ID NO: 40224 - protein, 578 aa, Homo sapiens
MLALLGWWWFFSRKKGHVSSHDEQQVEAGAVQLRADPAIKEPLPVEDVCPKVVSTPPSVTEPPEKELSTVSKLPAEPPALLQTHPPCRRSESSGILPNTTDMRLRPGTRRDDSTKLELALTGGEAKSIPLECPLSSPKGVLFSSKSAEVCKQDSPFSRVPRKVQPGYPVVPAEKRSSGERARETGGAEGTGDAVLGEKVLEEALLSREHVLELENSKGPSLASLEGEEDKGKSSSSQVVGPVQEEEYVAEKLPSRFIESAHTELAKDDAAPAPPVADAKAQDRGVEGELGNEESLDRNEEGLDRNEEGLDRNEESLDRNEEGLDRNEEIKRAAFQIISQVISEATEQVLATTVGKVAGRVCQASQLQGQKEESCVPVHQKTVLGPDTAEPATAEAAVAPPDAGLPLPGLPAEGSPPPKTYVSCLKSLLSSPTKDSKPNISAHHISLASCLALTTPSEELPDRAGILVEDATCVTCMSDSSQSVPLVASPGHCSDSFSTSGLEDSCTETSSSPRDKAITPPLPESTVPFSNGVLKGELSDLGAEDGWTMDAEADHSGVAAPPPGKRGTLITRCPGFFEC

SEQ ID NO: 40225 - protein, 311 aa, Homo sapiens
MTYHVRSHEGGITKPYTCSVCGKGFSRPDHLSCHVKHVHSTERPFKCQFSSLMQTCTAAFATKDRLRTHMVRHEGKVSCNICGKLLSAAYITSHLKTHGQSQSINCNTCKQGISKTCMSEETSNQKQQQQQQQQQQQQQQQQQQHVTSWPGKQVETLRLWEEAVKARKKEAANLCQTSTAATTPVTLTTPFSITSSVSSGTMSNPVTVAAAMSMRSPVNVSSAVNITSPMNIGHPVTITSPLSMTSPLTLTTPVNLPTPVTAPVNIAHPVTITSPMNLPTPMTLAAPLNIAMRPVESMPFLPQALPTSPPW

SEQ ID NO: 40226 - protein, 680 aa, Homo sapiens
MIGVTQPRKVAAISVAQRVAEEMKCTLGSKVGYQVRFDDCSSKETAIKYMTDGCLLKHILGDPNLTKFSVIILDEAHERTLTTDILFGLLKKLFQEKSPNRKEHLKVVVMSATMELAKLSAFFGNCPIFDIPGRLYPVREKFCNLIGPRDRENTAYIQAIVKVTMDIHLNEMAGDILVFLTGQFEIEKSCELLFQMAESVDYDYDVQDTTLDGLLILPCYGSMTTDQQRRIFLPPPPGIRKCVISTNISATSLTIDGIRYVVDGGFVKQLNHNPRLGLDILEVVPISKSEALQRSGRAGRTSSGKCFRIYSKDFWNQCMPDHVIPEIKRTSLTSVVLTLKCLAIHDVIRFPYLDPPNERLILEALKQLYQCDAIDRSGHVTRLGLSMVEFPLPPHLTCAVIKAASLDCEDLLLPIAAMLSVENVFIRPVDPEYQKEAEQRHRELAAKAGGFNDFATLAVIFEQCKSSGAPASWCQKHWIHWRCLFSAFRVEAQLRELIRKLKQQSDFPKETFEGPKHEVLRRCLCAGYFKNVARRSVGRTFCTMDGRGSPVHIHPSSALHEQETKLEWIIFHEVLVTTKVYARIVCPIRYEWVRDLLPKLHEFNAHDLSSVARREVREDARRRWTNKENVKQLKDGISKDVLKKMQRRNDDKSISDARARFLERKQQRTQDHSDTRKETG

SEQ ID NO: 40227 - protein, 392 aa, Homo sapiens [sequence omitted]

SEQ ID NO: 40228 - protein, 896 aa, Homo sapiens
MESVVTFLQDVVPQAYSGTPLTEEKEKIVWVRFENADLNDTSRNLEFHEIHSTGNEPPLLIMIGYSDGMQVWSIPISGEAQELFSVRHGPIRAARILPAPQFGAQKCDNFAEKRPLLGVCKSIGSSGTSPPYCCVDLYSLRTGEMVKSIQFKTPIYDLHCNKRILVVVLQEKIAAFDSCTFTKKFFVTSCYPCPGPNMNPIALGSRWLAYAENKLIRCHQSRGGACGDNIQSYTATVISAAKTLKSGLTMVGKVVTQLTGTLPSGVTEDDVAIHSNSRRSPLVPGIITVIDTETVGEGQVLVSEDSDSDGIVAHFPAHEKPVCCMAFNTSGMLLVTTDTLGHDFHVFQILTHPWSSSQCAVHHLYTLHRGETEAKVQDICFSHDCRWVVVSTLRGTSHVFPINPYGGQPCVRTHMSPRVVNRMSRFQKSAGLEEIEQELTSKQGGRCSPVPGLSSSPSGSPLHGKLNSQDSYNNFTNNNPGNPRLSPLPSLMVVMPLAQIKQPMTLGTITKRTGPYLFGAGCFSIKAPCKVKPPPQISPSKSMGGEFCVAAIFGTSRSWFANNAGLKREKDQSKQVVVESLYIISCYGTLVEHMMEPRPLSTAPKISDDTPLEMMTSPRASWTLVRTPQWNELQPPFNANHPLLLAADAVQYYQFLLAGLVPPGSPGPITRHGSYDSLASDHSGQEDEEWLSQVEIVTHTGPHRRLWMGPQFQFKTIHPSGQTTVISSSSSVLQSHGPSDTPQPLLDFDTDDLDLNSLRIQPVRSDPVSMPGSSRPVSDRRGVSTVIDAASGTFDRSVTLLEVCGSWPEGFGLRHMSSMEHTEEGLRERLADAMAESPSRDVVGSGTELQREGSIETLSNSSGSTSGSIPRNFDGYRSPLPTNESQPLSLFPTGFP

SEQ ID NO: 40229 - protein, 896 aa, Homo sapiens
MESVVTFLQDVVPQAYSGTPLTEEKEKIVWVRFENADLNDTSRNLEFHEIHSTGNEPPLLIMIGYSDGMQVWSIPISGEAQELFSVRHGPIRAARILPAPQFGAQKCDNFAEKRPLLGVCKSIGSSGTSPPYCCVDLYSLRTGEMVKSIQFKTPIYDLHCNKRILVVVLQEKIAAFDSCTFTKKFFVTSCYPCPGPNMNPIALGSRWLAYAENKLIRCHQSRGGACGDNIQSYTATVISAAKTLKSGLTMVGKVVTQLTGTLPSGVTEDDVAIHSNSRRSPLVPGIITVIDTETVGEGQVLVSEDSDSDGIVAHFPAHEKPVCCMAFNTSGMLLVTTDTLGHDFHVFQILTHPWSSSQCAVHHLYTLHRGETEAKVQDICFSHDCRWVVVSTLRGTSHVFPINPYGGQPCVRTHMSPRVVNRMSRFQKSAGLEEIEQELTSKQGGRCSPVPGLSSSPSGSPLHGKLNSQDSYNNFTNNNPGNPRLSPLPSLMVVMPLAQIKQPMTLGTITKRTGKVKPPPQISPSKSMGGEFCVAAIFGTSRSWFANNAGLKREKDQSKQVVVESLYIISCYGTLVEHMMEPRPLSTAPKISDDTPLEMMTSPRASWTLVRTPQWNELQPPFNANHPLLLAADAVQYYQFLLAGLVPPGSPGPITRHGSYDSLASDHSGQEDEEWLSQVEIVTHTGPHRRLWMGPQFQFKTIHPSGQTTVISSSSSVLQSHGPSDTPQPLLDFDTDDLDLNSLRIQPVRSDPVSMPGSSRPVSDRRGVSTVIDAASGTFDRSVTLLEVCGSWPEGFGLRHMSSMEHTEEGLRERLADAMAESPSRDVVGSGTDTALDVAVKTFPPERHVAVKCFGKKKGKKKQCQQPSVREQPNSNKACVRDGGRTSARGKHRDSE

SEQ ID NO: 40230 - protein, 144 aa, Homo sapiens
MSSFLPEGGCYELLTVIGKGFEDLMTVNLARYKPTGEYVTVRRINLEACSNEMVTFLQGELHVSKLFNHPNIVPYRATFIADNELWVVTSFMAYGSAKDLICTHFMDGMNELAIAYILQGVLKALDYIHHMGYVHRCVLRRPFP

SEQ ID NO: 40231 - protein, 149 aa, Homo sapiens
MSSFGYRTLTVALFTLICCPGSDEKVFEVHVRPKKLAVEPKGSLEVNCSTTCNQPEVGGLETSLDKILLDEQAQWKHYLVSNISHDTVLQCHFTCSGKQESMNSNVSVYREWLCCGALLSPGTEAVSTECTQSPSVPAPGHCHRGALPP

SEQ ID NO: 40232 - protein, 1120 aa, Homo sapiens
MPKPSAPKVHVQRSVSRDTIAIHFSASGEEEEEEEEEFREYFEEGLDDQSIVTGLEAKEDLYLEPQVGHDPAGPAASPVLADGLSVSQAPAILPVSKNTVKLLESPVPAAQVLSTVPLAVSPGSSSSGPLASSPSVSSLSEQKTSSSSPLSSPSKSPILSSSASTSTLSSAKPFMSLVKSLSTEVEPKESPHPARHRHLMKTLVKSLSTDTSRQESDTVSYKPPDSKLNLHLFKQFTQPRNTGGDSKTAPSSPLTSPSDTRSFFKVPEMEAKIEDTKRRLSEVIYEPFQLLSKIIGEESGSHRPKALSSSASELSNLSSLNGHLESNNNYSIKEEECDSEGDGYGSDSNIPRSDHPKSTGEPTREIELKSSQGSSLKDLGLKTSSLVLEKCSLSALVSKEDEEFCELYTEDFDLETEGESKVDKLSDIPLKPEVLAEDGVVLDSEDEVDSAVQHPELPVKTLGFFIMCVYVYLILPLPHYVSGLFLGIGLGFMTAVCVIWFFTPPSAHKYHKLHKNLRHWNTRSLDIKEPEILKGWMNEIYNYDPETYHATLTHSVFVRLEGGTLRLSKPNKNISRRASYNEPKPEVTYISQKIYDLSDSKIYLVPKTLARKRIWNKKYPICIELGQQDDFMSKAQTDKETSEEKPPAEGSEDPKKPPRPQEGTRSSQRDQILYLFGRTGREKEEWFRRFILASKLKSEIKKSSGVSGGKPAPVFLAPGLLPAHSRHNSPSGHLTHSRSSSKGSVEEIMSQPKQKELAGSVRQKMLLDYSVYMGRCVPQESRSPQRSPLQSAESSPTAGKKLPEVPPSEEEEQEAWVNALLGRIFWDFLGEKYWSDLVSKKIQMKLSKIKLPYFMNELTLTELDMGVAVPKILQAFKPYVDHQGLWIDLEMSYNGSFLMTLETKMNLTKLGKEPLVEALKVGEIGKEGCRPRAFCLADSDEESSSAGSSEEDDAPEPSGGDKQLLPGAEGYVGGHRTSKIMRFVDKITKSKYFQKATETEFIKKKIEEVSNTPLLLTVEVQECRGTLAVNIPPPPTDRVWYGFRKPPHVELKARPKLGEREVTLVHVTDWIEKKLEQEFQKVFVMPNMDDVYITIMHSAMDPRSTSCLLKDPPVEAADQP

SEQ ID NO: 40233 - protein, 1113 aa, Homo sapiens [sequence omitted]

SEQ ID NO: 40234 - protein, 406 aa, Homo sapiens
MSGYSSDRDRGRDRGFGAPRFGGSRAGPLSGKKFGNPGEKLVKKKWNLDELPKFEKNFYQEHPDLARRTAQEVETYRRSKEITVRGHNCPKPVLNFYEANFPANVMDVIARQNFTEPTAIQAQGWPVALSGLDMVGVAQTGSGKTLSYLLPAIVHINHQPFLERGDGPICLVLAPTRELAQQVQQVAAEYCRACRLKSTCIYGGAPKGPQIRDLERGVEICIATPGRLIDFLECGKTNLRRTTYLVLDEADRMLDMGFEPQIRKIVDQIRPDRQTLMWSATWPKEVRQLAEDFLKDYIHINIGALELSANHNILQIVDVCHDVEKDEKLIRLMEEIMSEKENKTIVFVETKRRCDELTRKMRRDGWPAMGIHGDKSQQERDWVLNEFKHGKAPILIATDVASRGLG

SEQ ID NO: 40235 - protein, 602 aa, Homo sapiens
MEVCPYCKKPFKRLKSHLPYCKMIGPTIPTDQKVYQSKPATLPRAKKMKGPIKDLIKAKGKELETENEERNSKLVVDKPEQTVKTFPLPAVGLERAATTKADKDIKNPIQPSFKMLKNTKPMTTFQEETKAQFYASEKTSPKRELAKDLPKSGESRCNPSEAGASLLVGSIEPSLSNQDRKYSSTLPNDVQTTSGDLKLDKIDPQRQELLVKLLDVPTGDCHISPKNVSDGVKRVRTLLSNERDSKGRDHLSGVPTDVTVTETPEKNTESLILSLKMSSLGKIQVMEKQEKGLTLGVETCGSKGNAEKSMSATEKQERTVMSHGCENFNTRDSVTGKESQGERPHLSLFIPRETTYQFHSVSQSSSQSLASLATTFLQEKKAEAQNHHCVPDVKALMESPEGQLSLEPKSDSQFQASHTGCQSPLCSAQRHTPQSPFTNHAAAAGRKTLRSCMGLEWFPELYPGYLGLGVLPGKPQCWNAMTQKPQLISPQGERLSQVSLLERSSTHIRSLEPPAGLTTSNFSLMRLLGAVQKGWIRCNTTIRKSGFGGITMLFTGYFVLCCSWSFRRLKKLCRPLPWKSTVPPCIGVAKTTGDCRSKTCLD

SEQ ID NO: 40236 - protein, 634 aa, Homo sapiens
MYFDWGPGEMLVCETSFNKKEKSEMVPSCPFIYIIRKDVDVYSQILRKLFNESHGIFLGLQRIDEELTGKSRKSQLVRVSKNYRSVIRACMEEMHQVAIAAKDPANGRQFSSQVSILSAMELIWNLCEILFIEVAPAGPLLLHLLDWVRLHVCEVDSLSADVLGSENPSKHDSFWNLVTILVLQGRLDEARQMLSKEADASPASAGICRIMGDLMRTMPILSPGNTQTLTELELKWQHWHEECERYLQDSTFATSPHLESLLKIMLGDEAALLEQKELLSNWYHFLVTRLLYSNPTVKPIDLHYYAQSSLDLFLGGESSPEPLDNILLAAFEFDIHQVIKECSIALSNWWFVAHLTDLLDHCKLLQSHNLYFGSNMREFLLLEYASGLFAHPSLWQLGVDYFDYCPELGRVSLELHIERIPLNTEQKALKVLRICEQRQMTEQVRSICKILAMKAVRNNRLGSALSWSIRAKDAAFATLVSDRFLRDYCERGCFSDLDLIDNLGPAMMLSDRLTFLGKYREFHRMYGEKRFADAASLLLSLMTSRIAPRSFWMTLLTDALPLLEQKQVIFSAEQTYELMRCLEDLTSRRPVHGESDTEQLQDDDIETTKVEMLRLSLARNLARAIIREGSLEGS

SEQ ID NO: 40237 - protein, 122 aa, Homo sapiens
MLPKPGTYYLPWEVSAGQVPDGSTLRTFGRLCLYDMIQSRVTLMAQHGSDQHQVLVCTKLVEPFHAQVGSLYIVLGELQHQQDRGSVVKARVLTCVEGMNLPLLEQAIREQRLYKQERGGSQ

SEQ ID NO: 40238 - protein, 59 aa, Homo sapiens [sequence omitted]

SEQ ID NO: 40239 - protein, 61 aa, Homo sapiens
MNNLPHLQVVGLTWGHISWDLLALPPQDIILASDVFFEPEGLSVASPRGELTALGCCLRQS

SEQ ID NO: 40240 - protein, 83 aa, Homo sapiens
MDVSGVGFPSKVPWKKMSAEELENQYCPSRWVVRLGAEEALRTYSQIGIEDYLENNLPVVLTILGAWSTCIPPWEASPKSFRS

SEQ ID NO: 40241 - protein, 954 aa, Homo sapiens
MQNHIVQAFANSGNAIKPVSFIRDLKKIARHFRFGNQEDAHEFLRYTIDAMQKACLNGCAKLDRQTQATTLVHQIFGGYLRSRVKCSVCKSVSDTYDPYLDVALEIRQAANIVRALELFVKADVLSGENAYMCAKCKKKVPASKRFTIHRTSNVLTLSLKRFANFSGGKITKDVGYPEFLNIRPYMSQNNGDPVMYGLYAVLVHSGYSCHAGHYYCYVKASNGQWYQMNDSLVHSSNVKVVLNQQAYVLFYLRIPGSKKSPEGLISRTGSSSLPGRPSVIPDHSKKNIGNGIISSPLTGKRQDSGTMKKPHTTEEIGVPISRNGSTLGLKSQNGCIPPKLPSGSPSPKLSQTPTHMPTILDDPGKKVKKPAPPQHFSPRTAQGLPGTSNSNSSRSGSQRQGSWDSRDVVLSTSPKLLATATANGHGLKGNDESAGLDRRGSSSSSPEHSASSDSTKAPQTPRSGAAHLCDSQETNCSTAGHSKTPPSGADSKTVKLKSPVLSNTTTEPASTMSPPPAKKLALSAKKASTLWRATGNDLRPPPPSPSSDLTHPMKTSHPVVASTWPVHRARAVSPAPQSSSRLQPPFSPHPTLLSSTPKPPGTSEPRSCSSISTALPQVNEDLVSLPHQLPEASEPPQSPSEKRKKTFVGEPQRLGSETRLPQHIREATAAPHGKRKRKKKKRPEDTAASALQEGQTQRQPGSPMYRREGQAQLPAVRRQEDGTQPQVNGQQVGCVTDGHHASSRKRRRKGAEGLGEEGGLHQDPLRHSCSPMGDGDPEAMEESPRKKKKKKRKQETQRAVEEDGHLKCPRSAKPQDAVVPESSSCAPSANGWCPGDRMGLSQAPPVSWNGERESDVVQELLKYSSDKAYGRKVLTWDGKMSAVSQDAIEDSRQARTETVVDDWDEEFDRGKEKKIKKFKREKRRNFNAFQKLQTRRNFWSVTHPAKAASLSYRR

SEQ ID NO: 40242 - protein, 268 aa, Homo sapiens
MYGLHQDVHHFNSFDKVRSLPLLLSQAGVRTGIIGKKHVGPETVYPFDFAYTEENGSVLQVGRNITRIKLLVRKFLQTQDDRPFFLYVAFHDPHRCGHSQPQYGTFCEKFGNGESGMGRIPDWTPQAYDPLDVLVPYFVPNTPAARADLAAQYTTVGRMDQGVGLVLQELRDAGVLNDTLVIFTSDNGIPFPSGRTNLYWPGTAEPLLVSSPEHPKRWGQVSEAYVSLLGMPLSVSVRKGVGVDLGRGHDLSDAAPHPLPNVALISSG

SEQ ID NO: 40243 - protein, 286 aa, Homo sapiens
MEEEIAALVIDNGSGMCKAGFAGDDAPRAVFPSIVGRPRHQGVMVGMGQKDSYVGDEAQSKRGILTLKYPIEHGIVTNWDDMEKIWHHTFYNELRVAPEEHPVLLTEAPLNPKANREKMTQIMFETFNTPAMYVAIQAVLSLYASGRTTGIVMDSGDGVTHTVPIYEGYALPHAILRLDLAGRDLTDYLMKILTERGYSFTTTAEREIVRDIKEKLCYVALDFEQEMATAASSSSLEKSYELPDGQVITIGNERFRCPEALFQPSFLGRCCELKVSTLTSSVTQHH

SEQ ID NO: 40244 - protein, 730 aa, Homo sapiens
MQLFEQPCPGEDPRPGGQIGEVELSSYTPPAGVPGKPAAPHFLPVLCSVSPSGSRVPHDLLGGSGGFTLEDALFGLLFGADATLLQSPVVLCGLPDGQLCCVILKALVTSRSAPGDPNALVKILHHLEEPVIFIGALKTEPQAAEAAENFLPDEDVHCDCLVAFGHHGRMLAIKASWDESGKLVPELREYCLPGPVLCAACGGGGRVYHSTPSDLCVVDLSRGSTPLGPEQPEEGPGGLPPMLCPASLNICSVVSLSASPRTHEGGTKLLALSAKGRLMTCSLDLDSEMPGPARMTTESAGQKIKELLSGIGNISERVSFLKKAVDQRNKALTSLNEAMNVSCALLSSGTGPRPISCTTSTTWSRLQTQDVLMATCVLENSSSFSLDQGWTLCIQVLTSSCALDLDSACSAITYTIPVDQLGPGARREVTLPLGPGENGGLDLPVTVSCTLFYSLREVVGGALAPSDSEDPFLDECPSDVLPEQEGVCLPLSRHTVDMLQCLRFPGLAPPHTRAPSPLGPTRDPVATFLETCREPGSQPAGPASLRAEYLPPSVASIKVSAELLRAALKDGHSGVPLCCATLQWLLAENAAVDVVRARALSSIQGVAPDGANVHLIVREVAMTDLCPAGPIQAVEIQVESSSLADICRAHHAVVGRMQTMVTEQATQGSSAPDLRVQYLRQIHANHETLLREVQTLRDRLCTEDEASSCATAQRLLQVYRQLRHPSLILL

SEQ ID NO: 40245 - protein, 39 aa, Homo sapiens
MVELLKVFVVEAAVRGVRQAQAEDALRVDVDQLEKLLDF

SEQ ID NO: 40246 - protein, 375 aa, Homo sapiens
MPLYSVTVKWGKEKFEGVELNTDEPPMVFKAQLFALTGVQPARQKVMVKGGTLKDDDWGNIKIKNMELPCGLTNLGNTCYMNATVQCIRSVPELKDALKRYAGALRASGEMASAQYITAALRDLFDSMDKTSSSIPPIILLQFLHMAFPQFAEKGEQGQYLQQDANECWIQMMRVLQQKLEAIEDDSVKETDSSSASAATPSKKKSLIDQFFGVEFETTMKCTESEEEEVTKGKENQLQLSCFINQEVKYLFTGLKLRLQEEITKQSPTLQRNALYIKSSKISRLPAYLTIQMVRFFYKEKESVNAKVLKDVKFPLMLDMYELCTPELQEKMVSFRSKFKDLEDKKVNQQPNTSDKKSSPQKEVKYEPFSFADGK

SEQ ID NO: 40247 - protein, 105 aa, Homo sapiens
MNKVAEVLQVPPMRVYEVATFYTMYNRKPVGKYHIQVCTTTPCMLRNSDSILEAIQKKLGIKVGETTPDKLFTLIEVECLGACVNAPMVQINDNYYVSISGGFDS

SEQ ID NO: 40248 - protein, 700 aa, Homo sapiens
MSIQEKSKENSSKVTKKSDDKNSETEIQDSQKNLAKKSGPKETIKSQAKSSSESKINQPELETRMSTRSSKAASNDKATKSINKNTVTVRGYSQESTKKKLSQKKLVHENPKANEQLNRRSQRLQQLTEVSRRSLRSREIQGQVQAVKQSLPPTKKEQCSSTQSKSNKTSQKHVKRKVLEVKSDSKEDENLVINEVINSPKGKKRKVEHQTACACSSQCTQGSEKCPQKTTRRDETKPVPVTSEVKRSKMATSVVPKKNEMKKSVHTQVNTNTTLPKSPQPSVPEQSDNELEQAGKSKRGSILQLCEEIAGEIESDNVEVKKESSQMESVKEEKPTEIKLEETSVERQILHQKETNQDVQCNRFFPSRKTKPVKCILNGINSSAKKNSNWTKIKLSKFNSVQHNKLDSQVSPKLGLLRTSFSPPALEMHHPVTQSTFLGTKLHDRNITCQQEKMKEINSEEVKINDITVEINKTTERAPENCHLANEIKPSDPPLDNQMKHSFDSASNKNFSQCLESKLENSPVENVTAASTLLSQAKIDTGENKFPGSAPQQHSILSNQTSKSSDNRETPRNHSLPKCNSHLEITIPKDLKLKEAEKTDEKQLIIDAGQKRFGAVSCNVCGMLYTASNPEDETQHLLFHNQFISAVKYVVLLINHHECGSEEEFITSLFLSMFNFRYTQRSFSFPIRFLEGLEERKNSG

SEQ ID NO: 40249 - protein, 951 aa, Homo sapiens
MAFLLVFFGAFFAVWCYRKRYFVSEYTPIDSNIAFSVNASDKGTAWLLTSTFPSSPVLPGEASCCDPVSAAFEGCLRRLFTRWGSFCVRNPGCVIFFSLVFITACSSGLVFVRVTTNPVDLWSAPSSQARLEKEYFDQHFGPFFRTEQLIIRAPLTDKHIYQPYPSGADVPFGPPLDIQILHQVLDLQIAIENITASYDNETVTLQDICLAPLSPYNTNCTILSVLNYFQNSHSVLDHKKGDDFFVYADYHTHFLYCVRFINFVKNYKNPNLTISFTAERSIEDELNRESDSDVFTVVISYAIMFLYISLALGHMKSCRRLLVDSKVSLGIAGILIVLSSVACSLGVFSYIGLPLTLIVIEVIPFLVLAVGVDNIFILVQAYQRDERLQGETLDQQLGRVLGEVAPSMFLSSFSETVAFFLGALSVMPAVHTFSLFAGLAVFIDFLLQITCFVSLLGLDIKRQEKNRLDIFCCVRGAEDGTSVQASESCLFRFFKNSYSPLLLKDWMRPIVIAIFVGVLSFSIAVLNKVDIGLDQSLSMPDDSYMVDYFKSISQYLHAGPPVYFVLEEGHDYTSSKGQNMVCGGMGCNNDSLVQQIFNAAQLDNYTRIGFAPSSWIDDYFDWVKPQSSCCRVDNITDQFCNASVVDPACVRCRPLTPEGKQRPQGGDFMRFLPMFLSDNPNPKCGKGGHAAYSSAVNILLGHGTRVGATYFMTYHTVLQTSADFIDALKKARLIASNVTETMGINGSAYRVFPYSVFYVFYEQYLTIIDDTIFNLGVSLGAIFLVTMVLLGCELWSAVIMCATIAMVLVNMFGVMWLWGISLNAVSLVNLVMSCGISVEFCSHITRAFTVSMKGSRVERAEEALAHMGSSVFSGITLTKFGGIVVLAFAKSQIFQIFYFRMYLAMVLLGATHGLIFLPVLLSYIGPSVNKAKSCATEERYKGTERERLLNF

SEQ ID NO: 40250 - protein, 821 aa, Homo sapiens
MVYAVRSFPLSSEHAKFLIYAQDKETQEKWQVAVKLSLKPTLTEESVKESAEVEEIVFPRQFSKHSGHLQRQKRDWVIPPINLPENSRGPFPQELVRIRSDRDKNLSLRYSVTGPGADQPPTGIFIINPISGQLSVTKPLDREQIARFHLRAHAVDINGNQVENPIDIVINVIDMNDNRPEFLHQVWNGTVPEGSKPGTYVMTVTAIDADDPNALNGMLRYRIVSQAPSTPSPNMFTINNETGDIITVAAGLDREKVQQYTLIIQATDMEGNPTYGLSNTATAVITVTDVNDNPPEFTAMTFYGEVPENRVDIIVANLTVTDKDQPHTPAWNAVYRISGGDPTGRFAIQTDPNSNDGLVTVVKPIDFETNRMFVLTVAAENQVPLAKGIQHPPQSTATVSVTVIDVNENPYFAPNPKIIRQEEGLHAGTMLTTFTAQDPDRYMQQNIRYTKLSDPANWLKIDPVNGQITTIAVLDRESPNVKNNIYNATFLASDNGIPPMSGTGTLQIYLLDINDNAPQVLPQEAETCETPDPNSINITALDYDIDPNAGPFAFDLPLSPVTIKRNWTITRLNGDFAQLNLKIKFLEAGIYEVPIIITDSGNPPKSNISILRVKVCQCDSNGDCTDVDRIVGAGLGTGAIIAILLCIIILLILVLMFVVWMKRRDKERQAKQLLIDPEDDVRDNILKYDEEGGGEEDQDYDLSQLQQPDTVEPDAIKPVGIRRMDERPIHAEPQYPVRSAAPHPGDIGDFINEGLKAADNDPTAPPYDSLLVFDYEGSGSTAGSLSSLNSSSSGGEQDYDYLNDWGPRFKKLADMYGGGDD

SEQ ID NO: 40251 - protein, 159 aa, Homo sapiens
MAVESGVISTLIPQDPPEQELILVKVEDNFSWDEKFKQNGSTQSCQELFRQQFRKFCYQETPGPREALSRLQELCYQWLMPELHTKEQILELLVLEQFLSILPEELQIWVQQHNPESGEEAVTLLEDLEREFDDPGQQVGTEKSDVGKGIYSLEHVMVS

SEQ ID NO: 40252 - protein, 612 aa, Homo sapiens
MVSSFRVSELQVLLGFAGRNKSGRKHDLLMRALHLLKSGCSPAVQIKIRELYRRRYPRTLEGLSDLSTIKSSVFSLDGGSSPVEPDLAVAGIHSLPSTSVTPHSPSSPVGSVLLQDTKPTFEMQQPSPPIPPVHPDVQLKNLPFYDVLDVLIKPTSLVQSSIQRFQEKFFIFALTPQQVREICISRDFLPGGRRDYTVQVQLRLCLAETSCPQEDNYPNSLCIKVNGKLFPLPGYAPPPKNGIEQKRPGRPLNITSLVRLSSAVPNQISISWASEIGKNYSMSVYLVRQLTSAMLLQRLKMKGIRNPDHSRALIKEKLTADPDSEIATTSLRVSLMCPLGKMRLTIPCRAVTCTHLQCFDAALYLQMNEKKPTWICPVCDKKAAYESLILDGLFMEILNDCSDVDEIKFQEDGSWCPMRPKKEAMKVSSQPCTKIESSSVLSKPCSVTVASEASKKKVDVIDLTIESSSDEEEDPPAKRKCIFMSETQSSPTKGVLMYQPSSVRVPSVTSVDPAAIPPSLTDYSVPFHHTPISSMSSDLPGLDFLSLIPVDPQYCPPMFLDSLTSPLTASSTSVTTTSSHESSTHVSSSSSRSETGVITSSGSNIPDIISLD

SEQ ID NO: 40253 - protein, 563 aa, Homo sapiens
MVSSFRVSELQVLLGFAGRNKSGRKHDLLMRALHLLKSGCSPAVQIKIRELYRRRYPRTLEGLSDLSTIKSSVFSLDGGSSPVEPDLAVAGIHSLPSTSVTPHSPSSPVGSVLLQDTKPTFEMQQPSPPIPPVHPDVQLKNLPFYDVLDVLIKPTSLVQSSIQRFQEKFFIFALTPQQVREICISRDFLPGGRRDYTVQVQLRLCLAETSCPQEDNYPNSLCIKVNGKLFPLPGYAPPPKNGIEQKRPGRPLNITSLVRLSSAVPNQISISWASEIGKNYSMSVYLVRQLTSAMLLQRLKMKGIRNPDHSRALIKEKLTADPDSEIATTSLRVSLMCPLGKMRLTIPCRAVTCTHLQCFDAALYLQMNEKKPTWICPVCDKKAAYESLILDGLFMEILNDCSDVDEIKFQEDGSWCPMRPKKEAMKVSSQPCTKIESSSVLSKPCSVTVASEASKKKVDVIDLTIESSSDEEEDPPAKRKCIFMSETQSSPTKGVLMYQPSSVRVPSVTSVDPAAIPPSLTDYSVPFHHTPISSMSSDLPGEQRRNDINNELKLGTSSDTVQQ

SEQ ID NO: 40254 - protein, 169 aa, Homo sapiens
MLLVDDRALPDFKGIQTSDPNAVVMGLAPEHFHYQILNQAFRLLLDGAPLIAIHKARYYKRKDGLALGPGPFVTALEYATDTKATVVGKPEKTFFLEALRGTGCEPEEAVMIGDDCRDDVGGAQDVGMLGILVKTGKYRASDEEKINPPPYLTCESFPHAVDHILQHLL

SEQ ID NO: 40255 - protein, 505 aa, Homo sapiens
MLGTDIWAANTFDSFSGATWDLQPEKLDFTQFHRKVRHTPKQPLPHIDREGCGKGKLEDGDGINLNDIEKVLPAWQGYHPMPHEVEIAHTKKLFRRRRNDRRRQQRPPGGNKPQQHGDHQPGSAKHNRDHQKSYQGGSAPHPSGRPTHHGYSQNRRWHHGNMKHPPGDKGEAGAHRNAKETMTIENPKLEDTAGDTGHSSLEAPRSPDTLAPVASERLPPQQSGGPEVETKRKDSILPERIGERPKITLLQSSKDRLRRRLKEKDEVAVETTTPQQNKMDKLIEILNSMRNNSSDVDTKLTTFMEEAQNSTNSEEMLGEIVRTIYQKAVSDRSFAFTAAKLCDKMALFMVEGTKFRSLLLNMLQKDFTVREELQQQDVERWLGFITFLCEVFGTMRSSTGEPFRVLVCPIYTCLRELLQSQDVKEDAVLCCSMELQSTGRLLEEQLPEMMTELLASARDKMLCPSESMLTRSLLLEVIELHANSWNPLTPPITQYYNRTIQKLTA

SEQ ID NO: 40256 - protein, 1213 aa, Homo sapiens
MAPGGSGSGGGVNPFLSDSDEDDDEVAATEERRAVLRLGAGSGLDPGSAGSLSPQDPVALGSSARPGLPGEASAAAVALGGTGETPARLSIDAIAAQLLRDQYLLTALELHTELLESGRELPRLRDYFSNPGNFERQSGTPPGMGAPGVPGAAGVGGAGGREPSTASGGGQLNRAGSISTLDSLDFARYSDDGNRETDEKVAVLEFELRKAKETIQALRANLTKAAEHEVPLQERKNYKSSPEIQEPIKPLEKRALNFLVNEFLLKNNYKLTSITFSDENDDQDFELWDDVGLNIPKPPDLLQLYRDFGNHQVTGKDLVDVASGVEEDELEALTPIISNLPPTLETPQPAENSMLVQKLEDKISLLNSEKWSLMEQIRRLKSEMDFLKNEHFAIPAVCDSVQPPLDQLPHKDSEDSGQHPDVNSSDKGKNTDIHLSISDEADSTIPKENSPNSFPRREREGMPPSSLSSKKTVHFDKPNRKLSPAFHQALLSFCRMSADSRLGYEVSRIADSEKSVMLMLGRCLPHIVPNVLLAKREELIPLILCTACLHPEPKERDQLLHILFNLIKRPDDEQRQMILTGCVAFARHVGPTRVEAELLPQCWEQINHKYPERRLLVAESCGALAPYLPKEIRSSLVLSMLQQMLMEDKADLVREAVIKSLGIIMGYIDDPDKYHQGFELLLSALGDPSERVVSATHQVFLPAYAAWTTELGNLQSHLILTLLNKIEKLLREGEHGLDEHKLHMYLSALQSLIPSLFALVLQNAPFSSKAKLHGEVPQIEVTRFPRPMSPLQDVSTIIGSREQLAVLLQLYDYQLEQEGTTGWESLLWVVNQLLPQLIEIVGKINVTSTACVHEFSRFFWRLCRTFGKIFTNTKVKPQFQEILRLSEENIDSSAGNGVLTKATVPIYATGVLTCYIQEEDRKLLVGFLEDVMTLLSLSHAPLDSLKASFVELGANPAYHELLLTVLWYGVVHTSALVRCTAARMFELLVKGVNETLVAQRVVPALITLSSDPEISVRIATIPAFGTIMETVIQRELLERVKMQLASFLEDPQYQDQHSLHTEIIKTFGRVGPNAEPRFRDEFVIPHLHKLALVNNLQIVDSKRLDIATHLFEAYSALSCCFISEDLMVNHFLPGLRCLRTDMEHLSPEHEVILSSMIKECEQKVENKTVQEPQGSMSIAASLVSEDTKTKFLNKMGQLTTSGAMLANVFQRKK

SEQ ID NO: 40257 - protein, 1507 aa, Homo sapiens
MASTYLRPVLCTLDTTAGEVAARLLQLGHKGGGVVKVLGQGPGAAAAREPAEPPPEAGPRLAPPEPRDSEVPPARSAPGAFGGPPRAPPADLPLPVGGPGGWSRRASPAPSDSSPGEPFVGGPVSSPRAPRPVVSDTESFSLSPSAESVSDRLDPYSSGGGSSSSSEELEADAASAPTGVPGQPRRPGHPAQPLPLPQTASSPQPQQKAPRAIDSPGGAVREGSCEEKAAAAVAPGGLQSTPGRSGVTAEKAPPPPPPPTLYVQLHGETTRRLEAEEKPLQIQNDYLFQLGFGELWRVQEEGMDSEIGCLIRFYAGKPHSTGSSERIQLSGMYNVRKGKMQLPVNRWTRRQVILCGTCLIVSSVKDSLTGKMHVLPLIGGKVEEVKKHQHCLAFSSSGPQSQTYYICFDTFTEYLRWLRQVSKVASQRISSVDLSCCSLEHLPANLFYSQDLTHLNLKQNFLRQNPSLPAARGLNELQRFTKLKSLNLSNNHLGDFPLAVCSIPTLAELNVSCNALRSVPAAVGVMHNLQTFLLDGNFLQSLPAELENMKQLSYLGLSFNEFTDIPEVLEKLTAVDKLCMSGNCVETLRLQALRKMPHIKHVDLRLNVIRKLIADEVDFLQHVTQLDLRDNKLGDLDAMIFNNIEVLHCERNQLVTLDICGYFLKALYASSNELVQLDVYPVPNYLSYMDVSRNRLENVPEWVCESRKLEVLDIGHNQICELPARLFCNSSLRKLLAGHNQLARLPERLERTSVEVLDVQHNQLLELPPNLLMKADSLRFLNASANKLESLPPATLSEETNSILQELYLTNNSLTDKCVPLLTGHPHLKILHMAYNRLQSFPASKMAKLEELEEIDLSGNKLKAIPTTIMNCRRMHTVIAHSNCIEVFPEVMQLPEIKCVDLSCNELSEVTLPENLPPKLQELDLTGNPRLVLDHKTLELLNNIRCFKIDQPSTGDASGAPAVWSHGYTEASGVKNKLCVAALSVNNFCDNREALYGVFDGDRNVEVPYLLQCTMSDILAEELQKTKNEEEYMVNTFIVMQRKLGTAGQKLGGAAVLCHIKHDPVDPGGSFTLTSANVGKCQTVLCRNGKPLPLSRSYIMSCEEELKRIKQHKAIITEDGKVNGVTESTRILGYTFLHPSVVPRPHVQSVLLTPQDEFFILGSKGLWDSLSVEEAVEAVRNVPDALAAAKKLCTLAQSYGCHDSISAVVVQLSVTEDSFCCCELSAGGAVPPPSPGIFPPSVNMVIKDRPSDGLGVPSSSSGMASEISSELSTSEMSSEVGSTASDEPPPGALSENSPAYPSEQRCMLHPICLSNSFQRQLSSATFSSAFSDNGLDSDDEEPIEGVFTNGSRVEVEVDIHCSRAKEKEKQQHLLQVPAEASDEGIVISANEDEPGLPRKADFSAVGTIGRRRANGSVAPQERSHNVIEVATDAPLRKPGGYFAAPAQPDPDDQFIIPPELEEEVKEIMKHHQEQQQQQQPPPPPQLQPQLPRHYQLDQLPDYYDTPL

SEQ ID NO: 40258 - protein, 2247 aa, Homo sapiens
MDSENKPENDEDEKINKEAQDLTKLSSHNEDGGPVSDVIASFPENSMGKRGFSESSNSDSVVIGEDRNKHASKRRKLDEAEPLKSGKQGICRLETSESSVTEGGIALDETGKETFLSDCTVGGTCLPNALSPSCNFSTIDVVSLKTDTEKTSAQEMVSLDLERESPFPPKEISVSCTIGNVDTVLKCSICGHLFSSCSDLEKHAESHMQQPKEHTCCHCSHKAESSSALHMHIKQAHGPQKVFSCDLCGFQCSEENLLNAHYLGKTHLRRQNLAARGGFVQILTKQPFPKKSRTMATKNVHSKPRTSKSIAKNSDSKGLRNVGSTFKDFRGSISKQSGSSSELLVEMMPSRNTLSQEVEIVEEHVTSLGLAQNPENQSRKLDTLVTSEGLLEKLESTKNTLQAAHGNSVTSRPRPERNILVLGNSFRRRSSTFTLKGQAKKRFNLLGIKRGTSETQRMYMKHLRTQMKTHDAESVLKHLEACSSVQRVCVTTSETQEAEQGQGSARPPDSGLHSLTVKPASGSQTLCACTDCGQVATNRTDLEIHVKRCHAREMKFYCRTCDFSSMSRRDLDEHLHSNQHQQTASVLSCQCCSFISLDEINLRDHMKEKHNMHFLCTPCNLFFLSEKDVEEHKATEKHINSLVQPKTLQSSNSDLVLQTLPLSTLESENAKESMDDSGKASQEEPLKSRVSHGNEVRHSSKPQFQCKKCFYKTRSSTVLTRHIKLRHGQDYHFLCKACNLYSLSKEGMEKHIKRSKHLENAKKNNIGLSFEECIERVCIGANDKKEEFDVSGNGRIEGHIGVQLQEHSYLEKGMLASEELSQSGGSTKDDELASTTTPKRGRPKGNISRTCSHCGLLASSITNLTVHIRRKHSHQYSYLCKVCKYYTVTKGDMERHCATKKHKGRVEIEASGKHSSDIIVGPEGGSLEAGKKNAGSAVTMSDEHANKPAESPTSVLEKPDRGNSIEAEVENVFHSLDGEVNSHLLDKKEQISSEPEDFAQPGDVYSQRDVTGTGENKCLHCEFSAHSSASLELHVKRKHTKEFEFYCMACDYYAVTRREMTRHAATEKHKMKRQSYLNSANVEAGSADMSKNIIMPEEEHQQNSEEFQIISGQPSDTLKSRNAADCSILNENTNLDMSKVLCAADSVEVETEEESNFNEDHSFCETFQQAPVKDKVRKPEEMMSLTMSSNYGSPSRFQNENSGSSALNCETAKKNHEISNDAGELRVHCEGEGGNAGDGGGVVPHRHLCPVTLDGERSAESPVLVVTRITREQGNLESGGQNRVARGHGLEDLKGVQEDPVLGNKEILMNSQHETEFILEEDGPASDSTVESSDVYETIISIDDKGQAMYSFGRFDSSIIRIKNPEDGELIDQSEEGLIATGVRISELPLKDCAQGVKKKKSEGSSIGESTRIRCDDCGFLADGLSGLNVHIAMKHPTKEKHFHCLLCGKSFYTESNLHQHLASAGHMRNEQASVEELPEGGATFKCVKCTEPFDSEQNLFLHIKGQHEELLREVNKYIVEDTEQINREREENQGNVCKYCGKMCRSSNSMAFLAHIRTHTGSKPFKCKICHFATAQLGDARNHVKRHLGMREYKCHVCGVAFVMKKHLNTHLLGKHGVGTPKERKFTCHLCDRSFTEKWALNNHMKLHTGEKPFKCTWPTCHYSFLTASAMKDHYRTHTGEKSFLCDLCGFAGGTRHALTKHRRQHTGEKPFKCDECNFASTTQSHLTRHKRVHTGEKPYRCPWCDYRSNCAENIRKHILHTGKHEGVKMYNCPKCDYGTNVPVEFRNHLKEQHPDIENPDLAYLHAGIVSKSYECRLKGQGATFVETDSPFTAAALAEEPLVKEKPLRSSRRPAPPPEQVQQVIIFQGYDGEFALDPSVEETAAATLQTLAMAGQVARVVHITEDGQVIATSQSGAHVGSVVPGPILPEQLADGATQVVVVGGSMEGHGMDESLSPGGAVIQQVTKQEILNLSEAGVAPPEASSALDALLCAVTELGEVEGRAGLEEQGRPGAKDVLIQLPGQEVSHVAADPEAPEIQMFPQAQESPAAVEVLTQVVHPSAAMASQERAQVAFKKMVQGVLQFAVCDTAAAGQLVKDGVTQVVVSEEGAVHMVAGEGAQIIMQEAQGEHMDLVESDGEISQIIVTEELVQAMVQESSGGFSEGTTHYILTELPPGVQDEPGLYSHTVLETADSQELLQAGATLGTEAGAPSRAEQLASVVIYTQEGSSAAAAIQSQRESSELQEA

SEQ ID NO: 40259 - protein, 99 aa, Homo sapiens
MWHPNIYETGDVCISILHPPVDDPQSGELPSERWNPTQNVRTILLSVISLLNEPNTFSPANVDASVMYRKWKESKGKDREYTDIIRRSWGPRWTRSVTA

SEQ ID NO: 40260 - protein, 214 aa, Homo sapiens
MASVQLNGAHLCGGVLVAEQWVLSAAHCLEDAADGKVQVLLGAHSLSQPEPSKRLYDVLRAVPHPDSQPDTIDHDLLLLQLSEKATLGPAVRPLPWQRVDRDVAPGTLCDVAGWGIVNHAGRRPDSLQHVLLPVLDRATCNRRTHHDGAITERLMCAESNRRDSCKGDSGGPLVCGGVLEGVVTSGSRVCGNRKKPGIYTRVASYAAWIDSVLA

SEQ ID NO: 40261 - protein, 141 aa, Homo sapiens
MLPAALLRRPGLGRLVRHARAYAEAAAAPAAASGPNQMSFTFASPTQVRALRVGTLRGRRPRSPGSPPPGRDPRFRAPGPARPGSRGYSALDPRPCLCCPSPALPSSRAPPRDKRLLGALPDLPGQSLGVAGSLHSHFADQ

SEQ ID NO: 40262 - protein, 270 aa, Homo sapiens
MTFPPRVIWGCTAQHDHGGRKRSGTSRLQVPVSACAPSRFGRRPREPGALRRTDLRGCLKAEAKMAVLSAPGLRGFRILGLRSSVGPAVQARGVHQSVATDGPSSTQPALPKARAVAPKPSSRGEYVVAKLDDLVNWARRSSLWPMTFGLACCAVEMMHMAAPRYDMDRFGVVFRASPRQSDVMIVAGTLTNKMAPALRKVYDQMPEPRYVVSMGSCANGGGYYHYSYSVVRGCDRIVPVDIYIPGRAGTAPPTRELETGPAPHGARRPL

SEQ ID NO: 40263 - protein, 529 aa, Homo sapiens
MGSLGQREDLQDEDRNSAFTWKVQANNRAYNGQFKEKVILCWQRKKYKTNVIRTAKYNFYSFLPLNLYEQFHRVSNLFFLIIIILQSIPDISTLPWFSLSTPMVCLLFIRATRDLVDDMGRHKSDRAINNRPCQILMGKSFKQKKWQDLCVGDVVCLRKDNIVPADMLLLASTEPSSLCYVETVDIDGETNLKFRQALMVTHKELATIKKMASFQGTVTCEAPNSRMHHFVGCLEWNDKKYSLDIGNLLLRGCRIRNTDTCYGLVIYAGFDTKIMKNCGKIHLKRTKLDLLMNKLVVVIFISVVLVCLVLAFGFGFSVKEFKDHHYYLSGVHGSSVAAESFFVFWSFLILLSVTIPMSMFILSEFIYLGNSVFIDWDVQMYYKPQDVPAKARSTSLNDHLGQVEYIFSDKTGTLTQNILTFNKCCISGRVYGAAPTPELPAGSSIFKGLRVPENQSHVWPHAQHLRPNLNQGTVARWPGFLWRGPGKFFFFFEAESHSVYPGRNAVVQSWLTAISTSQVQAILLAQPPE

SEQ ID NO: 40264 - protein, 418 aa, Homo sapiens [sequence omitted]

SEQ ID NO: 40265 - protein, 1203 aa, Homo sapiens [sequence omitted]

SEQ ID NO: 40266 - protein, 221 aa, Homo sapiens
MSLWPWDRACWPWRWREWRPWVTVWWCRLQENCAILKELVTLRAQKSRLLGFHTHADYVLEMNMAKTSQTVATFLDELAQKLKPLGEQERAVILELKRAECERRGLPFDGRIRAWDMRYYMNQVEETRYCVDQNLLKEYFPVQVVTHGLLGIYQELLGLAFHHEEGASAWHEDVRLYTARDAASGEVVGKFYLDLYPRWVRAAGAGGAPRPWVSSEPGVPV

SEQ ID NO: 40267 - protein, 353 aa, Homo sapiens [sequence omitted]

SEQ ID NO: 40268 - protein, 207 aa, Homo sapiens
MVHKRINLAEDVLAWEHERFAIRRLPAFTLSHLESHRDGQRSSIMDVRSRVDSKTLTRNTRIIAEALTRVIYNLTEKGTPPDMPVFTEQMIQQEQLDSVMDWLTNQPRAAQLVDKDSTFLSTLEHHLSRYLKDVKQHHVKADKRDPEFVFYDQLKQVMNAYRVKPAVFDLLLAVGIAAYLGMAYVAVQHFSLLYKTVQRLLVKAKTQ

SEQ ID NO: 40269 - protein, 443 aa, Homo sapiens
MWFTYLLLYLHSVRAYSSRGAGLLLLLGQVADGLCTPLVGYEADRAASCCARYGPRKAWHLVGTVCVLLSFPFIFSPCLGCGAATPEWAALLYYGPFIVIFQFGWASTQISHLSLIPELVTNDHEKVELTALRYAFTVVANITVYGAAWLLLHLQGSSRVEPTQDISISDQLGGQDVPVFRNLSLLVVGVGAVFSLLFHLGTRERRRPHAEEPGEHTPLLAPATAQPLLLWKHWLREPAFYQVGILYMTTRLIVNLSQTYMAMYLTYSLHLPKKFIATIPLVMYLSGFLSSFLMKPINKCIGRNMTYFSGLLVILAFAAWVALAEGLGVAVYAAAVLLGAGCATILVTSLAMTADLIGPHTNSGAFVYGSMSFLDKVANGLAVMAIQSLHPCPSELCCRACVSFYHWAMVAVTGGVGVAAALCLCSLLLWPTRLRRWDRDARP

SEQ ID NO: 40270 - protein, 690 aa, Homo sapiens
MRSRSPPRPKWHSRDGSSQSDSGEEQSRGQWARRRRRARSWSPSSSASSSASPGRSQSPRAAAAALSQQQSLQERLRLREERKQQEELMKAFETPEEKRARRLAKKEAKERKKREKMGWGEEYMGYTNTDNPFGDNNLLGTFIWNKALEKKGISHLEEKELKERNKRIQEDNRLELQKVKQLRLEREREKAMREQELEMLQREKEAEHFKTWEEQEDNFHLQQAKLRSKIRIRDGRAKPIDLLAKYISAEDDDLAVEMHEPYTFLNGLTVADMEDLLEDIQVYMELEQGKNADFWRDMTTITEDEISKLRKLEASGKGPGERREGVNASVSSDVQSVFKGKTYNQLQVIFQGIEGKIRAGGPNLDMGYWESLLQQLRAHMARARLRERHQDVLRQKLYKLKQEQGVESEPLFPILKQEPQSPSRSLEPEDAAPTPPGPSSEGGPAEAEVDGATPTEGDGDGDGEGEGEGEAVLMEEDLIQQSLDDYDAGRYSPRLLTAHELPLDAHVLEPDEDLQRLQLSRQQLQVTGDASESAEDIFFRRAKEGMGQDEAQFSVEMPLTGKAYLWADKYRPRKPRFFNRVHTGFEWNKYNQTHYDFDNPPPKIVQGYKFNIFYPDLIDKRSTPEYFLEACADNKDFAILRFHAGPPYEDIAFKIVNREWEYSHRHGFRCQFANGIFQLWFHFKRYRYRR

SEQ ID NO: 40271 - protein, 46 aa, Homo sapiens
MKELPEQLQEHAIEDKETINNLDTSSSDFTILQEIEEPSLEPGTVK

SEQ ID NO: 40272 - protein, 239 aa, Homo sapiens
MAPLLPSLPLHLHTSLCLRLCLSLSLSAWLSWSLPLCVSLSASYPAWRLLPQLHGRSREQRYTKLADWQYIEECVQAASPMPLFGNGDILSFEDANRAMQTGVTGIMIARGALLKPWLFTEIKEQRHWDISSSERLDILRDFTNYGLEHWGSDTQGVEKTRRFLLEWLSFLCRYVPVGLLERLPQRINERPPYYLGRDYLETLMASQKAADWIRISEMLLGPVPPSFAFLPKHKANAYK

SEQ ID NO: 40273 - protein, 531 aa, Homo sapiens
MSPCDKFRAKGRKPCKLMLQVVKILVVTVQLILFGLSNQLAVTFREENTIAFRHLFLLGYSDGADDTFAAYTREQLYQAIFHAVDQYLALPDVSLGRYAYVRGGGDPWTNGSGLALCQRYYHRGHVDPANDTFDIDPMVVTDCIQVDPPERPPPPPSDDLTLLESSSSYKNLTLKFHKLVNVTIHFRLKTINLQSLINNEIPDCYTFSVLITFDNKAHSGRIPISLETQAHIQECKHPSVFQHGDNSFRLLFDVVVILTCSLSFLLCARSLLRGFLLQNEFVGFMWRQRGRVISLWERLEFVNGWYILLVTSDVLTISGTIMKIGIEAKNLASYDVCSILLGTSTLLVWVGVIRYLTFFHNYNILIATLRVALPSVMRFCCCVAVIYLGYCFCGWIVLGPYHVKFRSLSMVSECLFSLINGDDMFVTFAAMQAQQGRSSLVWLFSQLYLYSFISLFIYMVLSLFIALITGAYDTIKHPGGAGAEESELQAYIAQCQDSPTSGKFRRGSGSACSLLCCCGRDPSEEHSLLVN

SEQ ID NO: 40274 - protein, 459 aa, Homo sapiens
MVEDYLASGYQDSVTFDDVAVDFTPEEWALLDTTEKYLYRDVMLENYMNLASVEWEIQPRTKRSSLQQGFLKNQIFSGIQMTRGYSGWKLCDCKNCGEVFREQFCLKTHMRVQNGGNTSEGNCYGKDTLSVHKEASTGQELSKFNPCGKVFTLTPGLAVHLEVLNARQPYKCKECGKGFKYFASLDNHMGIHTDEKLCEFQEYGRAVTASSHLKQCVAVHTGKKSKKTKKCGKSFTNFSQLYAPVKTHKGEKSFECKECGRSFRNSSCLNDHIQIHTGIKPHKCTYCGKAFTRSTQLTEHVRTHTGIKPYECKECGQAFAQYSGLSIHIRSHSGKKPYQCKECGKAFTTSTSLIQHTRIHTGEKPYECVECGKTFITSSRRSKHLKTHSGEKPFVCKICGKAFLYSSRLNVHLRTHTGEKPFVCKECGKAFAVSSRLSRHERIHTGEKPYECKDMSVTI

SEQ ID NO: 40275 - protein, 149 aa, Homo sapiens [sequence omitted]

SEQ ID NO: 40276 - protein, 186 aa, Homo sapiens
MRAQQSAVRLTEIGPRMTLQLIKVQEGVGEGKVMFHSFVSKTEEELQAILEAKEKKLRLKAQRQAQQAQNVQRKQEQREAHRKKSLEGMKKARVGGSDEEASGIPSRTASLELDLFPEAKQKRLAKSPGRKRKRWEMDRGRGRLCDQKFPKTKDKSQGAQARRGPRGASRDGGRGRGRGRPGKRVA

SEQ ID NO: 40277 - protein, 1678 aa, Homo sapiens
MAGSVPSFCTGYRLSPFGTSPPPPRPDWGGRRRLRSSPLPIGFRAKSRGACAAAAASAEASEMPARTAPARVPTLAVPAISLPDDVRRRLKDLERDSLTEKECVKEKLNLLHEFLQTEIKNQLCDLETKLRKEELSEEGYLAKVKSLLNKDLSLENGAHAYNREVNGRLENGNQARSEARRVGMADANSPPKPLSKPRTPRRSKSDGEAKPEPSPSPRITRKSTRQTTITSHFAKGPAKRKPQEESERAKSDESIKEEDKDQDEKRRRVTSRERVARPLPAEEPERAKSGTRTEKEEERDEKEEKRLRSQTKEPTPKQKLKEEPDREARAGVQADEDEDGDEKDEKKHRSQPKDLAAKRRPEEKEPEKVNPQISDEKDEDEKEEKRRKTTPKEPTEKKMARAKTVMNSKTHPPKCIQCGQYLDDPDLKYGQHPPDAVDEPQMLTNEKLSIFDANESGFESYEALPQHKLTCFSVYCKHGHLCPIDTGLIEKNIELFFSGSAKPIYDDDPSLEGGVNGKNLGPINEWWITGFDGGEKALIGFSTSFAEYILMDPSPEYAPIFGLMQEKIYISKIVVEFLQSNSDSTYEDLINKIETTVPPSGLNLNRFTEDSLLRHAQFVVEQVESYDEAGDSDEQPIFLTPCMRDLIKLAGVTLGQRRAQARRQTIRHSTREKDRGPTKATTTKLVYQIFDTFFAEQIEKDDREDKENAFKRRRCGVCEVCQQPECGKCKACKDMVKFGGSGRSKQACQERRCPNMAMKEADDDEEVDDNIPEMPSPKKMHQGKKKKQNKNRISWVGEAVKTDGKKSYYKKVCIDAETLEVGDCVSVIPDDSSKPLYLARVTALWEDSSNGQMFHAHWFCAGTDTVLGATSDPLELFLVDECEDMQLSYIHSKVKVIYKAPSENWAMEGGMDPESLLEGDDGKTYFYQLWYDQDYARFESPPKTQPTEDNKFKFCVSCARLAEMRQKEIPRVLEQLEDLDSRVLYYSATKNGILYRVGDGVYLPPEAFTFNIKLSSPVKRPRKEPVDEDLYPEHYRKYSDYIKGSNLDAPEPYRIGRIKEIFCPKKSNGRPNETDIKIRVNKFYRPENTHKSTPASYHADINLLYWSDEEAVVDFKAVQGRCTVEYGEDLPECVQVYSMGGPNRFYFLEAYNAKSKSFEDPPNHARSPGNKGKGKGKGKGKPKSQACEPSEPEIEIKLPKLRTLDVFSGCGGLSEGFHQAGISDTLWAIEMWDPAAQAFRLNNPGSTVFTEDCNILLKLVMAGETTNSRGQRLPQKGDVEMLCGGPPCQGFSGMNRFNSRTYSKFKNSLVVSFLSYCDYYRPRFFLLENVRNFVSFKRSMVLKLTLRCLVRMGYQCTFGVLQAGQYGVAQTRRRAIILAAAPGEKLPLFPEPLHVFAPRACQLSVVVDDKKFVSNITRLSSGPFRTITVRDTMSDLPEVRNGASALEISYNGEPQSWFQRQLRGAQYQPILRDHICKDMSALVAARMRHIPLAPGSDWRDLPNIEVRLSDGTMARKLRYTHHDRKNGRSSSGALRGVCSCVEAGKACDPAARQFNTLIPWCLPHTGNRHNHWAGLYGRLEWDGFFSTTVTNPEPMGKQGRVLHPEQHRVVSVRECARSQGFPDTYRLFGNILDKHRQVGNAVPPPLAKAIGLEIKLCMLAKARESASAKIKEEEAAKD

SEQ ID NO: 40278 - protein, 228 aa, Homo sapiens
MATMVPSVLWPRACWTLLVCCLLTPGVQGQEFLLRVEPQNPVLSAGGSLFVNCSTDCPSSEKIALETSLSKELVASGMGWAAFNLSNVTGNSRILCSVYCNGSQITGSSNITVYRLPERVELAPLPPWQPVGQNFTLRCQVEDGSPRTSLTVVLLRWEEELSRQPAVEEPAEVTATVLASRDDHGAPFSCRTELDMQPQGLGLFVNTSAPRQLRTFGERRGFRRWVTS

SEQ ID NO: 40279 - protein, 593 aa, Homo sapiens [sequence omitted]

SEQ ID NO: 40280 - protein, 523 aa, Homo sapiens [sequence omitted]

SEQ ID NO: 40281 - protein, 108 aa, Homo sapiens [sequence omitted]

SEQ ID NO: 40282 - protein, 703 aa, Homo sapiens [sequence omitted]

SEQ ID NO: 40283 - protein, 895 aa, Homo sapiens [sequence omitted]

SEQ ID NO: 40284 - protein, 699 aa, Homo sapiens [sequence omitted]

SEQ ID NO: 40285 - protein, 891 aa, Homo sapiens [sequence omitted]

SEQ ID NO: 40286 - protein, 865 aa, Homo sapiens
MEELIPLVNKLQDAFSSIGQSCHLDLPQIAVVGGQSAGKSSVLENFVGRDFLPRGSGIVTRRPLILQLIFSKTEHAEFLHCKSKKFTDFDEVRQEIEAETDRVTGTNKGISPVPINLRVYSPHVLNLTLIDLPGITKVPVGDQPPDIEYQIKDMILQFISRESSLILAVTPANMDLANSDALKLAKEVDPQGLRTIGVITKLDLMDEGTDARDVLENKLLPLRRGYIGVVNRSQKDIEGKKDIRAALAAERKFFLSHPAYRHMADRMGTPHLQKTLNQQLTNHIRESLPALRSKLQSQLLSLEKEVEEYKNFRPDDPTRKTKALLQMVQQFGVDFEKRIEGSGDQVDTLELSGGARINRIFHERFPFELVKMEFDEKDLRREISYAIKNIHGVRTGLFTPDLAFEAIVKKQVVKLKEPCLKCVDLVIQELINTVRQCTSKLSSYPRLREETERIVTTYIREREGRTKDQILLLIDIEQSYINTNHEDFIGFANAQQRSTQLNKKRAIPNQGEILVIRRGWLTINNISLMKGGSKEYWFVLTAESLSWYKDEEEKEKKYMLPLDNLKIRDVEKGFMSNKHVFAIFNTEQRNVYKDLRQIELACDSQEDVDSWKASFLRAGVYPEKDQAENEDGAQENTFSMDPQLERQVETIRNLVDSYVAIINKSIRDLMPKTIMHLMINNTKAFIHHELLAYLYSSADQSSLMEESADQAQRRDDMLRMYHALKEALNIIGDISTSTVSTPVPPPVDDTWLQSASSHSPTPQRRPVSSIHPPGRPPAVRGPTPGPPLIPVPVGAAASFSAPPIPSRPGPQSVFANSDLFPAPPQIPSRPVRIPPGIPPGVPSRRPPAAPSRPTIIRPAEPSLLD

SEQ ID NO: 40287 - protein, 865 aa, Homo sapiens
MEELIPLVNKLQDAFSSIGQSCHLDLPQIAVVGGQSAGKSSVLENFVGRDFLPRGSGIVTRRPLILQLIFSKTEHAEFLHCKSKKFTDFDEVRQEIEAETDRVTGTNKGISPVPINLRVYSPHVLNLTLIDLPGITKVPVGDQPPDIEYQIKDMILQFISRESSLILAVTPANMDLANSDALKLAKEVDPQGLRTIGVITKLDLMDEGTDARDVLENKLLPLRRGYIGVVNRSQKDIEGKKDIRAALAAERKFFLSHPAYRHMADRMGTPHLQKTLNQQLTNHIRESLPALRSKLQSQLLSLEKEVEEYKNFRPDDPTRKTKALLQMVQQFGVDFEKRIEGSGDQVDTLELSGGARINRIFHERFPFELVKMEFDEKDLRREISYAIKNIHGVRTGLFTPDMAFEAIVKKQIVKLKEPSLKCVDLVVSELATVIKKCAEKLSSYPRLREETERIVTTYIREREGRTKDQILLLIDIEQSYINTNHEDFIGFANAQQRSTQLNKKRAIPNQGEILVIRRGWLTINNISLMKGGSKEYWFVLTAESLSWYKDEEEKEKKYMLPLDNLKIRDVEKGFMSNKHVFAIFNTEQRNVYKDLRQIELACDSQEDVDSWKASFLRAGVYPEKDQAENEDGAQENTFSMDPQLERQVETIRNLVDSYVAIINKSIRDLMPKTIMHLMINNTKAFIHHELLAYLYSSADQSSLMEESADQAQRRDDMLRMYHALKEALNIIGDISTSTVSTPVPPPVDDTWLQSASSHSPTPQRRPVSSIHPPGRPPAVRGPTPGPPLIPVPVGAAASFSAPPIPSRPGPQSVFANSDLFPAPPQIPSRPVRIPPGIPPGVPSRRPPAAPSRPTIIRPAEPSLLD

SEQ ID NO: 40288 - protein, 226 aa, Homo sapiens
MAAGAALALALWLLMPPVEVGGAGPPPIQDGEFTFLLPAGRKQCFYQSAPANASLETEYQVIGGAGLDVDFTLESPQGVLLVSESRKADGVHTVEPTEAGDYKLCFDNSFSTISEKLVFFELIFDSLQDDEEVEGWAEAVEPEEMLDVKMEDIKESIETMRTRLERSIQMLTLLRAFEARDRNLQEGNLERVNFWSAVNVAVLLLVAVLQVCTLKRFFQDKRPVPT

SEQ ID NO: 40289 - protein, 123 aa, Homo sapiens [sequence omitted]

SEQ ID NO: 40290 - protein, 1123 aa, Homo sapiens
MRRLMAEDEEGYRKLIDQKKDKRLAYLLQQTDEYVANLTELVRQHKAAQVAKEKKKKKKKKAENAEGQTPAIGPDGEPLDETSQMSDLPVKVIHVESGKILTGTDAPKAGQLEAWLEMNPGYEVAPRSDSEESGSEEEEEEEEEEQPQAAQPPTLPVEEKKKIPDPDSDDVSEVDARHIIENAKQDVDDEYGVSQALARGLQSYYAVAHAVTERVDKQSALMVNGVLKQYQIKGLEWLVSLYNNNLNGILADEMGLGKTIQTIALITYLMEHKRINGPFLIIVPLSTLSNWAYEFDKWAPSVVKVSYKGSPAARRAFVPQLRSGKFNVLLTTYEYIIKDKHILAKIRWKYMIVDEGHRMKNHHCKLTQVLNTHYVAPRRLLLTGTPLQNKLPELWALLNFLLPTIFKSCSTFEQWFNAPFAMTGEKVDLNEEETILIIRRLHKVLRPFLLRRLKKEVEAQLPEKVEYVIKCDMSALQRVLYRHMQAKGVLLTDGSEKDKKGKGGTKTLMNTIMQLRKICNHPYMFQHIEESFSEHLGFTGGIVQGLDLYRASGKFELLDRILPKLRATNHKVLLFCQMTSLMTIMEDYFAYRGFKYLRLDGTTKAEDRGMLLKTFNEPGSEYFIFLLSTRAGGLGLNLQSADTVIIFDSDWNPHQDLQAQDRAHRIGQQNEVRVLRLCTVNSVEEKILAAAKYKLNVDQKVIQAGMFDQKSSSHERRAFLQAILEHEEQDESRHCSTGSGSASFAHTAPPPAGVNPDLEEPPLKEEDEVPDDETVNQMIARHEEEFDLFMRMDLDRRREEARNPKRKPRLMEEDELPSWIIKDDAEVERLTCEEEEEKMFGRGSRHRKEVDYSDSLTEKQWLKTLKAIEEGTLEEIEEEVRQKKSSRKRKRDSDAGSSTPTTSTRSRDKDDESKKQKKRGRPPAEKLSPNPPNLTKKMKKIVDAVIKYKDSSSGRQLSEVFIQLPSRKELPEYYELIRKPVDFKKIKERIRNHKYRSLNDLEKDVMLLCQNAQTFNLEGSLIYEDSIVLQSVFTSVRQKIEKEDDSEGEESEEEEEGEEEGSESESRSVKVKIKLGRKEKAQDRLKGGRRRPSRGSRAKPVVSDDDSEEEQEEDRSGSGSEED

SEQ ID NO: 40291 - protein, 44 aa, Homo sapiens
MAEPSFGGFWSAWSEPVSLLTPSGEAPGGGVGGARANHGASPPP

SEQ ID NO: 40292 - protein, 988 aa, Homo sapiens [sequence omitted]

SEQ ID NO: 40293 - protein, 979 aa, Homo sapiens
MRIRRAPPPPPVARFHIPPPALPSPRLRGRGWRSWRGPRTWAGVDRRPPPVRRGRSRRHAATAASGAPPGSHTEPQRPSADPGPYLRSLPCAMDWQPDEQGLQQVLQLLKDSQSPNTATQRIVQDKLKQLNQFPDFNNYLIFVLTRLKSEDEPTRSLSGLILKNNVKAHYQSFPPPVADFIKQECLNNIGDASSLIRATIGILITTIASKGELQMWPELLPQLCNLLNSEDYNTCEGAFGALQKICEDSSELLDSDALNRPLNIMIPKFLQFFKHCSPKIRSHAIACVNQFIMDRAQALMDNIDTFIEHLFALAVDDDPEVRKNVCRALVMLLEVRIDRLIPHMHSIIQYMLQRTQDHDENVALEACEFWLTLAEQPICKEVLASHLVQLIPILVNGMKYSEIDIILLKGDVEEDEAVPDSEQDIKPRFHKSRTVTLPHEAERPDGSEDAEDDDDDDALSDWNLRKCSAAALDVLANVFREELLPHLLPLLKGLLFHPEWVVKESGILVLGAIAEGCMQGMVPYLPELIPHLIQCLSDKKALVRSIACWTLSRYAHWVVSQPPDMHLKPLMTELLKRILDGNKRVQEAACSAFATLEEEACTELVPYLSYILDTLVFAFGKYQHKNLLILYDAIGTLADSVGHHLNQPEYIQKLMPPLIQKWNELKDEDKDLFPLLECLSSVATALQSGFLPYCEPVYQRCVTLVQKTLAQAMMYTQHPEQYEAPDKDFMIVALDLLSGLAEGLGGHVEQLVARSNIMTLLFQCMQDSMPEVRQSSFALLGDLTKACFIHVKPCIAEFMPILGTNLNPEFISVCNNATWAIGEICMQMGAEMQPYVQMVLNNLVEIINRPNTPKTLLENTAITIGRLGYVCPQEVAPMLQQFIRPWCTSLRNIRDNEEKDSAFRGICMMIGVNPGGVVQDFIFFCDAVASWVSPKDDLRDMFYKILHGFKDQVGEDNWQQFSEQFPPLLKERLAAFYGV

SEQ ID NO: 40294 - protein, 59 aa, Homo sapiens
MLLSVPLLLGLLGLAVAEPAVYFKEQFLDGGNAWSRLEAAPTTRPAPDPGSALSPVITV

SEQ ID NO: 40295 - protein, 211 aa, Homo sapiens
MAVTITLKTLQQQTFKIRMEPDETVKVLKEKIEAEKGRDAFPVAGQKLIYAGKILSDDVPIRDYRIDEKNFVVVMVTKTKAGQGTSAPPEASPTAAPESSTSFPPAPTSGMSHPPPAAREDKSPSEESAPTTSPESVSGSVPSSGSSGREEDAASTLVTGSEYETMLTEIMSMGYERERVVAALRASYNNPHRAVEYLLTVRWGFRLPGRP

SEQ ID NO: 40296 - protein, 623 aa, Homo sapiens
MENGTGPYGEERPREVQETTVTEGAAKIAFPSANEVFYNPVQEFNRDLTCAVITEFARIQLGAKGIQIKVPGEKDTQKVVVDLSEQEEEKVELKESENLASGDQPRTAAVGEICEEGLHVLEGLAASGLRSIRFALEVPGLRSVVANDASTRAVDLIRRNVQLNDVAHLVQPSQADARMLMYQHQRVSERFDVIDLDPYGSPATFLDAAVQAVSEGGLLCVTCTDMAVLAGNSGETCYSKYGAMALKSRACHEMALRIVLHSLDLRANCYQRFVVPLLSISADFYVRVFVRVFTGQAKVKASASKQALVFQCVGCGAFHLQRLGKASGVPSGRAKFSAACGPPVTPECEHCGQRHQLGGPMWAEPIHDLDFVGRVLEAVSANPGRFHTSERIRGVLSVITEELPDVPLYYTLDQLSSTIHCNTPSLLQLRSALLHADFRVSLSHACKNAVKTDAPASALWDIMRCWEKECPVKRERLSETSPAFRILSVEPRLQANFTIREDANPSSRQRGLKRFQANPEANWGPRPRARPGGKAADEAMEERRRLLQNKRKEPPEDVAQRAARLKTFPCKRFKEGTCQRGDQCCYSHSPPTPRVSADAAPDCPETSNQTPPGPGAAAGPGID

SEQ ID NO: 40297 - protein, 376 aa, Homo sapiens
MVRRRHGPEPERTRAELEKLIQQRAVLRVSYKGSISYRNAARVQPPRRGATPPAPPAPPQQQQPPPPQPQPPPEGGAVRAGGAARPVSLREVVRYLGGSGGAGGRLTRGRVQGLLEEEAAARGRLERTRLGALALPRGDRPGRAPPAASARPSRSKRGGEERVLEKEEEEDDDEDEDEEDDVSEGSEVPESDRPAGAQHHQLNGERGPQSAKERVKEWTPCGPHQGQDEGRGPAPGSGTRQVFSMAAMNKEGGTASVATGPDSPSPVPLPPGKPALPGADGTPFGCPPGRKEKPSDPVEWTVMDVVEYFTEAGFPEQATAFQEQEIDGKSLLLMQRTDVLTGLSIRLGPALKIYEHHIKVLQQGHFEDDDPDGFLG

SEQ ID NO: 40298 - protein, 2307 aa, Homo sapiens
MSPPPPPPPVRALPLLLLLAGPGAAAPPCLDGSPCANGGRCTQLPSREAACLCPPGWVGERCQLEDPCHSGPCAGRGVCQSSVVAGTARFSCRCPRGFRGPDCSLPDPCLSSPCAHGARCSVGPDGRFLCSCPPGYQGRSCRSDVDECRVGEPCRHGGTCLNTPGSFRCQCPAGYTGPLCENPAVPCAPSPCRNGGTCRQSGDLTYDCACLPGFEGQNCEVNVDDCPGHRCLNGGTCVDGVNTYNCQCPPEWTGQFCTEDVDECQLQPNACHNGGTCFNTLGGHSCVCVNGWTGESCSQNIDDCATAVCFHGATCHDRVASFYCACPMGKTGLLCHLDDACVSNPCHEDAICDTNPVNGRAICTCPPGFTGGACDQDVDECSIGANPCEHLGRCVNTQGSFLCQCGRGYTGPRCETDVNECLSGPCRNQATCLDRIGQFTCICMAGFTGTYCEVDIDECQSSPCVNGGVCKDRVNGFSCTCPSGFSGSTCQLDVDECASTPCRNGAKCVDQPDGYECRCAEGFEGTLCDRNVDDCSPDPCHHGRCVDGIASFSCACAPGYTGTRCESQVDECRSQPCRHGGKCLDLVDKYLCRCPSGTTGVNCEVNIDDCASNPCTFGVCRDGINRYDCVCQPGFTGPLCNVEINECASSPCGEGGSCVDGENGFRCLCPPGSLPPLCLPPSHPCAHEPCSHGICYDAPGGFRCVCEPGWSGPRCSQSLARDACESQPCRAGGTCSSDGMGFHCTCPPGVQGRQCELLSPCTPNPCEHGGRCESAPGQLPVCSCPQGWQGPRCQQDVDECAGPAPCGPHGICTNLAGSFSCTCHGGYTGPSCDQDINDCDPNPCLNGGSCQDGVGSFSCSCLPGFAGPRCARDVDECLSNPCGPGTCTDHVASFTCTCPPGYGGFHCEQDLPDCSPSSCFNGGTCVDGVNSFSCLCRPGYTGAHCQHEADPCLSRPCLHGGVCSAAHPGFRCTCLESFTGPQCQTLVDWCSRQPCQNGGRCVQTGAYCLCPPGWSGRLCDIRSLPCREAAAQIGVRLEQLCQAGGQCVDEDSSHYCVCPEGRTGSHCEQEVDPCLAQPCQHGGTCRGYMGGYMCECLPGYNGDNCEDDVDECASQPCQHGGSCIDLVARYLCSCPPGTLGVLCEINEDDCGPGPPLDSGPRCLHNGTCVDLVGGFRCTCPPGYTGLRCEADINECRSGACHAAHTRDCLQDPGGGFRCLCHAGFSGPRCQTVLSPCESQPCQHGGQCRPSPGPGGGLTFTCHCAQPFWGPRCERVARSCRELQCPVGVPCQQTPRGPRCACPPGLSGPSCRSFPGSPPGASNASCAAAPCLHGGSCRPAPLAPFFRCACAQGWTGPRCEAPAAAPEVSEEPRCPRAACQAKRGDQRCDRECNSPGCGWDGGDCSLSVGDPWRQCEALQCWRLFNNSRCDPACSSPACLYDNFDCHAGGRERTCNPVYEKYCADHFADGRCDQGCNTEECGWDGLDCASEVPALLARGVLVLTVLLPPEELLRSSADFLQRLSAILRTSLRFRLDAHGQAMVFPYHRPSPGSEPRARRELAPEVIGSVVMLEIDNRLCLQSPENDHCFPDAQSAADYLGALSAVERLDFPYPLRDVRGEPLEPPEPSVPLLPLLVAGAVLLLVILVLGVMVARRKREHSTLWFPEGFSLHKDVASGHKGRREPVGQDALGMKNMAKGESLMGEVATDWMDTECPEAKRLKVEEPGMGAEEAVDCRQWTQHHLVAADIRVAPAMALTPPQGDADADGMDVNVRGPDGFTPLMLASFCGGALEPMPTEEDEADDTSASIISDLICQGAQLGARTDRTGETALHLAARYARADAAKRLLDAGADTNAQDHSGRTPLHTAVTADAQGVFQILIRNRSTDLDARMADGSTALILAARLAVEGMVEELIASHADVNAVDELGKSALHWAAAVNNVEATLALLKNGANKDMQDSKEETPLFLAAREGSYEAAKLLLDHFANREITDHLDRLPRDVAQERLHQDIVRLLDQPSGPRSPPGPHGLGPLLCPPGAFLPGLKAAQSGSKKSRRPPGKAGLGPQGPRGRGKKLTLACPGPLADSSVTLSPVDSLDSPRPFGGPPASPGGFPLEGPYAAATATAVSLAQLGGPGRAGLGRQPPGGCVLSLGLLNPVAVPLDWARLPPPAPPGPSFLLPLAPGPQLLNPGTPVSPQERPPPYLAVPGHGEEYPAAGAHSSPPKARFLRVPSEHPYLTPSPESPEHWASPSPPSLSDWSESTPSPATATGAMATTTGALPAQPLPLSVPSSLAQAQTQLGPQPEVTPKRQVLA

SEQ ID NO: 40299 - protein, 925 aa, Homo sapiens
MPLPPDDQELRNVIDKLAQFVARNGPEFEKMTMEKQKDNPKFSFLFGGEFYSYYKCKLALEQQQLICKQQTPELEPAATMPPLPQPPLAPAAPIPPAQGAPSMDELIQQSQWNLQQQEQHLLALRQEQVTAAVAHAVEQQMQKLLEETQLDMNEFDNLLQPIIDTCTKDAISAGKNWMFSNAKSPPHCELMAGHLRNRITADGAHFELRLHLIYLINDVLHHWALTRGKSLPHSQRKQARELLAALQKVVVPIYCTSFLAVEEDKQQKIARLLQLWEKNGYFDDSIIQQLQSPALGLGQYQATLINEYSSVVQPVQLAFQQQIQTLKTQHEEFVTSLAQQQQQQQQQQQQLQMPQMEAEVKATPPPPAPPPAPAPAPAIPPTTQPDDSKPPIQMPGSSEYEAPGGVQDPAAAGPRGPGPHDQIPPNKPPWFDQPHPVAPWGQQQPPEQPPYPHHQGGPPHCPPWNNSHEGMWGEQRGDPGWNGQRDAPWNNQPDAAWNSQFEGPWNSQHEQPPWGGGQREPPFRMQRPPHFRGPFPPHQQHPQFNQPPHPHNFNRFPPRFMQDDFPPRHPFERPPYPHRFDYPQGDFPAEMGPPHHHPGHRMPHPGINEHPPWAGPQHPDFGPPPHGFNGQPPHMRRQGPPHINHDDPSLVPNVPYFDLPAGLMAPLVKLEDHEYKPLDPKDIRLPPPMPPSERLLAAVEAFYSPPSHDRPRNSEGWEQNGLYEFFRAKMRARRRKGQEKRNSGPSRSRSRSKSRGRSSSRSNSRSSKSSGSYSRSRSRSCSRSYSRSRSRSRSRSRSSRSRSRSQSRSRSKSYSPGRRRRSRSRSPTPPSSAGLGSNSAPPIPDSRLGEENKGHQMLVKMGWSGSGGLGAKEQGIQDPIKGGDVRDKWDQYKGVGVALDDPYENYRRNKSYSFIARMKARDECK

SEQ ID NO: 40300 - protein, 914 aa, Homo sapiens
MPLPPDDQELRNVIDKLAQFVARNGPEFEKMTMEKQKDNPKFSFLFGGEFYSYYKCKLALEQQQLICKQQTPELEPAATMPPLPQPPLAPAAPIPPAQGAPSMDELIQQSQWNLQQQEQHLLALRQEQVTAAVAHAVEQQMQKLLEETQLDMNEFDNLLQPIIDTCTKDAISAGKNWMFSNAKSPPHCELMAGHLRNRITADGAHFELRLHLIYLINDVLHHCQRKQARELLAALQKVVVPIYCTSFLAVEEDKQQKIARLLQLWEKNGYFDDSIIQQLQSPALGLGQYQATLINEYSSVVQPVQLAFQQQIQTLKTQHEEFVTSLAQQQQQQQQQQQQLQMPQMEAEVKATPPPPAPPPAPAPAPAIPPTTQPDDSKPPIQMPGSSEYEAPGGVQDPAAAGPRGPGPHDQIPPNKPPWFDQPHPVAPWGQQQPPEQPPYPHHQGGPPHCPPWNNSHEGMWGEQRGDPGWNGQRDAPWNNQPDAAWNSQFEGPWNSQHEQPPWGGGQREPPFRMQRPPHFRGPFPPHQQHPQFNQPPHPHNFNRFPPRFMQDDFPPRHPFERPPYPHRFDYPQGDFPAEMGPPHHHPGHRMPHPGINEHPPWAGPQHPDFGPPPHGFNGQPPHMRRQGPPHINHDDPSLVPNVPYFDLPAGLMAPLVKLEDHEYKPLDPKDIRLPPPMPPSERLLAAVEAFYSPPSHDRPRNSEGWEQNGLYEFFRAKMRARRRKGQEKRNSGPSRSRSRSKSRGRSSSRSNSRSSKSSGSYSRSRSRSCSRSYSRSRSRSRSRSRSSRSRSRSQSRSRSKSYSPGRRRRSRSRSPTPPSSAGLGSNSAPPIPDSRLGEENKGHQMLVKMGWSGSGGLGAKEQGIQDPIKGGDVRDKWDQYKGVGVALDDPYENYRRNKSYSFIARMKARDECK

SEQ ID NO: 40301 - protein, 51 aa, Homo sapiens
MPSLHSSIPDDFKNVFDQKTDNLPRKSKLVVGGKVFAEVCMVSQPRPCFQR

SEQ ID NO: 40302 - protein, 284 aa, Homo sapiens [sequence omitted]

SEQ ID NO: 40303 - protein, 159 aa, Homo sapiens
MEVAEPSSPTEEEEEEEEHSAEPRPRTRSNPEGAEDRAVGAQASVGSRSEGEGEAASADDGSLNTSGAGPKSWQVPPPAPEVQIRTPRVNCPEKVIICLDLSEEMSLPKLESFNGSKTNALNVSQKMIEMFVRTKHKIDKSHEFALVVVNDDTAWPAEN

SEQ ID NO: 40304 - protein, 1138 aa, Homo sapiens
MNHVYRERFPKATAQMEGRLQEFLTAYAPGARLALADGVLGFIHHQIVELARDCLAKSGENLVTSRYFLEMQEKLERLLQDAHERSDSEEVSFIVQLVRKLLIIISRPARLLECLEFDPEEFYHLLEAAEGHAREGQGIKTDLPQYIIGQLGLAKDPLEEMVPLSHLEEEQPPAPESPESRALVGQSRRKPCESDFETIKLISNGAYGAVYLVRHRDTRQRFAIKKINKQNLILRNQIQQVFVERDILTFAENPFVVSMFCSFETRRHLCMVMEYVEGGDCATLLKNMGPLPVDMARLYFAETVLALEYLHNYGIVHRDLKPDNLLITSLGHIKLTDFGLSKIGLMSMATNLYEGHIEKDAREFIDKQVCGTPEYIAPEVIFRQGYGKPVDWWAMGVVLYEFLVGCVPFFGDTPEELFGQVVSDEIMWPEGDEALPADAQDLITRLLRQSPLDRLGTGGTHEVKQHPFFLALDWAGLLRHKAEFVPQLEAEDDTSYFDTRSERYRHLGSEDDETNDEESSTEIPQFSSCSHRFSKVYSSSEFLAVQPTPTFAERSFSEDREEGWERSEVDYGRRLSADIRLRSWTSSGSSCQSSSSQPERGPSPSLLNTISLDTMPKFAFSSEDEGVGPGPAGPKRPVFILGEPDPPPAATPVMPKPSSLSADTAALSHARLRSNSIGARHSTPRPLDAGRGRRLGGPRDPAPEKSRASSSGGSGGGSGGRVPKSASVSALSLIITADDGSGGPLMSPLSPRSLSSNPSSRDSSPSRDPSPVCGSLRPPIVIHSSGKKYGFSLRAIRVYMGDSDVYTVHHVVWSVEDGSPAQEAGLRAGDLITHINGESVLGLVHMDVVELLLKSGNKISLRTTALENTSIKVGPARKNVAKGRMARRSKRSRRRETQDRRKSLFKKISKQTSVLHTSRSFSSGLHHSLSSSESLPGSPTHSLSPSPTTPCRSPAPDVPADTTASPPSASPSSSSPASPAAAGHTRPSSLHGLAAKLGPPRPKTGRRKSTSSIPPSPLACPPISAPPPRSPSPLPGHPPAPARSPRLRRGQSADKLGTGERLDGEAGRRTRGPEAELVVMRRLHLSERRDSFKKQEAVQEVSFDEPQEEATGLPTSVPQIAVEGEEAVPVALGPTGRD

SEQ ID NO: 40305 - protein, 304 aa, Homo sapiens
MMKKDALTLSLSEQVAAALKPAAAPPPTPLRADGAPSAAPPDGLLASPDLGLLKLASPELERLIIQSNGLVTTTPTSSQFLYPKVAASEEQEFAEGFVKALEDLHKQNQLGAGAAAAAAAAAAGGPSGTATGSAPPGELAPAAAAPEAPVYANLSSYAGGAGGAGGAATVAFAAEPVPFPPPPPPGALGPPRLAALKDEPQTVPDVPSFGESPPLSPIDMDTQERIKAERKRLRNRIAASKCRKRKLERISRLEEKVKTLKSQNTELASTASLLREQVAQLKQKVLSHVNSGCQLLPQHQVPAY

SEQ ID NO: 40306 - protein, 159 aa, Homo sapiens
MVNTDDVNAIILAQKNMLDRFEKTNEMLLNFNNLSSARLQQMSERFLHHTRTLVEMKRDLDSIFRRIRTLKGKLARQHPEAFSHIPEASFLEEEDEDPIPPSTTTTIATSEQSTGSCDTSPDTVSPSLSPGFEDLSHVQPGSPAINGRSQTDDEEMTGE

SEQ ID NO: 40307 - protein, 178 aa, Homo sapiens
MVNTDDVNAIILAQKNMLDRFEKTNEMLLNFNNLSSARLQQMSERFLHHTRTLVEMKRDLDSIFRRIRLHCALKCLGQFQPWDKILTTLKGKLARQHPEAFSHIPEASFLEEEDEDPIPPSTTTTIATSEQSTGSCDTSPDTVSPSLSPGFEDLSHVQPGSPAINGRSQTDDEEMTGE

SEQ ID NO: 40308 - protein, 1059 aa, Homo sapiens [sequence omitted]

SEQ ID NO: 40309 - protein, 779 aa, Homo sapiens
MSFDIIDKSDVFSRFGIEIIKWAGFHTIKDDIKFSQLFQTLFELETETCAKMLASFKCSLKPEHRDFCFFTIKFLKHSALKTPRVDNEFLNMLLDKGAVKTKNCFFEIIKPFDKYIMRLQDRLLKSVTPLLMACNAYELSVKMKTLSNPLDLALALETTNSLCRKSLALLGQTFSLASSFRQEKILEAVGLQDIAPSPAAFPNFEDSTLFGREYIDHLKAWLVSSGCPLQVKKAEPEPMREEEKMIPPTKPEIQAKAPSSLSDAVPQRADHRVVGTIDQLVKRVIEGSLSPKERTLLKEDPAYWFLSDENSLEYKYYKLKLAEMQRMSENLRGADQKPTSADCAVRAMLYSRAVRNLKKKLLPWQRRGLLRAQGLRGWKARRATTGTQTLLSSGTRLKHHGRQAPGLSQAKPSLPDRNDAAKDCPPDPVGPSPQDPSLEASGPSPKPAGVDISEAPQTSSPCPSADIDMKTMETAEKLARFVAQVGPEIEQFSIENSTDNPDLWFLHDQNSSAFKFYRKKVFELCPSICFTSSPHNLHTGGGDTTGSQESPVDLMEGEAEFEDEPPPREAELESPEVMPEEEDEDDEDGGEEAPAPGGAGKSEGSTPADGLPGEAAEDDLAGAPALSQASSGTCFPRKRISSKSLKVGMIPAPKRVCLIQEPKVHEPVRIAYDRPRGRPMSKKKKPKDLDFAQQKLTDKNLGFQMLQKMGWKEGHGLGSLGKGIREPVSVYAAGSLGWEWVGPQSFHLQPAAWLLHSQDGLQLAVDFCFLNRRHLQMRS

SEQ ID NO: 40310 - protein, 277 aa, Homo sapiens [sequence omitted]

SEQ ID NO: 40311 - protein, 365 aa, Homo sapiens [sequence omitted]

SEQ ID NO: 40312 - protein, 459 aa, Homo sapiens
MVPFGPFAFMPGKLVHTNEVTVLLGDNWFAKCSAKQAVGLVEHRKEHVRKTIDDLKKVMKNFESRVEFTEDLQKMSDAAGDIVDIREEIKCDFEFKAKHRIAHKPHSKPKTSDIFEADIANDVKSKDLLADKELWARLEELERQEELLGELDSKPDTVIANGEDTTSSEEEKEDRNTNVNAMHQVTDSHTPCHKDVASSEPFSGQVNSQLNCSVNGSSSYHSDDDDDDDDDDDDDNIDDDDGDNDHEALGVGDNSIPTIYFSHTVEPKRVRINTGKNTTLKFSEKKEEAKRKRKNSTGSGHSAQELPTIRTPADIYRAFVDVVNGEYVPRKSILKSRSRENSVCSDTSESSAAEFDDRRGVLRSISCEEATCSDTSESILEEEPQENQKKLLPLSVTPEAFSGTVIEKEFVSPSLTPPPAIAHPALPTIPERKEVLLEASEETGKRVSKFKAARLQQKD

SEQ ID NO: 40313 - protein, 681 aa, Homo sapiens [sequence omitted]

SEQ ID NO: 40314 - protein, 486 aa, Homo sapiens
MHCLKRTPKEVGDVIALSDITSSGAADRSQEPSPVGSRRGHVTPNLSRASSDADHGAEEDKEEQVDSQPDASSSQTVTPVAEPPSTEPTQPDGPTTLGPLDLLPSEELLTDTSNSSSSTGEEADLAALLPDLSGRLLINSVFHVGAERLQQMLFSDSPFLQGFLQQCKFTDVTLSPWSGDSKCHQRRVLTYTIPISNPLGPKSASVVETQTLFRRGPQAGGCVVDSEVLTQGIPYQDYFYTAHRYCILGLARNKARLRVSSEIRYRKQPWSLVKSLIEKNSWSGIEDYFHHLERELAKAEKLSLEEGGKDARGLLSGLRRRKRPLSWRAHGDGPQHPDPDPCARAGIHTSGSLSSRFSEPSVDQGPGAGIPSALVLISIVLIILIALNVLLFYRLWSLERTAHTFESWHSLALAKGKFPQTATEWAEILALQKQFHSVEVHKWRQILRASVELLDEMKFSLEKLHQGITVSDPPFDTQPRPDDSFS

SEQ ID NO: 40315 - protein, 412 aa, Homo sapiens
MFSDVSVDFSQEEWECLNDDQRDLYRDVMLENYSNLVSMGHSISKPNVISYLEQGKEPWLADRELTRGQWPVLESRCETKKLFLKKEIYEIESTQWEIMEKLTRRDFQCSSFRDDWECNRQFKKELGSQGGHFNQLVFTHEDLPTLSHHPSFTLQQIINSKKKFCASKEYRKTFRHGSQFATHEIIHTIEKPYECKECGKSFRHPSRLTHHQKIHTGKKPFECKECGKTFICGSDLTRHHRIHTGEKPYECKECGKAFSSGSNFTRHQRIHTGEKPYECKECGKAFSSGSNFTQHQRIHTGEKPYECKECGNAFSQSSQLIKHQRIHTGEKPYECKECEKAFRSGSDLTRHQRIHTGEKPYECKICGKAYSQSSQLISHHRIHTSEKPYEYRECGKNFNYDPQLIQHQNLYW

SEQ ID NO: 40316 - protein, 409 aa, Homo sapiens [sequence omitted]

SEQ ID NO: 40317 - protein, 530 aa, Homo sapiens
MDHELVTLRDVVINFSQEEWEYLDSAQRNLYWDVMMENYSNLLSLDLESRNETKHLSVGKDIIQNTGSQWEVMESSKLCGLEGSIFRNDWQSKSKIDLQGPEVGYFSQMKIISENVPSYKTHESLTLPRRTHDSEKPYEYKEYEKVFSCDLEFDEYQKIHTGGKNYECNQCWKTFGIDNSSMLQLNIHTGVKPCKYMEYGNTCSFYKDFNVYQKIHNEKFYKCKEYRRTFERVGKVTPLQRVHDGEKHFECSFCGKSFRVHAQLTRHQKIHTDEKTYKCMECGKDFRFHSQLTEHQRIHTGEKPYKCMHCEKVFRISSQLIEHQRIHTGEKPYACKECGKAFGVCRELARHQRIHTGKKPYECKACGKVFRNSSSLTRHQRIHTGEKPYKCKECEKAFGVGSELTRHERIHSGQKPYECKECGKFFRLTSALIQHQRIHSGEKPYECKVCGKAFRHSSALTEHQRIHTGEKPYECKACGKAFRHSSSFTKHQRIHTDDKPYECKECGNSFSVVGHLTCQPKIYTGEKSFD

SEQ ID NO: 40318 - protein, 122 aa, Homo sapiens
MAQLCGLRRSRAFLALLGSLLLSGVLAADRERSIHDFCLVSKVVGRCRASMPRWWYNVTDGSCQLFVYGGCDGNSNNYLTKEECLKKCATVTENATGDLATSRNAADSSVPSGRFLKRPAME

SEQ ID NO: 40319 - protein, 133 aa, Homo sapiens
MNKFLLVRQVLFPLPTPLSVFALLTGPGSELPAVCIGVSPGRPGKSVLFHTVRFGALSCWLGEMSTEHRGPVQVTQVEEDMVMVLMDGSVKLVTPEGSPVRGLRTPEIPMTEAVEAVGLCRDGRAQDQGWKLK

SEQ ID NO: 40320 - protein, 493 aa, Homo sapiens
MPKKRQALVEFEDVLGACNAVNYAADNQIYIAGHPAFVNYSTSQKISRPGDSDDSRSVNSVLLFTILNPIYSITTDVLYTICNPCGPVQRIVIFRKNGVQAMVEFDSVQSAQRAKASLNGADIYSGCCTLKIEYAKPTRLNVFKNDQDTWDYTNPNLSGQGDPGSNPNKRQRQPPLLGDHPAEYGEGRGFPSVDSRGSCAPARRPPCKFSPVLPLFPSHPPGGPHGGYHSHYHDEGYGPPPPHYEGRRMGPPVGGHRRGPSRYGPQYGHPPPPPPPPEYGPHADSPVLMVYGLDQSKMNCDRVFNVFCLYGNVEKVKFMKSKPGAAMVEMADGYAVDRAITHLNNNFMFGQKLNVCVSKQPAIMPGQSYGLEDGSCSYKDFSESRNNRFSTPEQAAKNRIQHPSNVLHFFNAPLEVTEENFFEICDELGVKRPSSVKVFSGKSERSSSGLLEWESKSDALETLGFLNHYQMKNPNGPYPYTLKLCFSTAQHAS

SEQ ID NO: 40321 - protein, 178 aa, Homo sapiens
MPKKRQALVEFEDVLGACNAVNYAADNQIYIAGHPAFVNYSTSQKISRPGDSDDSRSVNSVLLFTILNPIYSITTDVLYTICNPCGPVQRIVIFRKNGVQAMVEFDSVQSAQRAKASLNGADIYSGCCTLKIEYAKPTRLNVFKNDQDTWDYTNPNLSGQGNLDDHFVLNIPALLSLD

SEQ ID NO: 40322 - protein, 64 aa, Homo sapiens
MPSQSRSSVQRTHSLPVHSSPQAILMFPPDCPVPGPDLEINPTLESLCLSMTEHALGGEHFLFP

SEQ ID NO: 40323 - protein, 235 aa, Homo sapiens
MVEPHRHEGVFICRGKEDALVTKNLVPGESVYGEKRVSISEGDDKIEYRAWNPFRSKLAAAILGGVDQIHIKPGAKVLYLGAASGTTVSHVSDIVGPDGLVYAVEFSHRSGRDLINLAKKRTNIIPVIEDARHPHKYRMLIAMVDVIFADVAQPDQTRIVALNAHTFLRNGGHFVISIKANCIDSTASAEAVFASEVKKMQQENMKPQEQLTLEPYERDHAVVVGVYRPPPKVKN

SEQ ID NO: 40324 - protein, 226 aa, Homo sapiens
MKTERPRPNTFVIRCLQWTTVIERTFHVDSPDEREEWMRAIQMVANSLKQRAPGEDPMDYKCGSPSDSSTTEEMEVAVSKARAKVTMNDFDYLKLLGKGTFGKVILVREKATGRYYAMKILRKEVIIAKDEVAHTVTESRVLQNTRHPFLTVSCPPLPRQCEASLWTELRERALIFWYKAQSWGRPGGQGKVLLRPAKSSEPRHVVGVSRLGEWEGDSFFIDGGFM

SEQ ID NO: 40325 - protein, 544 aa, Homo sapiens
MPPNLGNAGLLGRMLDEKTPPSPSGQPEEPGMVRLVCGHHNWIAVAYTQFLVCYRLKEASGWQLVFSSPRLDWPIERLALTARVHGGALGEHDKMVAAATGSEILLWALQAEGGGSEIGVFHLGVPVEALFFVGNQLIATSHTGRIGVWNAVTKHWQVQEVQPITSYDAAGSFLLLGCNNGSIYYVDVQKFPLRMKDNDLLVSELYRDPAEDGVTALSVYLTPKTSDSGNWIEIAYGTSSGGVRVIVQHPETVGSGPQLFQTFTVHRSPVTKIMLSEKHLISVCADNNHVRTWSVTRFRGMISTQPGSTPLASFKILALESADGHGGCSAGNDIGPYGERDDQQVFIQKVVPSASQLFVRLSSTGQRVCSVRSVDGSPTTAFTVLECEGSRRLGSRPRRYLLTGQANGSLAMWDLTTAMDGLGQAPAGGLTEQELMEQLEHCELAPPAPSAPSWGCLPSPSPRISLTSLHSASSNTSLSGHRGSPSPPQAEARRRGGGSFVERCQELVRSGPDLRRPPTPAPWPSSGLGTPLTPPKMKLNETSF

SEQ ID NO: 40326 - protein, 430 aa, Homo sapiens
MPGGRLQSEGGSGLDSSPFLSEANAERIVQTLCTVRGAALKVGQMLSIQDNSFISPQLQHIFERVRQSADFMPRWQMLRVLEEELGRDWQAKVASLEEVPFAAASIGQVHQGLLRDGTEVAVKIQYPGIAQSIQSDVQNLLAVLKMSAALPAGLFAEQSLQALQQELAWECDYRREAACAQNFRQLLANDPFFRVPAVVKELCTTRVLGMELAGGVPLDQCQGLSQDLRNQICFQLLTLCLRELFEFRFMQTDPNWANFLYDASSHQVTLLDFGASREFGTEFTDHYIEVVKAAADGDRDCVLQKSRDLKFLTGFETKAFSDAHVEAVMILGEPFATQGPYDFGSGETARRIQDLIPVLLRHRLCPPPEETYALHRKLAGAFLACAHLRAHIACRDLFQDTYHRYWASRQPDAATAGSLPTKGDSWVDPS

SEQ ID NO: 40327 - protein, 52 aa, Homo sapiens
MPGGRLQSEGGSGLDSSPFLSEANAERIVQTLCTVRGAALKVGQMLSIQGTA

SEQ ID NO: 40328 - protein, 75 aa, Homo sapiens
MAETYELMFLETSALTGENVEEAFLKCARTILNKIDSGELDPERMGSGIQYGDASLRQLRQPRSAQAVAPQPCGC

SEQ ID NO: 40329 - protein, 374 aa, Homo sapiens
MGVESYLPCPLLPSYHCPGVPSEASAGSGTPRATATSTTASPLRDGFGGQDGGELRPLQSEGAAALVTKGCQRLAAQGARPEAPKRKWAEDGGDAPSPSKRPWARQENQEAEREGGMSCSCSSGSGEASAGLMEEALPSAPERLALDYIVPCMRYYGICVKDSFLGAALGGRVLAEVEALKRGGRLRDGQLVSQRAIPPRSIRGDQIAWVEGHEPGCRSIGALMAHVDAVIRHCAGRLGSYVINGRTKAMVACYPGNGLGYVRHVDNPHGDGRCITCIYYLNQNWDVKVHGGLLQIFPEGRPVVANIEPLFDRLLIFWSDRRNPHEVKPAYATRYAITVWYFDAKERAAAKDKYQLASGQKGVQVPVSQPPTPT

SEQ ID NO: 40330 - protein, 147 aa, Homo sapiens
MAVAIAAARVWRLNRGLSQAALLLLRQPGARGLARSHPPRQQQQFSSLDDKPQFPGASAEFIDKLEFIQPNVISGIPIYRVMDRQGQIINPSEDPHVRGGLPHFPCPPRPGPLPVSSLVPTAPRLSVPPPAAAEGEGAEALQEHDTA

SEQ ID NO: 40331 - protein, 698 aa, Homo sapiens
MPSRDRNIGAPGQDTPGVSLHPLSLDSPDREPGADAPLELGDSSPQGPMSLESLAPPESTDEGAETERRWKRLSGRLGRSESLRVSDRRRPSRGSLGAKGRGGGRSRSDVDMDPSSATAVLGPARRATPEPGDEGEPGRSGLELEPEEPPGWRELVPPDTLHSLPKSQVKRQEVISELLVTEAAHVRMLRVLHDLFFQPMAECLFFPLEELQNIFPSLDELIEVHSLFLDRLMKRRQESGYLIEEIGDVLLARFDGAEGSWFQKISSRFCSRQSFALEQLKAKQRKDPRFCAFVQEAESRPRCRRLQLKDMIPTEMQRLTKYPLLLQSIGQNTEEPTEREKVELAAECCREILHHVNQAVRDMEDLLRLKDYQRRLDLSHLRQSSDPMLSEFKNLDITKKKLVHEGPLTWRVTKDKAVEVHVLLLDDLLLLLQRQDERLLLKSHSRTLTPTPDGKTMLRPVLRLTSAMTREVATDHKAFYVLFTWDQEAQIYELVAQTVSERKNWCALITETAGSLKVPAPASRPKPRPSPSSTREPLLSSSENGNGGRETSPADARTERILSDLLPFCRPGPEGQLAATALRKGVGGGILPPETPPVSAWGELCPPAWLHLRFPPRKHPILTTTCEVGTAMMDAHFTDVETEVLTGKVTWPKSHRDEVSLDLNAGARWRWRRCVQDPCWTRKPGPGLEHGPAHTQPG

SEQ ID NO: 40332 - protein, 2425 aa, Homo sapiens
MALGKVLAMALVLALAVLGSLSPGARAGDCKGQRQVLREAPGFVTDGAGNYSVNGNCEWLIEAPSPQHRILLDFLFLDTECTYDYLFVYDGDSPRGPLLASLSGSTRPPPIEASSGKMLLHLFSDANYNLLGFNASFRFSLCPGGCQSHGQCQPPGVCACEPGWGGPDCGLQECSAYCGSHGTCASPLGPCRCEPGFLGRACDLHLWENQGAGWWHNVSARDPAFSARIGAAGAFLSPPGLLAVFGGQDLNNALGDLVLYNFSANTWESWDLSPAPAARHSHVAVAWAGSLVLMGGELADGSLTNDVWAFSPLGRGHWELLAPPASSSSGPPGLAGHAAALVDDVWLYVSGGRTPHDLFSSGLFRFRLDSTSGGYWEQVIPAGGRPPAATGHSMVFHAPSRALLVHGGHRPSTARFSVRVNSTELFHVDRHVWTTLKGRDGLQGPRERAFHTASVLGNYMVVYGGNVHTHYQEEKCYEDGIFFYHLGCHQWVSGAELAPPGTPEGRAAPPSGRYSHVAAVLGGSVLLVAGGYSGRPRGDLMAYKVPPFVFQAPAPDYHLDYCSMYTDHSVCSRDPECSWCQGACQAAPPPGTPLGACPAASCLGLGRLLGDCQACLAFSSPTAPPRGPGTLGWCVHNESCLPRPEQARCRGEQISGTVGWWGPAPVFVTSLEACVTQSFLPGLHLLTFQQPPNTSQPDKVSIVRSTTITLTPSAETDVSLVYRGFIYPMLPGGPGGPGAEDVAVWTRAQRLHVLARMARGPDTENMEEVGRWVAHQEKETRRLQRPGSARLFPLPGRDHKYAVEIQGQLNGSAGPGHSELTLLWDRTGVPGGSEISFFFLEPYRSSSCTSYSSCLGCLADQGCGWCLTSATCHLRQGGAHCGDDGAGGSLLVLVPTLCPLCEEHRDCHACTQDPFCEWHQSTSRKGDAACSRRGRGRGALKSPEECPPLCSQRLTCEDCLANSSQCAWCQSTHTCFLFAAYLARYPHGGCRGWDDSVHSEPRCRSCDGFLTCHECLQSHECGWCGNEDNPTLGRCLQGDFSGPLGGGNCSLWVGEGLGLPVALPARWAYARCPDVDECRLGLARCHPRATCLNTPLSYECHCQRGYQGDGISHCNRTCLEDCGHGVCSGPPDFTCVCDLGWTSDLPPPTPAPGPPAPRCSRDCGCSFHSHCRKRGPGFCDECQDWTWGEHCERCRPGSFGNATGSRGCRPCQCNGHGDPRRGHCDNLSGLCFCQDHTEGAHCQLCSPGYYGDPRAGGSCFRECGGRALLTNVSSVALGSRRVGGLLPPGGGAARAGPGLSYCVWVVSATEELQPCAPGTLCPPLTLTFSPDSSTPCTLSYVLAFDGFPRFLDTGVVQSDRSLIAAFCGQRRDRPLTVQALSGLLVLHWEANGSSSWGFNASVGSARCGSGGPGSCPVPQECVPQDGAAGAGLCRCPQGWAGPHCRMALCPENCNAHTGAGTCNQSLGVCICAEGFGGPDCATKLDGGQLVWETLMDSRLSADTASRFLHRLGHTMVDGPDATLWMFGGLGLPQGLLGNLYRYSVSERRWTQMLAGAEDGGPGPSPRSFHAAAYVPAGRGAMYLLGGLTAGGVTRDFWVLNLTTLQWRQEKAPQTVELPAVAGHTLTARRGLSLLLVGGYSPENGFNQQLLEYQLATGTWVSGAQSGTPPTGLYGHSAVYHEATDSLYVFGGFRFHVELAAPSPELYSLHCPDRTWSLLAPSQGAKRDRMRNVRGSSRGLGQVPGEQPGSWGFREVRKKMALWAALAGTGGFLEEISPHLKEPRPRLFHASALLGDTMVVLGGRSDPDEFSSDVLLYQVNCNAWLLPDLTRSASVGPPMEESVAHAVAAVGSRLYISGGFGGVALGRLLALTLPPDPCRLLSSPEACNQSGACTWCHGACLSGDQAHRLGCGGSPCSPMPRSPEECRRLRTCSECLARHPRTLQPGDGEASTPRCKWCTNCPEGACIGRNGSCTSENDCRINQREVFWAGNCSEAACGAADCEQCTREGKCMWTRQFKRTGETRRILSVQPTYDWTCFSHSLLNVSPMPVESSPPLPCPTPCHLLPNCTSCLDSKGADGGWQHCVWSSSLQQCLSPSYLPLRCMAGGCGRLLRGPESCSLGCAQATQCALCLRRPHCGWCAWGGQDGGGRCMEGGLSGPRDGLTCGRPGASWAFLSCPPEDECANGHHDCNETQNCHDQPHGYECSCKTGYTMDNMTGLCRPVCAQGCVNGSCVEPDHCRCHFGFVGRNCSTECRCNRHSECAGVGARDHCLLCRNHTKGSHCEQCLPLFVGSAVGGGTCRPCHAFCRGNSHICISRKELQMSKGEPKKYSLDPEEIENWVTEGPSEDEAVCVNCQNNSYGEKCESCLQGYFLLDGKCTNAPSAGNHFTGVRWAASSATASSRWSRSAAWTPRPRPTASMSPNAGR

SEQ ID NO: 40333 - protein, 161 aa, Homo sapiens [sequence omitted]

SEQ ID NO: 40334 - protein, 391 aa, Homo sapiens
MGPSFPSPKPGSERLSFVSAKQSTGQDTEAELQDATLALHGLTVEDEGNYTCEFATFPKGSVRGMTWLRVIAKPKNQAEAQKVTFSQDPTTVALCISKEGRPPARISWLSSLDWEAKETQVSGTLAGTVTVTSRFTLVPSGRADGVTVTCKVEHESFEEPALIPVTLSVRYPPEVSISGYDDNWYLGRTDATLSCDVRSNPEPTGYDWSTTSGTFPTSAVAQGSQLVIHAVDSLFNTTFVCTVTNAVGMGRAEQVIFVRETPRASPRDVGPLVWGAVGGTLLVLLLLAGGSLAFILLRVRRRRKSPGGAGGGASGDGGFYDPKAQVLGNGDPVFWTPVVPGPMEPDGKDEEEEEEEEKAEKGLMLPPPPALEDDMESQLDGSLISRRAVYV

SEQ ID NO: 40335 - protein, 559 aa, Homo sapiens [sequence omitted]

SEQ ID NO: 40336 - protein, 76 aa, Homo sapiens
MEKLEQDFVSRSLEQLIAASREDLALCPGLGPQKVRALGKNPRSWGKERAPNKHNLRPQSFKVKKEPKTRHSGFRL

SEQ ID NO: 40337 - protein, 659 aa, Homo sapiens
MGDCAEIKSQFRTREGFYKLLPGDGAARRSGPASAQTPVPPQPPQPPPGPASASGPGAAGPASSPPPAGPGPGPALPAVRLSLVRLGEPDSAGAGEPPATPAGLGSGGDRVCFNLGRELYFYPGCCRRGSQRSIDLNKPIDKRIYKGTQPTCHDFNQFTAATETISLLVGFSAGQVQYLDLIKKDTSKLFNEERLIDKTKVTYLKWLPESESLFLASHASGHLYLYNVSHPCASAPPQYSLLKQGEGFSVYAAKSKAPRNPLAKWAVGEGPLNEFAFSPDGRHLACVSQDGCLRVFHFDSMLLRGLMKSYFGGLLCVCWSPDGRYVVTGGEDDLVTVWSFTEGRVVARGHGHKSWVNAVAFDPYTTRAEEAATAAGADGERSGEEEEEEPEAAGTGSAGGAPLSPLPKAGSITYRFGSAGQDTQFCLWDLTEDVLYPHPPLARTRTLPGTPGTTPPAASSSRGGEPGPGPLPRSLSRSNSLPHPAGGGKAGGPGVAAEPGTPFSIGRFATLTLQERRDRGAEKEHKRYHSLGNISRGGSGGSGSGGEKPSGPVPRSRLDPAKVLGTALCPRIHEVPLLEPLVCKKIAQERLTVLLFLEDCIITACQEGLICTWARPGKAFTDEETEAQTGEGSWPRSPSKSVVEGISSQPGNSPSGTVV

SEQ ID NO: 40338 - protein, 1497 aa, Homo sapiens
MARKQDVRIPTYNISVVGLSGTEKEKGQCGIGKSCLCNRFVRPSADEFHLDHTSVLSTSDFGGRVVNNDHFLYWGEVSRSLEDCVECKMHIVEQTEFIDDQTFQPHRSTALQPYIKRAAATKLASAEKLMYFCTDQLGLEQDFEQKQMPDGKLLVDGFLLGIDVSRGMNRNFDDQLKFVSNLYNQLAKTKKPIVVVLTKCDEGVERYIRDAHTFALSKKNLQVVETSARSNVNVDLAFSTLVQLIDKSRGKTKIIPYFEALKQQSQQIATAKDKYEWLVSRIVKNHNENWLSVSRKMQASPEYQDYVYLEGTQKAKKLFLQHIHRLKHEHIERRRKLYLAALPLAFEALIPNLDEIDHLSCIKAKKLLETKPEFLKWFVVLEETPWDATSHIDNMENERIPFDLMDTVPAEQLYEAHLEKLRNERKRVEMRRAFKENLETSPFITPGKPWEEARSFIMNEDFYQWLEESVYMDIYGKHQKQIIDKAKEEFQELLLEYSELFYELELDAKPSKEKMGVIQDVLGEEQRFKALQKLQAERDALILKHIHFVYHPTKETCPSCPACVDAKIEHLISSRFIRPSDRNQKNSLSDPNIDRINLVILGKDGLARELANEIRALCTNDDKYVIDGKMYELSLRPIEGNVRLPVNSFQTPTFQPHGCLCLYNSKESLSYVVESIEKSRESTLGRRDNHLVHLPLTLILVNKRGDTSGETLHSLIQQGQQIASKLQCVFLDPASAGIGYGRNINEKQISQVLKGLLDSKRNLNLVSSTASIKDLADVDLRIVMCLMCGDPFSADDILFPVLQSQTCKSSHCGSNNSVLLELPIGLHKKRIELSVLSYHSSFSIRKSRLVHGYIVFYSAKRKASLAMLRAFLCEVQDIIPIQLVALTDGAVDVLDNDLSREQLTEGEEIAQEIDGRFTSIPCSQPQHKLEIFHPFFKDVVEKKNIIEATHMYDNAAEACSTTEEVFNSPRAGSPLCNSNLQDSEEDIEPSYSLFREDTSLPSLSKDHSKLSMELEGNDGLSFIMSNFESKLNNKVPPPVKPKPPVHFEITKGDLSYLDQGHRDGQRKSVSSSPWLPQDGFDPSDYAEPMDAVVKPRNEEENIYSVPHDSTQGKIITIRNINKAQSNGSGNGSDSEMDTSSLERGRKVSIVSKPVLYRTRCTRLGRFASYRTSFSVGSDDELGPIRKKEEDQASQGYKGDNAVIPYETDEDPRRRNILRSLRRNTKKPKPKPRPSITKATWESNYFGVPLTTVVTPEKPIPIFIERCIEYIEATGLSTEGIYRVSGNKSEMESLQRQFDQDHNLDLAEKDFTVNTVAGAMKSFFSELPDPLVPYNMQIDLVEAHKINDREQKLHALKEVLKKFPKENHEVFKYVISHLNKVSHNNKVNLMTSENLSICFWPTLMRPDFSTMDALTATRTYQTIIELFIQQCPFFFYNRPITEPPGARPSSPSAVASTVPFLTSTPVTSQPSPPQSPPPTPQSPMQPLLPSQLQAEHTL

SEQ ID NO: 40339 - protein, 173 aa, Homo sapiens
MKTGALLLQGFIQDRAGRMGGEAPELALDPVPQDASTKKLSECLKRIGDELDSNMELQRMIAAVDTDSPREVFFRVAADMFSDGNFNWGRVVALFYFASKLVLKALCTKVPELIRTIMGWTLDFLRERLLGWIQDQGGWDGLLSYFGTPTWQTVTIFVAGVLTASLTIWKKMG

SEQ ID NO: 40340 - protein, 102 aa, Homo sapiens
MERKRREKIERRQQEVETELKMWDPHNDPNAQGDAFKTLFVARVNYDTTESKLRREFEVYGPIKRIHMVYSKRSGKPRGYAFIEYEHERDMHCEYLPPSPAL

SEQ ID NO: 40341 - protein, 117 aa, Homo sapiens
MVSSLYLPASAGAPGPPDLITFTEGSGRSPRYALWFCVGESWPQDQPWTKRLVMVKVVPTCLRALVEMARVGGASSLENTVDLHISNSHPLSLTSDQYKAYLQDLVEGMDFQGPGES

SEQ ID NO: 40342 - protein, 264 aa, Homo sapiens
MLATGTARMASGRPEELWEAVVGAAERFRARTGTELVLLTAAPPPPPRPGPCAYAAHGRGALAEAARRCLHDIALAHRAATAARPPAPPPAPQPPSPTPSPPRPTLAREDNEEDEDEPTETETSGEQLGISDNGGLFVMDEDATLQDLPPFCESDPESTDDGSLSEETPAGPPTCSVPPASALPTQQYAKSLPVSVPVWGFKEKRTEARSSDEENGPPSSPDLDRIAASMRALVLREAEDTQVFGDLPRPRLNTSDFQKLKRKY

SEQ ID NO: 40343 - protein, 59 aa, Homo sapiens
MESSTFALVPVFAHLSILQSLVPAAGAASPVAISAQHLCYSHVTPGDPGAGAGQGPAPS

SEQ ID NO: 40344 - protein, 115 aa, Homo sapiens
MAALQGLGLAAVWWDRRRPLSQLALPQVLGLILNLPSPVSLGLLSLPLRRRHWVALRQVDGVYYNLDSKLRAPEALGDEDGVRAFLAAALAQGLCEVLLVVTKEVEEKGSWLRTD

SEQ ID NO: 40345 - protein, 442 aa, Homo sapiens
MLPLLLPLLWAGALAQERRFQLEGPESLTVQEGLCVLVPCRLPTTLPASYYGYGYWFLEGADVPVATNDPDEEVQEETRGRFHLLWDPRRKNCSLSIRDARRRDNAAYFFRLKSKWMKYGYTSSKLSVRVMALTHRPNISIPGTLESGHPSNLTCSVPWVCEQGTPPIFSWMSAAPTSLGPRTTQSSVLTITPRPQDHSTNLTCQVTFPGAGVTMERTIQLNVSYAPQKVAISIFQGNSAAFKILQNTSSLPVLEGQALRLLCDADGNPPAHLSWFQGFPALNATPISNTGVLELPQVGSAEEGDFTCRAQHPLGSLQISLSLFVHWKPEGRAGGVLGAVWGASITTLVFLCVCFIFRVKTRRKKAAQPVQNTDDVNPVMVSGSRGHQHQFQTGIVSDHPAEAGPISEDEQELHYAVLHFHKVQPQEPKVTDTEYSEIKIHK

SEQ ID NO: 40346 - protein, 352 aa, Homo sapiens
MLPLLLPLLWAGALAQERRFQLEGPESLTVQEGLCVLVPCRLPTTLPASYYGYGYWFLEGADVPVATNDPDEEVQEETRGRFHLLWDPRRKNCSLSIRDARRRDNAAYFFRLKSKWMKYGYTSSKLSVRVMALTHRPNISIPGTLESGHPSNLTCSVPWVCEQGTPPIFSWMSAAPTSLGPRTTQSSVLTITPRPQDHSTNLTCQVTFPGAGVTMERTIQLNVSYAPQKVAISIFQGNSAAFKILQNTSSLPVLEGQALRLLCDADGNPPAHLSWFQGFPALNATPISNTGVLELPQVGSAEEGDFTCRAQHPLGSLQISLSLFVHCECGGRCARVWAAGRELHSIQRRGPC

SEQ ID NO: 40347 - protein, 469 aa, Homo sapiens
MKEFSSTAQGNREVFHAGTSQRHESHHNGDFCFQDIDKDIHDIEFQWQEDERNGHEALMTKIKKLTGSTERYDQNYAGNKPVKYQLGFSFHSHLPELHIFHTEEKIDNQVVKSIHDASLVSTAQRISCRPETHISNDYGNNFLNSSLFTQKQEVHMREKSFQCNDSGKAYNCSSLLRKHQLIHLGEKQYKCDICGKVFNSKRYVARHRRCHTGEKPYKCNECGKTFSQTYYLTCHRRLHTGEKPYKCEECDKAFHFKSKLQIHRRIHTGEKPYKCNECGKTFSQKSYLTCHRRLHTGEKPYKCNECGKTFSRKSHFTCHHRVHTGEKPYKCNECSKTFSHKSSLTYHRRLHTEEKPYKCNECGKTFNQQLTLNICRLHSGEKPYKCEECDKAYSFKSNLEIHQKIHTEENPYKCNECGKTFSRTSSLTYHHRLHTGQKPYKCEDCDEAFSFKSNLERHRRIYTGEKLHV

SEQ ID NO: 40348 - protein, 666 aa, Homo sapiens [sequence omitted]

SEQ ID NO: 40349 - protein, 178 aa, Homo sapiens
MASGFSKGPTLGLLPDVPSLMETLSYSYCYVGIMTGPFFRYRTYLDWLEQPFPGAVPSLRPLLRRAWPAPLFGLLFLLSSHLFPLEAVREDAFYARPLPARLFYMIPVFFAFRMRFYVAWIAAECGCIAAGFGAYPVAAKARAGGGPTLQCPPPSRSGGAREASQDPAAPTSKGWLCP

SEQ ID NO: 40350 - protein, 351 aa, Homo sapiens [sequence omitted]

SEQ ID NO: 40351 - protein, 46 aa, Homo sapiens
MQPRAQGAVGVLRSAGDSGLAPSPPVAAQGRGLWGAGEASLIPPRN

SEQ ID NO: 40352 - protein, 669 aa, Homo sapiens
MESVLISDSPNSEGDAGDLGRVRDEAEPGGEGDPGPEPAGTPSPSGEADGDCAPEDAAPSSGGAPRQDAAREVPGSEAARPEQEPPVAEPVPVCTIFSQRAPPASGDGFEPQMVKSPSFGGASEASARTPPQVVQPSPSLSTFFGDTAASHSLASDFFDSFTTSAFISVSNPGAGSPAPASPPPLAVPGTEGRPEPVAMRGPQAAAPPASPEPFAHIQAVFAGSDDPFATALSMSEMDRRNDAWLPGEATRGVLRAVATQQRGAVFVDKENLTMPGLRFDNIQGDAVKDLMLRFLGEKAAAKRQVLNADSVEQSFVGLKQLISCRNWRAAVDLCGRLLTAHGQGYGKSGLLTSHTTDSLQLWFVRLALLVKLGLFQNAEMEFEPFGNLDQPDLYYEYYPHVYPGRRGSMVPFSMRILHAELQQYLGNPQESLDRLHKVKTVCSKILANLEQGLAEDGGMSSVTQEGRQASIRLWRSRLGRVMYSMANCLLLMKDYVLAVEAYHSVIKYYPEQEPQLLSGIGRISLQIGDIKTAEKYFQDVEKVTQKLDGLQGKIMVLMNSAFLHLGQNNFAEAHRFFTEILRMDPRNAVANNNAAVCLLYLGKLKDSLRQLEAMVQQDPRHYLHESVLFNLTTMYELESSRSMQKKQALLEAVAGKEGDSFNTQCLKLA

SEQ ID NO: 40353 - protein, 39 aa, Homo sapiens
MGVSKYGIKVSTSDQYEQAQAICKVLSTAFDSVLTSEKP

SEQ ID NO: 40354 - protein, 1379 aa, Homo sapiens
MPGAPETAPGDGAGASRQRKLEALIRDPRSPINVESLLDGLNSLVLDLDFPALRKNKNIDNFLNRYEKIVKKIRGLQMKAEDYDVVKVIGRGAFGEVQLVRHKASQKVYAMKLLSKFEMIKRSDSAFFWEERDIMAFANSPWVVQLFYAFQDDRYLYMVMEYMPGGDLVNLMSNYDVPEKWAKFYTAEVVLALDAIHSMGLIHRDVKPDNMLLDKHGHLKLADFGTCMKMDETGMVHCDTAVGTPDYISPEVLKSQGGDGFYGRECDWWSVGVFLYEMLVGDTPFYADSLVGTYSKIMDHKNSLCFPEDAEISKHAKNLICAFLTDREVRLGRNGVEEIRQHPFFKNDQWHWDNIRETAAPVVPELSSDIDSSNFDDIEDDKGDVETFPIPKAFVGNQLPFIGFTYYRENLLLSDSPSCRETDSIQSRKNEESQEIQKKLYTLEEHLSNEMQAKEELEQKCKSVNTRLEKTAKELEEEITLRKSVESALRQLEREKALLQHKNAEYQRKADHEADKKRNLENDVNSLKDQLEDLKKRNQNSQISTEKVNQLQRQLDETNALLRTESDTAARLRKTQAESSKQIQQLESNNRDLQDKNCLLETAKLKLEKEFINLQSALESERRDRTHGSEIINDLQGRICGLEEDLKNGKILLAKVELEKRQLQERFTDLEKEKSNMEIDMTYQLKVIQQSLEQEEAEHKATKARLADKNKIYESIEEAKSEAMKEMEKKLLEERTLKQKVENLLLEAEKRCSLLDCDLKQSQQKINELLKQKDVLNEDVRNLTLKIEQETQKRCLTQNDLKMQTQQVNTLKMSEKQLKQENNHLMEMKMNLEKQNAELRKERQDADGQMKELQDQLEAEQYFSTLYKTQVRELKEECEEKTKLGKELQQKKQELQDERDSLAAQLEITLTKADSEQLARSIAEEQYSDLEKEKIMKELEIKEMMARHKQELTEKDATIASLEETNRTLTSDVANLANEKEELNNKLKDVQEQLSRLKDEEISAAAIKAQFEKQLLTERTLKTQAVNKLAEIMNRKEPVKRGNDTDVRRKEKENRKLHMELKSEREKLTQQMIKYQKELNEMQAQIAEESQIRIELQMTLDSKDSDIEQLRSQLQALHIGLDSSSIGSGPGDAEADDGFPESRLEGWLSLPVRNNTKKFGWVKKYVIVSSKKILFYDSEQDKEQSNPYMVLDIDKLFHVRPVTQTDVYRADAKEIPRIFQILYANEGESKKEQEFPVEPVGEKSNYICHKGHEFIPTLYHFPTNCEACMKPLWHMFKPPPALECRRCHIKCHKDHMDKKEEIIAPCKVYYDISTAKNLLLLANSTEEQQKWVSRLVKKIPKKPPAPDPFARSSPRTSMKIQQNQSIRRPSRQLAPNKPS

SEQ ID NO: 40355 - protein, 177 aa, Homo sapiens
MQRQGQYDPPPGASNILGLEASGHVAELGPGCQGHWKIGDTAMALLPGGGQAQYVTVPEGLLMPIPEGLTLTQAAAIPEAWLTAFQLLHLVGNVQAGDYVLIHAGLSGVGTAAIQLTRMAGAIPLVTAGSQKKLQMAEKLGAAAGFNYKKEDFSEATLKFTKGKQLLLQFSRNLRDD

SEQ ID NO: 40356 - protein, 909 aa, Homo sapiens
MPSSGPGDTSSSAAEREEDRKDGEEQEEPRGKEERQEPSTTARKVGRPGRKRKHPPVESGDTPKDPAVISKSPSMAQDSGASELLPNGDLEKRSEPQPEEGSPAGGQKGGAPAEGEGAAETLPEASRAVENGCCTPKEGRGAPAEAGKEQKETNIESMKMEGSRGRLRGGLGWESSLRQRPMPRLTFQAGDPYYISKRKRDEWLARWKREAEKKAKVIAGMNAVEENQGPGESQKVEEASPPAVQQPTDPASPTVATTPEPVGSDAGDKNATKAGDDEPEYEDGRGFGIGELVWGKLRGFSWWPGRIVSWWMTGRSRAAEGTRWVMWFGDGKFSVVCVEKLMPLSSFCSAFHQATYNKQPMYRKAIYEVLQVASSRAGKLFPVCHDSDESDTAKAVEVQNKPMIEWALGGFQPSGPKGLEPPEEEKNPYKEVYTDMWVEPEAAAYAPPPPAKKPRKSTAEKPKVKEIIDERTRERLVYEVRQKCRNIEDICISCGSLNVTLEHPLFVGGMCQNCKNCFLECAYQYDDDGYQSYCTICCGGREVLMCGNNNCCRCFCVECVDLLVGPGAAQAAIKEDPWNCYMCGHKGTYGLLRRREDWPSRLQMFFANNHDQEFDPPKVYPPVPAEKRKPIRVLSLFDGIATGLLVLKDLGIQVDRYIASEVCEDSITVGMVRHQGKIMYVGDVRSVTQKHIQEWGPFDLVIGGSPCNDLSIVNPARKGLYEGTGRLFFEFYRLLHDARPKEGDDRPFFWLFENVVAMGVSDKRDISRFLESNPVMIDAKEVSAAHRARYFWGNLPGMNRPLASTVNDKLELQECLEHGRIAKFSKVRTITTRSNSIKQGKDQHFPVFMNEKEDILWCTEMERVFGFPVHYTDVSNMSRLARQRLLGRSWSVPVIRHLFAPLKEYFACV

SEQ ID NO: 40357 - protein, 242 aa, Homo sapiens
MLAACKTLQEVTQLSQEAQRIVEKLEKSTKPIVAAINGSCLGGGLEVAISCQYRIATKDRKTVLGTPEVLLGALPGAGGTQRLPKMVGVPAALDMMLTGRSIRADRAKKMGLVDQLVEPLGPGLKPPEERTIEYLEEVAITFAKGLADKKISPKRDKGLVEKLTAYAMTIPFVRQQVYKKVEEKVRKQTKGLYPAPLKIIDVVKTGIEQGSDAGYLCESQVNLFPFNVLLSVKGKLKIQSSV

SEQ ID NO: 40358 - protein, 262 aa, Homo sapiens [sequence omitted]

SEQ ID NO: 40359 - protein, 287 aa, Homo sapiens
MPGSGSAFIPTINAITTSQDLQWMVQPTVITSMSNPYPRSHPYSPLPGLASVPGHMALPRPGVIKTIGTTVGRRRRDEQLSPEEEEKRRIRRERNKLAAAKCRNRRRELTEKLQAETEELEEEKSGLQKEIAELQKEKEKLEFMLVAHGPVCKISPEERRSPPAPGLQPMRSGGGSVGAVVVKQEPLEEDSPSSSSAGLDKAQRSVIKPISIAGGFYGEEPLHTPIVVTSTPAVTPGTSNLVFTYPSVLEQESPASPSESCSKAHRRSSSSGDQSSDSLNSPTLLAL

SEQ ID NO: 40360 - protein, 1337 aa, Homo sapiens
MCLLFFFSLPPLLVSNHTGRIKVVFTPSICKVTCTKGSCQNSCEKGNTTTLISENGHAADTLTATNFRVVICHLPCMNGGQCSSRDKCQCPPNFTGKLCQIPVHGASVPKLYQHSQQPGKALGTHVIHSTHTLPLTVTSQQGVKVKFPPNIVNIHVKHPPEASVQIHQVSRIDGPTGQKTKEAQPGQSQVSYQGLPVQKTQTIHSTYSHQQVIPHVYPVAAKTQLGRCFQETIGSQCGKALPGLSKQEDCCGTVGTSWGFNKCQKCPKKPSYHGYNQMMECLPGYKRVNNTFCQDINECQLQGVCPNGECLNTMGSYRCTCKIGFGPDPTFSSCVPDPPVISEEKGPCYRLVSSGRQCMHPLSVHLTKQLCCCSVGKAWGPHCEKCPLPGTAKEEPVEALTFSREHGPGVAEPEVATAPPEKEIPSLDQEKTKLEPGQPQLSPGISTIHLHPQFPVVIEKTSPPVPVEVAPEASTSSASQVIAPTQVTEINECTVNPDICGAGHCINLPVRYTCICYEGYRFSEQQRKCVDIDECTQVQHLCSQGRCENTEGSFLCICPAGFMASEEGTNCIDVDECLRPDVCGEGHCVNTVGAFRCEYCDSGYRMTQRGRCEDIDECLNPSTCPDEQCVNSPGSYQCVPCTEGFRGWNGQCLDVDECLEPNVCANGDCSNLEGSYMCSCHKGYTRTPDHKHCRDIDECQQGNLCVNGQCKNTEGSFRCTCGQGYQLSAAKDQCEDIDECQHRHLCAHGQCRNTEGSFQCVCDQGYRASGLGDHCEDINECLEDKSVCQRGDCINTAGSYDCTCPDGFQLDDNKTCQDINECEHPGLCGPQGECLNTEGSFHCVCQQGFSISADGRTCEDIDECVNNTVCDSHGFCDNTAGSFRCLCYQGFQAPQDGQGCVDVNECELLSGVCGEAFCENVEGSFLCVCADENQEYSPMTGQCRSRTSTDLDVDVDQPKEEKKECYYNLNDASLCDNVLAPNVTKQECCCTSGVGWGDNCEIFPCPVLGTAEFTEMCPKGKGFVPAGESSSEAGGENYKDADECLLFGQEICKNGFCLNTRPGYECYCKQGTYYDPVKLQCFDMDECQDPSSCIDGQCVNTEGSYNCFCTHPMVLDASEKRCIRPAESNEQIEETDVYQDLCWEHLSDEYVCSRPLVGKQTTYTECCCLYGEAWGMQCALCPLKDSDDYAQLCNIPVTGRRQPYGRDALVDFSEQYTPEADPYFIQDRFLNSFEELQAEECGILNGCENGRCVRVQEGYTCDCFDGYHLDTAKMTCVDVNECDELNNRMSLCKNAKCINTDGSYKCLCLPGYVPSDKPNYCTPLNTALNLEKDSDLE

SEQ ID NO: 40361 - protein, 529 aa, Homo sapiens [sequence omitted]

SEQ ID NO: 40362 - protein, 525 aa, Homo sapiens
MKKPCPVQIVLAHEDDHNFELDEEALEQILLQEHIRDLNIVVVSVAGAFRKGKSFLLDFMLRYMYNKDSQSWIGGNNEPLTGFTWRGGCERETTGIQVWNEVFVIDRPNGTKVAVLLMDTQGAFDSQSTIKDCATVFALSTMTSSVQVYNLSQNIQEDDLQHLQLFTEYGRLAMEEIYQKPFQTLMFLIRDWSYPYEHSYGLEGGKQFLEKRLQVKQNQHEELQNVRKHIHNCFSNLGCFLLPHPGLKVATNPSFDGRLKDIDEDFKRELRNLVPLLLAPENLVEKEISGSKVTCRDLVEYFKAYIKIYQGEELPHPKSMLQATAEANNLAAVAGARDTYCKSMEQVCGGDKPYIAPSDLERKHLDLKEVAIKQFRSVKKMGGDEFCRRYQDQLEAEIEETYANFIKHNDGKNIFYAARTPATLFAVMFAMYIISGLTGFIGLNSIAVLCNLVMGLALIFLCTWAYVKYSGEFREIGTVIDQIAETLWEQVFSKLFEVTRRRMVHRALSSAQRQRLSSNNNKKKN

SEQ ID NO: 40363 - protein, 163 aa, Homo sapiens
MKKGPLEWQDYIYKEVRVTASEKNEYKGWVLTTDPVSANIVLVNFLEDGSMSVTGIMGHAVQTVETMNEGDHRVREKLMHLFTSGDCKAYSPEDLEERKNSLKKWLEKNHIPITEQGDAPRTLCVAGVLTIDPPYGPENCSSSNEIILSRVQDLIEGHLTASQ

SEQ ID NO: 40364 - protein, 1261 aa, Homo sapiens
MLCQAQPRSASDVEERVQKSFPHPIDKWAIADAQSAIEKRKRRNPLSLPVEKIHPLLKEVLGYKIDHQVSVYIVAVLEYISADILKLVGNYVRNIRHYEITKQDIKVAMCADKVLMDMFHQDVEDINILSLTDEEPSTSGEQTYYDLVKAFMAEIRQYIRELNLIIKVFREPFVSNSKLFSANDVENIFSRIVDIHELSVKLLGHIEDTVEMTDEGSPHPLVGSCFEDLAEELAFDPYESYARDILRPGFHDRFLSQLSKPGAALYLQSIGEGFKEAVQYVLPRLLLAPVYHCLHYFELLKQLEEKSEDQEDKECLKQAITALLNVQSGMEKICSKSLAKRRLSESACRFYSQQMKGKQLAIKKMNEIQKNIDGWEGKDIGQCCNEFIMEGTLTRVGAKHERHIFLFDGLMICCKSNHGQPRLPGASNAEYRLKEKFFMRKVQINDKDDTNEYKHAFEIILKDENSVIFSAKSAEEKNNWMAALISLQYRSTLERMLDVTMLQEEKEEQMRLPSADVYRFAEPDSEENIIFEENMQPKAGIPIIKAGTVIKLIERLTYHMYADPNFVRTFLTTYRSFCKPQELLSLIIERFEIPEPEPTEADRIAIENGDQPLSAELKRFRKEYIQPVQLRVLNVCRHWVEHHFYDFERDAYLLQRMEEFIGTVRGKAMKKWVESITKIIQRKKIARDNGPGHNITFQSSPPTVEWHISRPGHIETFDLLTLHPIEIARQLTLLESDLYRAVQPSELVGSVWTKEDKEINSPNLLKMIRHTTNLTLWFEKCIVETENLEERVAVVSRIIEILQVFQELNNFNGVLEVVSAMNSSPVYRLDHTFEQIPSRQKKILEEAHELSEDHYKKYLAKLRSINPPCVPFFGIYLTNILKTEEGNPEVLKRHGKELINFSKRRKVAEITGEIQQYQNQPYCLRVESDIKRFFENLNPMGNSMEKEFTDYLFNKSLEIEPRNPKPLPRFPKKYSYPLKSPGVRPSNPRPGTMRHPTPLQQEPRKISYSRIPESETESTASAPNSPRTPLTPPPASGASSTTDVCSVFDSDHSSPFHSRSASVSSISLTKGTDEVPVPPPVPPRRRPESAPAESSPSKIMSKHLDSPPAIPPRQPTSKAYSPRYSISDRTSISDPPESPPLLPPREPVRTPDVFSSSPLHLQPPPLGKKSDHGNAFFPNSPSPFTPPPPQTPSPHGTRRHLPSPPLTQEVDLHSIAGPPVPPRQSTSQHIPKLPPKTYKREHTHPSMHRDGPPLLENAHSS

SEQ ID NO: 40365 - protein, 1276 aa, Homo sapiens
MLCQAQPRSASDVEERVQKSFPHPIDKWAIADAQSAIEKRKRRNPLSLPVEKIHPLLKEVLGYKIDHQVSVYIVAVLEYISADILKLVGNYVRNIRHYEITKQDIKVAMCADKVLMDMFHQDVEDINILSLTDEEPSTSGEQTYYDLVKAFMAEIRQYIRELNLIIKVFREPFVSNSKLFSANDVENIFSRIVDIHELSVKLLGHIEDTVEMTDEGSPHPLVGSCFEDLAEELAFDPYESYARDILRPGFHDRFLSQLSKPGAALYLQSIGEGFKEAVQYVLPRLLLAPVYHCLHYFELLKQLEEKSEDQEDKECLKQAITALLNVQSGMEKICSKSLAKRRLSESACRFYSQQMKGKQLAIKKMNEIQKNIDGWEGKDIGQCCNEFIMEGTLTRVGAKHERHIFLFDGLMICCKSNHGQPRLPGASNAEYRLKEKFFMRKVQINDKDDTNEYKHAFEIILKDENSVIFSAKSAEEKNNWMAALISLQYRSTLERMLDVTMLQEEKEEQMRLPSADVYRFAEPDSEENIIFEENMQPKAGIPIIKAGTVIKLIERLTYHMYADPNFVRTFLTTYRSFCKPQELLSLIIERFEIPEPEPTEADRIAIENGDQPLSAELKRFRKEYIQPVQLRVLNVCRHWVEHHFYDFERDAYLLQRMEEFIGTVRGKAMKKWVESITKIIQRKKIARDNGPGHNITFQSSPPTVEWHISRPGHIETFDLLTLHPIEIARQLTLLESDLYRAVQPSELVGSVWTKEDKEINSPNLLKMIRHTTNLTLWFEKCIVETENLEERVAVVSRIIEILQVFQELNNFNGVLEVVSAMNSSPVYRLDHTFEQIPSRQKKILEEAHELSEDHYKKYLAKLRSINPPCVPFFGIYLTNILKTEEGNPEVLKRHGKELINFSKRRKVAEITGEIQQYQNQPYCLRVESDIKRFFENLNPMGNSMEKEFTDYLFNKSLEIEPRNPKPLPRFPKKYSYPLKSPGVRPSNPRPGTMRHPTPLQQEPRKISYSRIPESETESTASAPNSPRTPLTPPPASGASSTTDVCSVFDSDHSSPFHSSNDTVFIQVTLPHGPRSASVSSISLTKGTDEVPVPPPVPPRRRPESAPAESSPSKIMSKHLDSPPAIPPRQPTSKAYSPRYSISDRTSISDPPESPPLLPPREPVRTPDVFSSSPLHLQPPPLGKKSDHGNAFFPNSPSPFTPPPPQTPSPHGTRRHLPSPPLTQEVDLHSIAGPPVPPRQSTSQHIPKLPPKTYKREHTHPSMHRDGPPLLENAHSS

SEQ ID NO: 40366 - protein, 465 aa, Homo sapiens [sequence omitted]

SEQ ID NO: 40367 - protein, 814 aa, Homo sapiens
MRLAISFLRTHKLLSSVCSENESEAEADQQMDNLYLKALEGFIAVVTQDGDMIFLSENISKFMGLTQVELTGHSIFDFTHPCDHEEIRENLSLKNGSGFGKKSKDMSTERDFFMRMKCTVTNRGRTVNLKSATWKVLHCTGQVKVYNNCPPHNSLCGYKEPLLSCLIIMCEPIQHPSHMDIPLDSKTFLSRHSMDMKFTYCDDRITELIGYHPEELLGRSAYEFYHALDSENMTKSHQNLCTKGQVVSGQYRMLAKHGGYVWLETQGTVIYNPRNLQPQCIMCVNYVLSEIEKNDVVFSMDQTESLFKPHLMAMNSIFDSSGKGAVSEKSNFLFTKLKEEPEELAQLAPTPGDAIISLDFGNQNFEESSAYGKAILPPSQPWATELRSHSTQSEAGSLPAFTVPQAAAPGSTTPSATSSSSSCSTPNSPEDYYTSLDNDLKIEVIEKLFAMDTEAKDQCSTQTDFNELDLETLAPYIPMDGEDFQLSPICPEERLLAENPQSTPQHCFSAMTNIFQPLAPVAPHSPFLLDKFQQQLESKKTEPEHRPMSSIFFDAGSKASLPPCCGQASTPLSSMGGRSNTQWPPDPPLHFGPTKWAVGDQRTEFLGAAPLGPPVSPPHVSTFKTRSAKGFGARGPDVLSPAMVALSNKLKLKRQLEYEEQAFQDLSGGDPPGGSTSHLMWKRMKNLRGGSCPLMPDKPLSANVPNDKFTQNPMRGLGHPLRHLPLPQPPSAISPGENSKSRFPPQCYATQYQDYSLSSAHKVSGMASRLLGPSFESYLLPELTRYDCEVNVPVLGSSTLLQGGDLLRALDQAT

SEQ ID NO: 40368 - protein, 425 aa, Homo sapiens [sequence omitted]

SEQ ID NO: 40369 - protein, 1728 aa, Homo sapiens
MQGFARLLINLLKKKELLSRADLELPWRPLYDMVERILYSKTEHLGLNWFPNSVENILKTLVKSCRPYFPADATAEMLEEWRPLMCPFDVTMQKAITYFEIFLPTSLPPELHHKGFKLWFDELIGLWVSVQNLPQWEGQLVNLFARLATDNIGYIDWDPYVPKIFTRILRSLNLPVGSSQVLVPRFLTNAYDIGHAVIWITAMMGGPSKLVQKHLAGLFNSITSFYHPSNNGRWLNKLMKLLQRLPNSVVRRLHRERYKKPSWLTPVPDSHKLTDQDVTDFVQCIIQPVLLAMFSKTGSLEAAQALQNLALMRPELVIPPVLERTYPALETLTEPHQLTATLSCVIGVARSLVSGGRWFPEGPTHMLPLLMRALPGVDPNDFSKCMITFQFIATFSTLVPLVDCSSVLQERNDLTEVERELCSATAEFEDFVLQFMDRCFGLIESSTLEQTREETETEKMTHLESLVELGLSSTFSTILTQCSKEIFMVALQKVFNFSTSHIFETRVAGRMVADMCRAAVKCCPEESLKLFVPHCCSVITQLTMNDDVLNDEELDKELLWNLQLLSEITRVDGRKLLLYREQLVKILQRTLHLTCKQGYTLSCNLLHHLLRSTTLIYPTEYCSVPGGFDKPPSEYFPIKDWGKPGDLWNLGIQWHVPSSEEVSFAFYLLDSFLQPELVKLQHCGDGKLEMSRDDILQSLTIVHNCLIGSGNLLPPLKGEPVTNLVPSMVSLEETKLYTGLEYDLSRENHREVIATVIRKLLNHILDNSEDDTKSLFLIIKIIGDLLQFQGSHKHEFDSRWKSFNLVKKSMENRLHGKKQHIRALLIDRVMLQHELRTLTVEGCEYKKIHQDMIRDLLRLSTSSYSQVRNKAQQTFFAALGAYNFCCRDIIPLVLEFLRPDRQGVTQQQFKGALYCLLGNHSGVCLANLHDWDCIVQTWPAIVSSGLSQAMSLEKPSIVRLFDDLAEKIHRQYETIGLDFTIPKSCVEIAELLQQSKNPSINQILLSPEKIKEGIKRQQEKNADALRNYENLVDTLLDGVEQRNLPWKFEHIGIGLLSLLLRDDRVLPLRAIRFFVENLNHDAIVVRKMAISAVAGILKQLKRTHKKLTINPCEISGCPKPTQIIAGDRPDNHWLHYDSKTIPRTKKEWESSCFVEKTHWGYYTWPKNMVVYAGVEEQPKLGRSREDMTEAEQIIFDHFSDPKFVEQLITFLSLEDRKGKDKFNPRRFCLFKGIFRNFDDAFLPVLKPHLEHLVADSHESTQRCVAEIIAGLIRGSKHWTFEKVEKLWELLCPLLRTALSNITVETYNDWGACIATSCESRDPRKLHWLFELLLESPLSGEGGSFVDACRLYVLQGGLAQQEWRVPELLHRLLKYLEPKLTQVYKNVRERIGSVLTYIFMIDVSLPNTTPTISPHVPEFTARILEKLKPLMDVDEEIQNHVMEENGIGEEDERTQGIKLLKTILKWLMASAGRSFSTAVTEQLQLLPLFFKIAPVENDNSYDELKRDAKLCLSLMSQGLLYPHQVPLVLQVLKQTARSSSWHARYTVLTYLQTMVFYNLFIFLNNEDAVKDIRWLVISLLEDEQLEVREMAATTLSGLLQCNFLTMDSPMQIHFEQLCKTKLPKKRKRDPGSVGDTIPSAELVKRHAGVLGLGACVLSSPYDVPTWMPQLLMNLSAHLNDPQPIEMTVKKTLSNFRRTHHDNWQEHKQQFTDDQLLVLTDLLVSPCYYA

SEQ ID NO: 40370 - protein, 154 aa, Homo sapiens
MRRYKVSLFYLGCSRTPNVKLSSCLGLPCCWDYSYKFIQLSEFGFGQVIIVSEEPWKENISCSSTTFIKSTICLSVCFRMYTEDEARKIGVVGWVKNTSKGTVTGQVQGPEDKVNSMKSWLSKVGSPSSRIDRTNFSNEKTISKLEYSNFSIRY

SEQ ID NO: 40371 - protein, 127 aa, Homo sapiens
MCPLPLAAAAVAAPRAPLRLLNRGLAAAMSTAQSLKSVDYEVFGRVQGVCFRMYTEDEARKIGVVGWVKNTSKGTVTGQVQGPEDKVNSMKSWLSKVGSPSSRIDRTNFSNEKTISKLEYSNFSIRY

SEQ ID NO: 40372 - protein, 459 aa, Homo sapiens
MVQSSPPISGEDNKWERESQETTRELLKVKDRLIEVERNNATLQAEKQALKTQLKQLETQNNNLQAQILALQRQTVSLQEQNTTLQTQNAKLQVENSTLNSQSTSLMNQNAQLLIQQSSLENENESVIKEREDLKSLYDSLIKDHEKLELLHERQASEYESLISKHGTLKSAHKNLEVEHRDLEDRYNQLLKQKGQLEDLEKMLKVEQEKMLLENKNHETVAAEYKKLCGENDRLNHTYSQLLKETEVLQTDHKNLKSLLNNSKLEQTRLEAEFSKLKEQYQQLDITSTKLNNQCELLSQLKGNLEEENRHLLDQIQTLMLQNRTLLEQNMESKDLFHVEQRQYIDKLNELRRQKEKLEEKIMDQYKFYDPSPPRRRGNWITLKMRKLIKSKKDINRERQKSLTLTPTRSDSSEGFLQLPHQDSQDSSSVGSNSLEDGQTLGTKKSSSECLNSLNIVLI

SEQ ID NO: 40373 - protein, 320 aa, Homo sapiens
MFQIGRSTESPIDFVVTDTVPGSQSNSDTQSVQSTISRFACRIICERNPPFTARIYAAGFDSSKNIFLGEKAAKWKTSDGQMDGLTTNGVLVMHPRNGFTEDSKPGIWREISVCGNVFSLRETRSAQQRGKMVEIETNQLQDGSLIDLCGATLLWRTAEGLSHTPTVKHLEALRQEINAARPQCPVGFNTLAFPSMKRKDVVDEKQPWVYLNCGHVHGYHNWGNKEERDGKDRECPMCRSVGPYVPLWLGCEAGFYVDAGPPTHAFSPCGHVCSEKTTAYWSQIPLPHGTHTFHAACPFCAHQLAGEQGYIRLIFQGPLD

SEQ ID NO: 40374 - protein, 269 aa, Homo sapiens [sequence omitted]

SEQ ID NO: 40375 - protein, 202 aa, Homo sapiens
MNPEYDYLFKLLLIGDSGVGKSCLLLRFADDTYTESYISTIGVDFKIRTIELDGKTIKLQIWDTAGQERFRTITSSYYRGAHGIIVVYDVTDQESFNNVKQWLQEIDRYASENVNKLLVGNKCDLTTKKVVDYTTAKEFADSLGIPFLETSAKNATNVEQSFMTMAAEIKKRMGPGATAGGAEKSNVKIQSTPVKQSGGGCC

SEQ ID NO: 40376 - protein, 372 aa, Homo sapiens
MHPEGNGRSGFLIHGERQKDKLVVLECYVRKDLVYTKANPTFHHWKVDNRKFGLTFQSPADARAFDRGVRKAIEDLIEGSTTSSSTIHNEAELGDDDVFTTATDSSSNSSQKREQPTRTISSPTSCEHRRIYTLGHLHDSYPTDHYHLDQPMPRPYRQVSFPDDDEEIVRINPREKIWMTGYEDYRHAPVRGKYPDPSEDADSSYVRFAKGEVPKHDYNYPYVDSSDFGLGEDPKGRGGSVIKTQPSRGKSRRRKEDGERSRCVYCRDMFNHEENRRGHCQDAPDSVRTCIRRVSCMWCADSMLYHCMSDPEGDYTDPCSCDTSDEKFCLRWMALIALSFLAPCMCCYLPLRACYHCGVMCRCCGGKHKAAA

SEQ ID NO: 40377 - protein, 841 aa, Homo sapiens
MDSLSSSFSSPNDPDGQNDIFWDQNSPLTKQLGKGRKKQIYTTDSDEISHIVNRIAPQDEKPTTNSMLDMWIGETAIPCTPSVAKGKSRAKISCTKLKTQSQEEELMKLAKQFDKNMEELDVIQEQNKRNYDFTQMISETEILSNYKDNIQMWSLHNIVPEIDNATKKPIKGNTKISVANNQNSSQKPFDQIAEAAFNAIFDGSTQKCSGQLSQELPEAFWSTSNTTFVKTNALKEEKIITNETLVIEKLSNKTPRSLSSQVDTPIMTKSCVTSCTKEPETSNKYIDAFTTSDFEDDWENLLGSEPFAMQNIDMPELFPSKTAHVTDQKEICTFNSKTVKNTSRANTSPDARLGDSKVLQDLSSKTYDRELIDAEYRFSPNSNKSNKLSTGNKMKFENSSNKIVIQDEIQNCIVTSNLTKIKEDILTNSTEASERKSALNTRYSNEQKNKCILNQSIKAPVNTDLFGSANLGSKTSVSNPNQTSASKVGSFFDDWNDPSFANEIIKACHQLDNTWEADDVDDDLLYQACDDIERLTQQQDIRKDSKTSESICEINNNSEHGAKLTQQQDIRKDSKTSESICEINNNSEHGAKNMFAISKQGSNLVQSKHLNPGSISVQTSLTNSSQIDKPMKMEKGEMYGNSPRFLGATNLTMYSKISNCQINNLHVSYTNTDVPIQVNSSKLVLPGSSSLNVTSDHMNTEITTYKKKLSTNQPCHKTVTDEAQSNLNTTVGFSKFTFTRMKNSQILSQFNQNCITGSMSDTKITQGVEKKKGVNPLLEEAVGQQSLVKLSESLKQSSKEEEEKNRKCSPEEIQRKRQEALVRRMAKARASSVNAAPTSFL

SEQ ID NO: 40378 - protein, 390 aa, Homo sapiens
MGLRVLHRGDSSPDGPCNSVVDPSRYTDAQIPLTASRRTWIFPVFWCGIRGNEASYPLEMCSHFDADEIKRLGKRFKKLDLDNSGSLSVEEFMSLPELQQNPLVQRVIDIFDTDGNGEVDFKEFIEGVSQFSVKGDKEQKLRFAFRIYDMDKDGYISNGELFQVLKMMVGNNLKDTQLQQIVDKTIINADKDGDGRISFEEFCARGGKTGLFAGLASSVSMRPASPPSPAADSCSACRFFARRPPLRVTWVKPSSALALCVSISDSIPGNLKALPAETRAQLHHAEASLSQPPLQLRPFPKTSQAGDLQDLGPYVCVRKAVGKGDKQIRAVVKEHSVRSQERIWHYPGITTANMPGHLGQNTESGRDKLPMFGVWFPGCRFWGLWVWRLP

SEQ ID NO: 40379 - protein, 291 aa, Homo sapiens [sequence omitted]

SEQ ID NO: 40380 - protein, 319 aa, Homo sapiens
MATKGGTVKAASGFNAMEDAQTLRKAMKGLGTDEDAIISVLAYRNTAQRQEIRTAYKSTIGRDLIDDLKSELSGNFEQVIVGMMTPTVLYDVQELRRAMKGAGTDEGCLIEILASRTPEEIRRISQTYQQQYGRSLEDDIRSDTSFMFQRVLVSLSAGGRDEGNYLDDALVRQDAQDLYEAGEKKWGTDEVKFLTVLCSRNRNHLLHVFDEYKRISQKDIEQSIKSETSGSFEDALLAIVKCMRNKSAYFAEKLYKSMKGLGTDDNTLIRVMVSRAEIDMLDIRAHFKRLYGKSLYSFIKGDTSGDYRKVLLVLCGGDD

SEQ ID NO: 40381 - protein, 189 aa, Homo sapiens [sequence omitted]

SEQ ID NO: 40382 - protein, 896 aa, Homo sapiens
MLISEVQIEHDPELEKESPGLKNSPIDESEVQTATDSPSVKPNELEEESTPSIQTETLVQQEEPCEEEAEKATCDSDFAVETLELETQGEEVKEEIPLVASASVSIEQFTENAEECALNQQMFNSDLEKKGAEIINPKTALLPSDSVFAEERNLKGILEESPSEAEDFISGITQTMVEAVAEVEKNETVSEILPSTCIVTLVPGIPTGDEKTVDKKNISEKKGNMDEKEEKEFNTKETRMDLQIGTEKAEKNEGRMDAEKVEKMAAMKEKPAENTLFKAYPNKGVGQANKPDETSKTSILAVSDVSSSKPSIKAVIVSSPKAKATVSKTENQKSFPKSVPRDQINAEKKLSAKEFGLLKPTSARSGLAESSSKFKPTQSSLTRGGSGRISALQGKLSKLDYRDITKQSQETEARPSIMKRDDSNNKTLAEQNTKNPKSTTGRSSKSKEEPLFPFNLDEFVTVDEVIEEVNPSQAKQNPLKGKRKETLKNVPFSELNLKKKKGKTSTPRGVEGELSFVTLDEIGEEEDAAAHLAQALVTVDEVIDEEELNMEEMVKNSNSLFTLDELIDQDDCISHSEPKDVTVLSVAEEQDLLKQERLVTVDEIGEVEELPLNESADITFATLNTKGNEGDTVRDSIGFISSQVPEDPSTLVTVDEIQDDSSDLHLVTLDEVTEEDEDSLADFNNLKEELNFVTVDEVGEEEDGDNDLKVELAQSKNDHPTDKKGNRKKRAVDTKKTKLESLSQVGPVNENVMEEDLKTMIERHLTAKTPTKRVRIGKTLPSEKAVVTEPAKGEEAFQMSEVDEESGLKDSEPERKRKKTEDSSSGKSVASDVPEELDFLVPKAGFFCPICSLFYSGEKAMTNHCKSTRHKQNTEKFMAKQRKEKEQNEAEERSSR

SEQ ID NO: 40383 - protein, 139 aa, Homo sapiens
MQLTHQLDLFPECRVTLLLFKDVKNAGDLRRKAMEGTIDGSLINPTVFHSCCPGWSAMARSWLTATSASRVQAIVLPQPPELLGLQIVDPFQILVAANKAVHLYKLGKMKTRTLSTEIIFNLSPNNNVMCTFLFLLTVS

SEQ ID NO: 40384 - protein, 63 aa, Homo sapiens
MAAGRLFLSRLRAPFSSMAKSPLEGVSSSRGLHAGRGPRRLSIEGNIGNILKQIRMRAPIQET

SEQ ID NO: 40385 - protein, 83 aa, Homo sapiens [sequence omitted]

SEQ ID NO: 40386 - protein, 30 aa, Homo sapiens
MGRAGTMAVAAEVAGAGRLAVEEAVVLRGL

SEQ ID NO: 40387 - protein, 319 aa, Homo sapiens
MSVFFFIFLNIFLLAFSSPGSQPLLNSPPSFVCWSRGFMEMNGRGELVESLKRFCASTRLPPTPLLLFPEEEATNGREGLLRFSSWPFSIQDVVQPLTLQVQRPLVSVTVSDASWVSELLWSLFVPFTVYQVRWLRPVHRQLGEANEEFALRVQQLVAKELGQTGTRLTPADKAEHMKRQRHPRLRPQSAQSSFPPSPGPSPDVQLATLAQRVKEVLPHVPLGVIQRDLAKTGCVDLTITNLLEGAVAFMPEDITKGTQSLPTASASKFPSSGPVTPQPTALTFAKSSWARQESLQERKQALYEYARRRFTERRAQEAD

SEQ ID NO: 40388 - protein, 282 aa, Homo sapiens
MSVFFFIFLNIFLLAFSSPGSQPLLNSPPSFVCWSRGFMEMNGRGELVESLKRFCASTRLPPTPLLLFPEEEATNGREGLLRFSSWPFSIQDVVQPLTLQVQRPLVSVTVSDASWVSELLWSLFVPFTVYQVRWLRPVHRQLGEANEEFALRVQQLVAKELGQTGTRLTPADKAEHMKRQRHPRLRPQSAQSSFPPSPGPSPDVQLATLAQRVKEVLPHVPLGVIQRDLAKTGCVDLTITNLLEGAVAFMPEDITKGTQSLPTASASKAFDACLMMMTPQAL

SEQ ID NO: 40389 - protein, 333 aa, Homo sapiens [sequence omitted]

SEQ ID NO: 40390 - protein, 204 aa, Homo sapiens [sequence omitted]

SEQ ID NO: 40391 - protein, 224 aa, Homo sapiens [sequence omitted]

SEQ ID NO: 40392 - protein, 862 aa, Homo sapiens [sequence omitted]

SEQ ID NO: 40393 - protein, 1834 aa, Homo sapiens [sequence omitted]

SEQ ID NO: 40394 - protein, 118 aa, Homo sapiens
MAKAFKSPLSSPQQTQLLGELEKDPKLVYHIGLTPAKLPDLVENNPLVAIEMLLKLMQSSQITEYFSVLVNMDMSLHSMEVVNRLTTAVDLPPEFIHLYISNCISTCEQIKDKYMQVI

SEQ ID NO: 40395 - protein, 413 aa, Homo sapiens
MVVPLLSLHVKSLGASPTVAGIVGSSYGILQLFSSTLVGCWSDVVGRRSSLLACILLSALGYLLLGAATNVFLFVLARVPAGIFKHTLSISRALLSDVVPEKERPLVIGHFNTASGVGFILGPVVGGYLTELEDGFYLTAFICFLVFILNAGLVWFFPWREAKPGSTEKGLPLRKTHVLLGRSHDTVQEAATSRRARASKKTAQPWVEVVLALRNMKNLLFSEMWDIFLVRLLMAMAVMLYYSNFVLALEERFGVRPKVTGYLISYSSMLGAVAGLALGPILRLYKHNSQALLLHSSILTCTLLLLYSLAPTMGAVVLSSTLLSFSTAIGRTCITDLQLTVGGAQASGTLIGVGQSVTAVGRIIAPLLSGVAQEVSPCGPPSLGAVLALVAIFIMSLNKRHSSGDGNSKLKSE

SEQ ID NO: 40396 - protein, 403 aa, Homo sapiens
MKLLLGIALLAYVASVWGNFVNMRSIQENGELKIESKIEEMVEPLREKIRDLEKSFTQKYPPVKFLSEKDRKRILITGGAGFVGSHLTDKLMMDGHEVTVVDNFFTGRKRNVEHWIGHENFELINHDVVEPLYIEVDQIYHLASPASPPNYMYNPIKTLKTNTIGTLNMLGLAKRVGARLLLASTSEVYGDPEVHPQSEDYWGHVNPIGPRACYDEGKRVAETMCYAYMKQEGVEVRVARIFNTFGPRMHMNDGRVVSNFILQALQGEPLTVYGSGSQTRAFQYVSDLVNGLVALMNSNVSSPVNLGNPEEHTILEFAQLIKNLVGSGSEIQFLSEAQDDPQKRKPDIKKAKLMLGWEPVVPLEEGLNKAIHYFRKELEYQANNQYIPKPKPARIKKGRTRHS

SEQ ID NO: 40397 - protein, 18 aa, Homo sapiens
MAASISEASDAMDPTVVC

SEQ ID NO: 40398 - protein, 684 aa, Homo sapiens
MGQRLNVSQLTINTAIVYMHRFYMHHSFTKFNKNIISSTALFLAAKVEEQARKLEHVIKVAHACLHPLEPLLDTKCDAYLQQTQELVILETIMLQTLGFEITIEHPHTDVVKCTQLVRASKDLAQTSYFMATNSLHLTTFCLQYKPTVIACVCIHLACKWSNWEIPVSTDGKHWWEYVDPTVTLELLDELTHEFLQILEKTPNRLKKIRNWRANQAARKPKVDGQVSETPLLGSSLVQNSILVDSVTGVPTNPSFQKPSTSAFPAPVPLNSGNISVQDSHTSDNLSMLATGMPSTSYGLSSHQEWPQHQDSARTEQLYSQKQETSLSGSQYNINFQQGPSISLHSGLHHRPDKISDHSSVKQEYTHKAGSSKHHGPISTTPGIIPQKMSLDKYREKRKLETLDLDVRDHYIAAQVEQQHKQGQSQAASSSSVTSPIKMKIPIANTEKYMADKKEKSGSLKLRIPIPPTDKSASKEELKMKIKVSSSERHSSSDEGSGKSKHSSPHISRDHKEKHKEHPSSRHHTSSHKHSHSHSGSSSGGSKHSADGIPPTVLRSPVGLSSDGISSSSSSSRKRLHVNDASHNHHSKMSKSSKSSGSSSSSSSSVKQYISSHNSVFNHPLPPPPPVTYQVGYGHLSTLVKLDKKPVETNGPDANHEYSTSSQHMDYKDTFDMLDSLLSAQGMNM

SEQ ID NO: 40399 - protein, 484 aa, Homo sapiens [sequence omitted]

SEQ ID NO: 40400 - protein, 496 aa, Homo sapiens [sequence omitted]

SEQ ID NO: 40401 - protein, 1086 aa, Homo sapiens
MDSQQTDFRAHNVPLKLPMPEPGELEERFAIVLNAMNLPPDKARLLRQYDNEKKWELICDQERFQVKNPPHTYIQKLKGYLDPAVTRKKFRRRVQESTQVLRELEISLRTNHIGWVREFLNEENKGLDVLVEYLSFAQYAVTFDFESVESTVESSVDKSKPWSRSIEDLHRGSNLPSPVGNSVSRSGRHSALRYNTLPSRRTLKNSRLVSKKDDVHVCIMCLRAIMNYQYGFNMVMSHPHAVNEIALSLNNKNPRTKALVLELLAAVCLVRGGHEIILSAFDNFKEVCGEKQRFEKLMEHFRNEDNNIDFMVASMQFINIVVHSVEDMNFRVHLQYEFTKLGLDEYLDKLKHTESDKLQVQIQAYLDNVFDVGALLEDAETKNAALERVEELEENISHLSEKLQDTENEAMSKIVELEKQLMQRNKELDVVREIYKDANTQVHTLRKMVKEKEEAIQRQSTLEKKIHELEKQGTIKIQKKGDGDIAILPVVASGTLSMGSEVVAGNSVGPTMGAASSGPLPPPPPPLPPSSDTPETVQNGPVTPPMPPPPPPPPPPPPPPPPPPPPPLPGPAAETVPAPPLAPPLPSAPPLPGTSSPTVVFNSGLAAVKIKKPIKTKFRMPVFNWVALKPNQINGTVFNEIDDERILEDLNVDEFEEIFKTKAQGPAIDLSSSKQKIPQKGSNKVTLLEANRAKNLAITLRKAGKTADEICKAIHVFDLKTLPVDFVECLMRFLPTENEVKVLRLYERERKPLENLSDEDRFMMQFSKIERLMQKMTIMAFIGNFAESIQMLTPQLHAIIAASVSIKSSQKLKKILEIILALGNYMNSSKRGAVYGFKLQSLDLLLDTKSTDRKQTLLHYISNVVKEKYHQVSLFYNELHYVEKAAAVSLENVLLDVKELQRGMDLTKREYTMHDHNTLLKEFILNNEGKLKKLQDDAKIAQDAFDDVVKYFGENPKTTPPSVFFPVFVRFVKAYKQAEEENELRKKQEQALMEKLLEQEALMEQQDPKSPSHKSKRQQQELIAELRRRQVKDNRHVYEGKDGAIEDIITDLRNQPYRRADAVRRSVRRRFDDQNLRSVNGAEITM

SEQ ID NO: 40402 - protein, 87 aa, Homo sapiens
MRPGTGAERGGLMMGHPGMHYAPMGMHPMGQRANMPPVPHGMMPQMMPPMGGPPMGQMPGMMSSVMPGMMMSHMSQASMQPALPVIM

SEQ ID NO: 40403 - protein, 401 aa, Homo sapiens
MIFPSSSGNPGGSSNCRTPYRKQQSLVPAHPMAPPSPSTTSSNNNSSSSSNSGWDQLSKTNLYIRGLPPHTTDQDLVKLCQPYGKIVSTKAILDKTTNKCKGYGFVDFDSPAAAQKAVSALKASGVQAQMAKQQEQDPTNLYISNLPLSMDEQELENMLKPFGQVISTRILRDSSGTSRGVGFARMESTEKCEAVIGHFNGKFIKTPPGVSAPTEPLLCKFADGGQKKRQNPNKYIPNGRPWHREGEAGMTLTYDPTTAAIQNGFYPSPYSIATNRMITQTSITPYIASPVSAYQVQSPSWMQPQPYILQHPGAVLTPSMEHTMSLQPASMISPLAQQMSHLSLGSTGTYMPATSAMQGAYLPQYAHMQTTAVPVEEASGQQQVAVETSNDHSPYTFQPNK

SEQ ID NO: 40404 - protein, 389 aa, Homo sapiens
MAPPSPSTTSSNNNSSSSSNSGWDQLSKTNLYIRGLPPHTTDQDLVKLCQPYGKIVSTKAILDKTTNKCKGYGFVDFDSPAAAQKAVSALKASGVQAQMAKQQEQDPTNLYISNLPLSMDEQELENMLKPFGQVISTRILRDSSGTSRGVGFARMESTEKCEAVIGHFNGKFIKTPPGVSAPTEPLLCKFADGGQKKRQNPNKYIPNGRPWHREGEVRLAGMTLTYDPTTAAIQNGFYPSPYSIATNRMITQTSITPYIASPVSAYQVAKETRENKYRGSAIKVQSPSWMQPQPYILQHPGAVLTPSMEHTMSLQPASMISPLAQQMSHLSLGSTGTYMPATSAMQGAYLPQYAHMQTTAVPVEEASGQQQVAVETSNDHSPYTFQPNK

SEQ ID NO: 40405 - protein, 33 aa, Homo sapiens
MLQDEEEWIKTLASNSIKRMKPSGRHAWIEILQ

SEQ ID NO: 40406 - protein, 272 aa, Homo sapiens
MLAKAQKDHLSKLNIPDTATETQCSVPIQCTDKTDKQEALFKPQAKDDINRGAPSITSVTPRGLCRDEEDTSFESLSKFNVKFPPMDNDSTFLHSTPERPGILSPATSEAVCQEKFNMEFRDNPGNFVKTEETLFEIQGIDPIASAIQNLKTTDKTKPSNLVNTCIRTTLDRAACLPPGDHNALYVNSFPLLDPSDAPFPSLDSPGKAIRGPQQPIWKPFPNQDSDSVVLSGTDSELHIPRVCEFCQAVFPPSITSRGDFLRHLNSHFNGET

SEQ ID NO: 40407 - protein, 425 aa, Homo sapiens
MTAGINADGHLINTGQAMDSSDNSERTGERVSPDINETNTDTDLFVPTSSSSQLPVTIDSTGILQQNTNSLTTSSGQVHSSDLQGNYIQSPVSEETQAQNIQVSTAQPVVQHLQLQESQQPTSQAQIVQGITPQTIHGVQASGQNISQQALQNLQLQLNPGTFLIQAQTVTPSGQVTWQTFQVQGVQNLQNLQIQNTAAQQITLTPVQTLTLGQVAAGGAFTSTPVSLSTGQLPNLQTVTVNSIDSAGIQLHPGENADSPADIRIKEEEPDPEEWQLSGDSTLNTNDLTHLRVQVVDEEGDQQHQEGKRLRRVACTCPNCKEGGGRGTNLGKKKQHICHIPGCGKVYGKTSHLRAHLRWHSGERPFVCNWMYCGKRFTRSDELQRHRRTHTGEKKFVCPECSKRFMRSDHLAKHIKTHQNKKGPV

SEQ ID NO: 40408 - protein, 407 aa, Homo sapiens
MISREAADQLLIVAEGSYLIRESQRQPGTYTLALRFGSQTRNFRLYYDGKHFVGEKRFESIHDLVTDGLITLYIETKAAEYIAKMTINPIYEHVGYTTLNREPAYKKHMPVLKETHDERDSTGQDGVSEKRLTSLVRRATLKENEQIPKYEKIHNFKVHTFRGPHWCEYCANFMWGLIAQGVKCADCGLNVHKQCSKMVPNDCKPDLKHVKKVYSCDLTTLVKAHTTKRPMVVDMCIREIESRGLNSEGLYRVSGFSDLIEDVKMAFDRDGEKADISVNMYEDINIITGALKLYFRDLPIPLITYDAYPKFIESAKIMDPDEQLETLHEALKLLPPAHCETLRYLMAHLKRVTLHEKENLMNAENLGIVFGPTLMRSPELDAMAALNDIRYQRLVVELLIKNEDILF

SEQ ID NO: 40409 - protein, 1012 aa, Homo sapiens
MLLLCLGVPTGRPYNVDTESALLYQGPHNTLFGYSVVLHSHGANRWLLVGAPTANWLANASVINPGAIYRCRIGKNPGQTCEQLQLGSPNGEPCGKTCLEERDNQWLGVTLSRQPGENGSIVTCGHRWKNIFYIKNENKLPTGGCYGVPPDLRTELSKRIAPCYQDYVKKFGENFASCQAGISSFYTKDLIVMGAPGSSYWTGSLFVYNITTNKYKAFLDKQNQVKFGSYLGYSVGAGHFRSQHTTEVVGGAPQHEQIGKAYIFSIDEKELNILHEMKGKKLGSYFGASVCAVDLNADGFSDLLVGAPMQSTIREEGRVFVYINSGSGAVMNAMETNLVGSDKYAARFGESIVNLGDIDNDGFEDVAIGAPQEDDLQGAIYIYNGRADGISSTFSQRIEGLQISKSLSMFGQSISGQIDADNNGYVDVAVGAFRSDSAVLLRTRPVVIVDASLSHPESVNRTKFDCVENGWPSVCIDLTLCFSYKGKEVPGYIVLFYNMSLDVNRKAESPPRFYFSSNGTSDVITGSIQVSSREANCRTHQAFMRKDVRDILTPIQIEAAYHLGPHVISKRSTEEFPPLQPILQQKKEKDIMKKTINFARFCAHENCSADLQVSAKIGFLKPHENKTYLAVGSMKTLMLNVSLFNAGDDAYETTLHVKLPVGLYFIKILELEEKQINCEVTDNSGVVQLDCSIGYIYVDHLSRIDISFLLDVSSLSRAEEDLSITVHATCENEEEMDNLKHSRVTVAIPLKYEVKLTVHGFVNPTSFVYGSNDENEPETCMVEKMNLTFHVINTGNSMAPNVSVEIMVPNSFSPQTDKLFNILDVQTTTGECHFENYQRVCALEQQKSAMQTLKGIVRFLSKTDKRLLYCIKADPHCLNFLCNFGKMESGKEASVHIQLEGRPSILEMDETSALKFEIRATGFPEPNPRVIELNKDENVAHVLLEGLHHQRPKRYFTIVIISSSLLLGLIVLLLISYVMWKAGFFKRQYKSILQEENRRDSWSYINSKSNDD

SEQ ID NO: 40410 - protein, 366 aa, Homo sapiens
MLLLCLGVPTGRPYNVDTESALLYQGPHNTLFGYSVVLHSHGANRWLLVGAPTANWLANASVINPGAIYRCRIGKNPGQTCEQLQLGSPNGEPCGKTCLEERDNQWLGVTLSRQPGENGSIVTCGHRWKNIFYIKNENKLPTGGCYGVPPDLRTELSKRIAPCYQDYVKKFGENFASCQAGISSFYTKDLIVMGAPGSSYWTGSLFVYNITTNKYKAFLDKQNQVKFGSYLGYSVGAGHFRSQHTTEVVGGAPQHEQIGKAYIFSIDEKELNILHEMKGKKLGSYFGASVCAVDLNADGFSDLLVGAPMQSTIREEGRVFVYINSGSGAVMNAMETNLVGSDKYAARFGESIVNLGDIDNDGFEGN

SEQ ID NO: 40411 - protein, 668 aa, Homo sapiens [sequence omitted]

SEQ ID NO: 40412 - protein, 597 aa, Homo sapiens [sequence omitted]

SEQ ID NO: 40413 - protein, 17 aa, Homo sapiens
MVNAGAIVVTSLIKDWW

SEQ ID NO: 40414 - protein, 301 aa, Homo sapiens [sequence omitted]

SEQ ID NO: 40415 - protein, 87 aa, Homo sapiens
MAEIGEDLDKSDVSSLIFLMKDYMGRGKISKEKSFLDLVVELEKLNLVAPDQLDLLEKCLKNIHRIDLKTKIQKYKQSGKNFGLSVV

SEQ ID NO: 40416 - protein, 45 aa, Homo sapiens
MPPVRDGTRHSMQMTTQREQEWLYLYQTKSTLSQKLSQETLKYII

SEQ ID NO: 40417 - protein, 143 aa, Homo sapiens
MPLDKHMEMENISSEEVVEIEYVEKYTAPQPEQCMFHDDWISSIKGAEEWILTGSYDKTSRIWSLEGKSIMTIVGHTDVVKDVAWVKKDSLSCLLLSASMDQTILLWEWNVERNKVKALHCCRGHAGSVDSIAVDGSGTKVSS

SEQ ID NO: 40418 - protein, 177 aa, Homo sapiens
MSKKISGGSVVEMQGDEMTRIIWELIKEKLIFPYVELDLHSYDLGIENRDATNDQVTKDAAEAIKKHNVGVKCATITPDEKRVEEFKLKQMWKSPNGTIRNILGGTVFREAIICKNIPRLVSGWVKPIIIGRHAYGDQVSHVGNNVILHVFFFMAQKFPTCMCFILIFWYLHPLSKV

SEQ ID NO: 40419 - protein, 512 aa, Homo sapiens [sequence omitted]

SEQ ID NO: 40420 - protein, 40 aa, Homo sapiens
MTETLWATRCVSALGELSSLTISATSSSRNWGRVGSAMWT

SEQ ID NO: 40421 - protein, 238 aa, Homo sapiens [sequence omitted]

SEQ ID NO: 40422 - protein, 344 aa, Homo sapiens
MASPCSAMAYHHDSRRIFVGQDNGAVMEFHVSEDFNKMNFIKTYPAHQNRVSAIIFSLATEWVISTGHDKCVSWMCTRSGNMLGRHFFTSWASCLQYDFDTQYAFVGDYSGQITLLKLEQNTCSVITTLKGHEGSVACLWWDPIQRLLFSGASDNSIIMWDIGGRKGRTLLLQGHHDKVQSLCYLQLTRQLVSCSSDGGIAVWNMDVSREEAPQWLESDSCQKCEQPFFWNIKQMWDTKTLGLRQHHCRKCGQAVCGKCSSKRSSYPVMGFEFQVRVCDSCYDSIKDEDRTSLATFHEGKHNISHMSMDIARGLMVTCGTDRIVKIWDMTPVVGCSLATGFSPH

SEQ ID NO: 40423 - protein, 185 aa, Homo sapiens
MALYFCSGLLQDPAQFRHYALNVPLYTHFTSPIRRFADVLVHRLLAAALGYRERLDMAPDTLQKQADHCNDRRMASKRVQELSTSLFFAVLVKESGPLESEAMVMGILKQAFDVLVLRYGVQKRIYCNALALRSHHFQKVGKKPELTLVWEPEDMEQEPAQQCALNADPGPQVVFHKPWERSGCI

SEQ ID NO: 40424 - protein, 1156 aa, Homo sapiens
MLTKQNNSFQRSKRRYFKLRGRTLYYAKTAKSIIFDEVDLTDASVAESSTKNVNNSFTVITPCRKLILCADNRKEMEDWIAALKTVQNREHFEPTQYSMDHFSGMHNWYACSHARPTYCNVCREALSGVTSHGLSCEVCKFKAHKRCAVRATNNCKWTTLASIGKDIIEDADGIAMPHQWLEGNLPVSAKCTVCDKTCGSVLRLQDWRCLWCKAMVHTSCKESLLTKCPLGLCKVSVIPPTALNSIDSDGFWKASCPPSCTSPLLVFVNSKSGDNQGVKFLRRFKQLLNPAQVFDLMNGGPHLGLRLFQKFDTFRILVCGGDGSVGWVLSEIDSLNLHKQCQLGVLPLGTGNDLARVLGWGSACDDDTQLPQILEKLERASTKMLDRWSVMAYEAKLPRQASSSTVTEDFSEDSEVQQILFYEDSVAAHLSKILTSDQHSVVISSAKVLCETVKDFVARVGKAYEKTTESSEESEVMAKKCSVLKEKLDSLLKTLDDESQASSSLPNPPPTIAEEAEDGDGSGSICGSTGDRLVASACPARPQIFRPREQLMLRANSLKKAIRQIIEHTEKAVDEQNAQTQEQEGFVLGLSESEEKMDHRVCPPLSHSESFGVPKGRSQRKVSKSPCEKLISKGSLSLGSSASLPPQPGSRDGLPALNTKILYPNVRAGMSGSLPGGSVISRLLINADPFNSEPETLEYYTEKCVMNNYFGIGLDAKISLDFNNKRDEHPEKCRSRTKNMMWYGVLGTKELLHRTYKNLEQKVLLECDGRPIPLPSLQGIAVLNIPSYAGGTNFWGGTKEDDTFAAPSFDDKILEVVAVFGSMQMAVSRVIRLQHHRIAQCRTVKISILGDEGVPVQVDGEAWVQPPGYIRIVHKNRAQTLTRDRAFESTLKSWEDKQKCELPRPPSCSLHPEMLSEEEATQMDQFGQAAGVLIHSIREIAQSHRDMEQELAHAVNASSKSMDRVYGKPRTTEGLNCSFVLEMVNNFRALRSETELLLSGKMALQLDPPQKEQLGSALAEMDRQLRRLADTPWLCQSAEPGDEESVMLDLAKRSRSGKFRLVTKFKKEKNNKNKEAHSSLGAPVHLWGTEEVAAWLEHLSLCEYKDIFTRHDIRGSELLHLERRDLKDLGVTKVGHMKRILCGIKELSRSAPAVEA

SEQ ID NO: 40425 - protein, 1035 aa, Homo sapiens
MVRKEQLAAPGSGGPDPRPVRRPRPARSPDAPGRLEEEAEEAEGAEEPEGPRPRAWDFRTFRTRSTGQLELGRLRPCARGLEPADLAGSAPAEEEGRGSPASGSPDVEGARAAPLRRSLSFRHWSGPEAPQGRTLGGGRRHSSSGSLAWAPCDEAAAGTTLEPATATQPASEKRNTLDVGEVLSKNDALSDLERWERSKSKNRTLDNSDLQRLERARAAAGAGAASEHRLLRFFSGIFARRDGGPGGGPSPRSGASRPRGYFSLRRAPAEAHSSSAESIDGSPRRDAFVNSQEWTLSRSVPELKVGIVGNLASGKSALVHRYLTGTYVQEESPEGGRFKKEIVVDGQSYLLLIRDEGGPPEAQFAMWVDAVIFVFSLEDEISFQTVYHYYSRMANYRNTSEIPLVLVGTQDAISSANPRVIDDARARKLSNDLKRCTYYETCATYGLNVERVFQDVAQKIVATRKKQQLSIGPCKSLPNSPSHSSVCSAQVSAVHISQTSNGGGSLSDYSSSVPSTPSTSQKELRIDVPPTANTPTPVRKQSKRRSNLFTSRKGSDPDKEKKGLESRADSIGSGRAIPIKQGMLLKRSGKSLNKEWKKKYVTLCDNGVLTYHPSLHDYMQNVHGKEIDLLRTTVKVPGKRPPRATSACAPISSPKTNGLSKDMSSLHISPNSDTGLGDSVCSSPSISSTTSPKLDPPPSPHANRKKHRRKKSTSNFKADGLSGTAEEQEENFEFIIVSLTGQTWHFEATTYEERDAWVQAIESQILASLQSCESSKNKSRLTSQSEAMALQSIRNMRGNSHCVDCETQNPNWASLNLGALMCIECSGIHRNLGTHLSRVRSLDLDDWPVELIKVMSSIGNELANSVWEESSQGRTKPSVDSTREEKERWIRAKYEQKLFLAPLPCTELSLGQHLLRATADEDLRTAILLLAHGSRDEVNETCGEGDGRTALHLACRKGNVVLAQLLIWYGVDVTARDAHGNTALAYARQASSQECIDVLLQYGCPDERFVLMATPNLSRRNNNRNNSSGRVPTII

SEQ ID NO: 40426 - protein, 696 aa, Homo sapiens
MANYRNTSEIPLVLVGTQDAISSANPRVIDDARARKLSNDLKRCTYYETCATYGLNVERVFQDVAQKIVATRKKQQLSIGPCKSLPNSPSHSSVCSAQVSAVHISQTSNGGGSLSDYSSSVPSTPSTSQKELRIDVPPTANTPTPVRKQSKRRSNLFTSRKGSDPDKEKKGLESRADSIGSGRAIPIKQGMLLKRSGKSLNKEWKKKYVTLCDNGVLTYHPSLHDYMQNVHGKEIDLLRTTVKVPGKRPPRATSACAPISSPKTNGLSKDMSSLHISPNSGNVTSASGSQMASGISLVSFNSRPDGMHQRSYSVSSADQWSEATVIANSAISSDTGLGDSVCSSPSISSTTSPKLDPPPSPHANRKKHRRKKSTSNFKADGLSGTAEEQEENFEFIIVSLTGQTWHFEATTYEERDAWVQAIESQILASLQSCESSKNKSRLTSQSEAMALQSIRNMRGNSHCVDCETQNPNWASLNLGALMCIECSGIHRNLGTHLSRVRSLDLDDWPVELIKVMSSIGNELANSVWEESSQGRTKPSVDSTREEKERWIRAKYEQKLFLAPLPCTELSLGQHLLRATADEDLRTAILLLAHGSRDEVNETCGEGDGRTALHLACRKGNVVLAQLLIWYGVDVTARDAHGNTALAYARQASSQECIDVLLQYGCPDERFVLMATPNLSRRNNNRNNSSGRVPTII

SEQ ID NO: 40427 - protein, 638 aa, Homo sapiens
MGTQGSGRKRLPNRERLTAEDDALNQIAREAEARLAAKRAARAEAREIRMKELERQQKEIYQVQKKYYGLDTKWGDIEQWMEDSERYSRRSRRNTSASDEDERMSVGSRGSLRSQPDLEYGGPYAWTNGYDGELYGSQSLNRRSGRPSCLYSAARPSGSYRASVLDEGSFGGTRRGSTSGSRAPSEYSGHLNSSSRASSRASSARASPVVEERPEKDFTEKGSRNMPGLSAATLASLGGTSSRRGSGDTSISIDTEASIREIKELNELKDQIQDVEGKYMQGLKEMKDSLAEVEEKYKKAMVSNAQLDNEKTNFMYQVDTLKDMLLELEEQLAESRRQYEEKNKEFEREKHAHSILQFQFAEVKEALKQREEMLEEIRQLQQKQASSIREISDLQETIEWKDKKIGALERQKEFFDSVRSERDDLREEVVMLKEELKKHGIILNSEIATNGETSDTLNNVGYQGPTKMTKEELNALKSTGDGTLDIRLKKLVDERECLLEQIKKLKGQLEERQKIGKLDNLRSEDDVLENGTDMHVMDLQRDANRQISDLKFKLAKSEQEITALEQNVIRLESQVSRYKSAAENAEKIEDELKAEKRKLQRELRSALDKTEELEVSNGHLVKRLEKMKANRSALLSQQ

SEQ ID NO: 40428 - protein, 436 aa, Homo sapiens [sequence omitted]

SEQ ID NO: 40429 - protein, 312 aa, Homo sapiens [sequence omitted]

SEQ ID NO: 40430 - protein, 71 aa, Homo sapiens
MPSGCYVPRSEPRLLPAPPPAGARVGARGPGAWPSGVRRATAPPPATGTAARRRQTLTPKGKRKWQRYTRL

SEQ ID NO: 40431 - protein, 42 aa, Homo sapiens
MGVQVETISPGDGRTFPKRGQTCVVHYTGCSENQPCHPCTHL

SEQ ID NO: 40432 - protein, 389 aa, Homo sapiens
MIQQYLKVESCESSSHSMDEVSLSAFGEWTEIPGAHHIIPSGFMRVVELLAEGIPAHVIQLGKPVRCIHWDQASARPRGPEIEPRGEGDHNHDTGEGGQGGEEPRGGRWDEDEQWSVVVECEDCELIPADHVIVTVSLGVLKRQYTSFFRPGLPTEKVAAIHRLGIGTTDKIFLEFEEPFWGPECNSLQFVWEDEAESHTLTYPPELWYRKICGFDVLYPPERYGHVLSGWICGEEALVMEKCDDEAVAEICTEMLRQFTGNPNIPKPRRILRSAWGSNPYFRGSYSYTQVGSSGADVEKLAKPLPYTESSKTAHGSSTKQQPGHLFSSKCPEQPLDANRGAVKPMQVLFSGEATHRKYYSTTHGALLSGQREAARLIEMYRDLFQQGT

SEQ ID NO: 40433 - protein, 114 aa, Homo sapiens [sequence omitted]

SEQ ID NO: 40434 - protein, 456 aa, Homo sapiens
MRKISNHGSLRVAKVAYPLGLCVGVFIYVAYIKWHRATATQAFFSITRAAPGARWGQQAHSPLGTAADGHEVFYGIMFDAGSTGTRVHVFQFTRPPRETPTLTHETFKALKPGLSAYADDVEKSAQGIRELLDVAKQDIPFDFWKATPLVLKATAGLRLLPGEKAQKLLQKVKKVFKASPFLVGDDCVSIMNGTDEGVSAWITINFLTGSLKTPGGSSVGMLDLGGGSTQIAFLPRVEGTLQASPPGYLTALRMFNRTYKLYSYSYLGLGLMSARLAILGGVEGQPAKDGKELVSPCLSPSFKGEWEHAEVTYRVSGQKAAASLHELCAARVSEVLQNRVHRTEEVKHVDFYAFSYYYDLAAGVGLIDAEKGGSLVVGDFEIAAKYVCRTLETQPQSSPFSCMDLTYVSLLLQEFGFPRSKVLKLTRKIDNVETSWALGAIFHYIDSLNRQKSPAS

SEQ ID NO: 40435 - protein, 622 aa, Homo sapiens [sequence omitted]

SEQ ID NO: 40436 - protein, 225 aa, Homo sapiens
MPSSVQGLTGGRGSPASGSGLTWPLCSEIINYEFDTKDLVCLGLSSIVGVWYLLRKHWIANNLFGLAFSLNGVELLHLNNVSTGCILLGGLFIYDVFWVFGTNVMVTVAKSFEAPIKWIFIALLLRFDISLKKNTHTYFYTSFAAYIFGLGLTIFIMHIFKHAQPALLYLVPACIGFPVLVALAKGEVTEMFSYEESNPKDPAAVTESKEGTEASASKGLEKKEK

SEQ ID NO: 40437 - protein, 328 aa, Homo sapiens
MIFDPTMSKKKKKKKKPFMLDEEGDTQTEETQPSETKEVEPEPTEDKDLEADEEDTRKKDASDDLDDLNFFNQKKKKKKTKKIFDIDEAEEGVKDLKIESDVQEPTEPEDDLDIMLGNKKKKKKNVKFPDEDEILEKDEALEDEDNKKDDGISFSNQTGPAWAGSERDYTYEELLNRVFNIMREKNPDMVAGEKRKFVMKPPQVVRVGTKKTSFVNFTDICKLLHRQPKHLLAFLLAELGTSGSIDGNNQLVIKGRFQQKQIENVLRRYIKEYVTCHTCRSPDTILQKDTRLYFLQCETCHSRCSVASIKTGFQAVTGKRAQLRAKAN

SEQ ID NO: 40438 - protein, 537 aa, Homo sapiens
MFYHAYDSYLENAFPFDELRPLTCDGHDTWGSFSLTLIDALDTLLILGNVSEFQRVVEVLQDSVDFDIDVNASVFETNIRVVGGLLSAHLLSKKAGVEVEAGWPCSGPLLRMAEEAARKLLPAFQTPTGMPYGTVNLLHGVNPGETPVTCTAGIGTFIVEFATLSSLTGDPVFEDVARVALMRLWESRSDIGLVGNHIDVLTGKWVAQDAGIGAGVDSYFEYLVKGAILLQDKKLMAMFLEYNKAIRNYTRFDDWYLWVQMYKGTVSMPVFQSLEAYWPGLQSLIGDIDNAMRTFLNYYTVWKQFGGLPEFYNIPQGYTVEKREGYPLRPELIESAMYLYRATGDPTLLELGRDAVESIEKISKVECGFATIKDLRDHKLDNRMESFFLAETVKYLYLLFDPTNFIHNNGSTFDAVITPYGECILGAGGYIFNTEAHPIDPAALHCCQRLKEEQWEVEDLMREFYSLKRSRSKFQKNTVSSGPWEPPARPGTLFSPENHDQARERKPAKQKVPLLSCPSQPFTSKLALLGQVFLDSS

SEQ ID NO: 40439 - protein, 18 aa, Homo sapiens
MELVIWDLGLLIFLTVVS

SEQ ID NO: 40440 - protein, 1273 aa, Homo sapiens
MVANWRHHPAVVEQWSKVICALTSRLLRFTYGPSFPAFKVPDEDASLIPPEMDNECVAQTWFRFLHMLSNPVDLSNPAIISSTPKFQEQFLNVSGMPQELNQYPCLKHLPQIFFRAMRGISCLVDAFLGISRPRSDSAPPTPVNRLSMPQSAAVSTTPPHNRRHRAVTVNKATMKTSTVSTAHASKVQHQTSSTSPLSSPNQTSSEPRPLPAPRRPKVNSILNLFGSWLFDAAFVHCKLHNGINRDSSMTAITTQASMEFRRKGSQMSTDTMVSNPMFDASEFPDNYEAGRAEACGTLCRIFCSKKTGEEILPAYLSRFYMLLIQGLQINDYVCHPVLASVILNSPPLFCCDLKGIDVVVPYFISALETILPDRELSKFKSYVNPTELRRSSINILLSLLPLPHHFGTVKSEVVLEGKFSNDDSSSYDKPITFLSLKLRLVNILIGALQTETDPNNTQMILGAMLNIVQDSALLEAIGCQMEMGGGENNLKSHSRTNSGISSASGGSTEPTTPDSERPAQALLRDYALNTDSAAGLLIRSIHLVTQRLNSQWRQDMSISLAALELLSGLAKVKVMVDSGDRKRAISSVCTYIVYQCSRPAPLHSRDLHSMIVAAFQCLCVWLTEHPDMLDEKDCLKEVLEIVELGISGSKSKNNEQEVKYKGDKEPNPASMRVKDAAEATLTCIMQLLGAFPSPSGPASPCSLVNETTLIKYSRLPTINKHSFRYFVLDNSVILAMLEQPLGNEQNDFFPSVTVLVRGMSGRLAWAQQLCLLPRGAKANQKLFVPEPRPVPKNDVGFKYSVKHRPFPEEVDKIPFVKADLSIPDLHEIVTEELEERHEKLRSGMAQQIAYEIHLEQQSEEELQKRSFPDPVTDCKPPPPAQEFQTARLFLSHFGFLSLEALKEPANSRLPPHLIALDSTIPGFFDDIGYLDLLPCRPFDTVFIFYMKPGQKTNQEILKNVESSRTVQPHFLEFLLSLGWSVDVGRHPGWTGHVSTSWSINCCDDGEGSQQEEVISSEDIGASIFNGQKKVLYYADALTEIAFVVPSPVESLTDSLESNISDQDSDSNMDLMPGILKQPSLTLELFPNHTDNLNSSQRLSPSSRMRKLPQGRPVPPLGPETRVSVVWVERYDDIENFPLSELMTEISTGVETTANSSTSLRSTTLEKEVPVIFIHPLNTGLFRIKIQGATGKFNMVIPLVDGMIVSRRALGFLVRQTVINICRRKRLESDSYSPPHVRRKQKITDIVNKYRNKQLEPEFYTSLFQEVGLKNCSS

SEQ ID NO: 40441 - protein, 542 aa, Homo sapiens
MVDPLLTKYSVIMLDEAHERTLYTDIAIGLLKKIQKKRGDLRLIVASATLDADKFRDFFNQNETSDPARDTCVILTVEGRTFPVDIFYLQSPVPDYIKSTVETVVKIHQTEGDGDVLAFLTGQEEVETVVSMLIEQARALARTGMKRHLRVLPMYAGLPSFEQMKVFERVSRSVRKVIVATNVAETSITISGIVYVIDCGFVKLRAYNPRTAIECLVVVPVSQASANQRAGRGGRSRSGKCYRLYTEEAFDKLPQSTVPEMQRSNLAPVILQLKALGIDNVLRFHFMSPPPAQSMVQALELLYALGGLDKDCRLTEPLGMRIAEFPLNPMFAKMLLESGNFGCSQEILSIAAMMQIQNIFVVPPNQKSHAIRVHRKFAVEEGDHLTMLNIYEAFIKHNKDSKWCQEHFLNYKGLVRAATVREQLKKLLVKFQVPRKSSEGDPDLVLRCIVSGFFANAARFHSTGAYRTIRDDHELHIHPASVLYAEKPPRWVIYNEVIQTSKYYMRDVTAIESAWLLELAPHFYQQGTHLSLKAKRAKVQDP

SEQ ID NO: 40442 - protein, 410 aa, Homo sapiens [sequence omitted]

SEQ ID NO: 40443 - protein, 1226 aa, Homo sapiens
MLVSDCTASSSDLGSAIDKIIESTIGPDLIQNCITVTSAEDGGAETTRYLILQGPDDGAPMTSPMSSSTLAHSLAAIEALADGPTSTSTCLEAQGGPSSPVQLPPASGAEEPDLQSLEAMMEVVVVQQFKCKMCQYRSSTKATLLRHMRERHFRPVAAAAAAAGKKGRLRKWSTSTKSQEEEGPEEEDDDDIVDAGAIDDLEEDSDYNPAEDEPRGRQLRLQRPTPSTPRPRRRPGRPRKLPRLEISDLPDGVEGEPLVSSQSGQSPPEPQDPEAPSSSGPGHLVAMGKVSRTPVEAGVSQSDAENAAPSCPDEHDTLPRRRGRPSRRFLGKKYRKYYYKSPKPLLRPFLCRICGSRFLSHEDLRFHVNSHEAGDPQLFKCLQCSYRSRRWSSLKEHMFNHVGSKPYKCDECSYTSVYRKDVIRHAAVHSRDRKKRPDPTPKLSSFPCPVCGRVYPMQKRLTQHMKTHSTEKPHMCDKCGKSFKKRYTFKMHLLTHIQAVANRRFKCEFCEFVCEDKKALLNHQLSHVSDKPFKCSFCPYRTFREDFLLSHVAVKHTGAKPFACEYCHFSTRHKKNLRLHVRCRHASSFEEWGRRHPEEPPSRRRPFFSLQQIEELKQQHSAAPGPPPSSPGPPEIPPEATTFQSSEAPSLLCSDTLGGATIIYQQGAEESTAMATQTALDLLLNMSAQRELGGTALQVAVVKSEDVEAGLASPGGQPSPEGATPQVVTLHVAEPGGGAAAESQLGPPDLPQITLAPGPFGGTGYSVITAPPMEEGTSAPGTPYSEEPAGEAAQAVVVSDTLKEAGTHYIMATDGTQLHHIELTADGSISFPSPDALASGAKWPLLQCGGLPRDGPEPPSPAKTHCVGDSQSSASSPPATSKALGLAVPPSPPSAATAASKKFSCKICAEAFPGRAEMESHKRAHAGPGAFKCPDCPFSARQWPEVRAHMAQHSSLRPHQCSQCSFASKNKKDLRRHMLTHTKEKPFACHLCGQRFNRNGHLKFHIQRLHSPDGRKSGTPTARAPTQTPTQTIILNSDDETLATLHTALQSSHGVLGPERLQQALSQEHIIVAQEQTVTNQEEAAYIQEITTADGQTVQHLVTSDNQVQYIISQDGVQHLLPQEYVVVPEGHHIQVQEGQITHIQYEQGAPFLQESQIQYVPVSPGQQLVTQAQLEAAAHSAVTAVADAAMAQAQGLFGTDETVPEHIQQLQHQGIEYDVITLADD

SEQ ID NO: 40444 - protein, 1040 aa, Homo sapiens [sequence omitted]

SEQ ID NO: 40445 - protein, 178 aa, Homo sapiens
MVGFPNAGKSSLLRAISNARPAVASYPFTTLKPHVGIVHYEGHLQIAVADIPGIIRGAHQNRGLGSAFLRHIERCRFLLFVVDLSQPEPWTQVDDLKYELEMYEKGLSARPHAIVANKIDLPEAQANLSQLRDHLGQEVIVLSALTGENLEQLLLHLKVLYDAYAEAELGQGRQPLRW

SEQ ID NO: 40446 - protein, 259 aa, Homo sapiens
MIDLDTSKNNRIGKTGERPSQENGIQKHRTSLPAPMFSRSDFSVWTILKKCVGLELSKITMPIAFNEPLSFLQRITEYMEHVYLIHRASCQPQPLERMQSVAAFAVSAVASQWERTGKPFNPLLGETYELIREDLGFRFISEQVSHHPPISAFHSEGLNHDFLFHGSIYPKLKFWGKSVEAEPRGTITLELLKHNEAYTWTNPTCCVHNVIIGKLWIEQYGTVEILNHRTGHKCVLHFKPCGLFGKELHKVEGHIQDKK

SEQ ID NO: 40447 - protein, 509 aa, Homo sapiens
MSDPYLSSYYPPSIGFPYSLNEAPWSTAGDPPIPYLTTYGQLSNGDHHFMHDAVFGQPGGLGNNIYQHRFNFFPENPAFSAWGTSGSQGQQTQSSAYGSSYTYPPSSLGGTVVDGQPGFHSDTLSKAPGMNSLEQGMVGLKIGDVSSSAVKTVGSVVSSVALTGVLSGNGGTNVNMPVSKPTSWAAIASKPAKPQPKMKTKSGPVMGGGLPPPPIKHNMDIGTWDNKGPVPKAPVPQQAPSPQAAPQPQQVAQPLPAQPPALAQPQYQSPQQPPQTRWVAPRNRNAAFGQSGGAGSDSNSPGNVQPNSAPSVESHPVLEKLKAAHSYNPKEFEWNLKSGRVFIIKSYSEDDIHRSIKYSIWCSTEHGNKRLDSAFRCMSSKGPVYLLFSVNGSGHFCGVAEMKSPVDYGTSAGVWSQDKWKGKFDVQWIFVKDVPNNQLRHIRLENNDNKPVTNSRDTQEVPLEKAKQVLKIISSYKHTTSIFDDFAHYEKRQEEEEVVRKERQSRNKQ

SEQ ID NO: 40448 - protein, 860 aa, Homo sapiens [sequence omitted]

SEQ ID NO: 40449 - protein, 123 aa, Homo sapiens
MHSPAGRSVFRAFLRTEYSEENMLFWLACEELKAEANQHVVDEKARLIYEDYVSILSPKEVSLDSRVREGINKKMQEPSAHTFDDAQLQIYTLMHRDSYPRFLSSPTYRALLLQGPSQSSSEA

SEQ ID NO: 40450 - protein, 124 aa, Homo sapiens [sequence omitted]

SEQ ID NO: 40451 - protein, 950 aa, Homo sapiens
MGNAERAPGSRSFGPVPTLLLLAAALLAVSDALGRPSEEDEELVVPELERAPGHGTTRLRLHAFDQQLDLELRPDSSFLAPGFTLQNVGRKSGSETPLPETDLAHCFYSGTVNGDPSSAAALSLCEGVRGAFYLLGEAYFIQPLPAASERLATAAPGEKPPAPLQFHLLRRNRQGDVGGTCGVVDDEPRPTGKAETEDEDEGTEGEDEGAQWSPQDPALQGVGQPTGTGSIRKKRFVSSHRYVETMLVADQSMAEFHGSGLKHYLLTLFSVAARLYKHPSIRNSVSLVVVKILVIHDEQKGPEVTSNAALTLRNFCNWQKQHNPPSDRDAEHYDTAILFTRQDLCGSQTCDTLGMADVGTVCDPSRSCSVIEDDGLQAAFTTAHELGHVFNMPHDDAKQCASLNGVNQDSHMMASMLSNLDHSQPWSPCSAYMITSFLDNGHGECLMDKPQNPIQLPGDLPGTSYDANRQCQFTFGEDSKHCPDAASTCSTLWCTGTSGGVLVCQTKHFPWADGTSCGEGKWCINGKCVNKTDRKHFDTPFHGSWGMWGPWGDCSRTCGGGVQYTMRECDNPVPKNGGKYCEGKRVRYRSCNLEDCPDNNGKTFREEQCEAHNEFSKASFGSGPAVEWIPKYAGVSPKDRCKLICQAKGIGYFFVLQPKVVDGTPCSPDSTSVCVQGQCVKAGCDRIIDSKKKFDKCGVCGGNGSTCKKISGSVTSAKPGYHDIITIPTGATNIEVKQRNQRGSRNNGSFLAIKAADGTYILNGDYTLSTLEQDIMYKGVVLRYSGSSAALERIRSFSPLKEPLTIQVLTVGNALRPKIKYTYFVKKKKESFNAIPTFSAWVIEEWGECSKSCELGWQRRLVECRDINGQPASECAKEVKPASTRPCADHPCPQWQLGEWSSCSKTCGKGYKKRSLKCLSHDGGVLSHESCDPLKKPKHFIDFCTMAECS

SEQ ID NO: 40452 - protein, 314 aa, Homo sapiens
MVYISLVFGISYDSPDYTDESCTFKISLRNFRSILSWELKNHSIVPTHYTLLYTIMSKPEDLKVVKNCANTTRSFCDLTDEWRSTHEAYVTVLEGFSGNTTLFSCSHNFWLAIDMSFEPPEFEIVGFTNHINVMVKFPSIVEEELQFDLSLVIEEQSEGIVKKHKPEIKGNMSGNFTYIIDKLIPNTNYCVSVYLEHSDEQAVIKSPLKCTLLPPGQESESAESAKIGGIITVFLIALVLTSTIVTLKWIGYICLRNSLPKVLRQGLAKGWNAVAIHRCSHNALQSETPELKQSSCLSFPSSWDYKRASLCPSD

SEQ ID NO: 40453 - protein, 498 aa, Homo sapiens
MVYISLVFGISYDSPDYTDESCTFKISLRNFRSILSWELKNHSIVPTHYTLLYTIMSKPEDLKVVKNCANTTRSFCDLTDEWRSTHEAYVTVLEGFSGNTTLFSCSHNFWLAIDMSFEPPEFEIVGFTNHINVMVKFPSIVEEELQFDLSLVIEEQSEGIVKKHKPEIKGNMSGNFTYIIDKLIPNTNYCVSVYLEHSDEQAVIKSPLKCTLLPPGQESESAESAKIGGIITVFLIALVLTSTIVTLKWIGYICLRNSLPKVLNFHNFLAWPFPNLPPLEAMDMVEVIYINRKKKVWDYNYDDESDSDTEAAPRTSGGGYTMHGLTVRPLGQASATSTESQLIDPESEEEPDLPEVDVELPTMPKDSPQQLELLSGPCERRKSPLQDPFPEEDYSSTEGSGGRITFNVDLNSVFLRVLDDEDSDDLEAPLMLSSHLEEMVDPEDPDNVQSNHLLASGEGTQPTFPSPSSEGLWSEDAPSDQSDTSESDVDLGDGYIMR

SEQ ID NO: 40454 - protein, 556 aa, Homo sapiens [sequence omitted]

SEQ ID NO: 40455 - protein, 1450 aa, Homo sapiens
MSSYERSMMSYERSMMSPMAERSMMSAYERSMMSAYERSMMSPMAERSMMSAYERSMMSAYERSMMSPMADRSMMSMGADRSMMSSYSAADRSMMSSYSAADRSMMSSYTADRSMMSMAADSYTDSYTDTYTEAYMVPPLPPEEPPTMPPLPPEEPPMTPPLPPEEPPEGPALPTEQSALTAENTWPTEVPSSPSEESVSQPEPPVSQSEISEPSAVPTDYSVSASDPSVLVSEAAVTVPEPPPEPESSITLTPVESAVVAEEHEVVPERPVTCMVSETPAMSAEPTVLASEPPVMSETAETFDSMRASGHVASEVSTSLLVPAVTTPVLAESILEPPAMAAPESSAMAVLESSAVTVLESSTVTVLESSTVTVLEPSVVTVPEPPVVAEPDYVTIPVPVVSALEPSVPVLEPAVSVLQPSMIVSEPSVSVQESTVTVSEPAVTVSEQTQVIPTEVAIESTPMILESSIMSSHVMKGINLSSGDQNLAPEIGMQEIALHSGEEPHAEEHLKGDFYESEHGINIDLNINNHLIAKEMEHNTVCAAGTSPVGEIGEEKILPTSETKQRTVLDTYPGVSEADAGETLSSTGPFALEPDATGTSKGIEFTTASTLSLVNKYDVDLSLTTQDTEHDMVISTSPSGGSEADIEGPLPAKDIHLDLPSNNNLVSKDTEEPLPVKESDQTLAALLSPKESSGGEKEVPPPPKETLPDSGFSANIEDINEADLVRPLLPKDMERLTSLRAGIEGPLLASDVGRDRSAASPVVSSMPERASESSSEEKDDYEIFVKVKDTHEKSKKNKNRDKGEKEKKRDSSLRSRSKRSKSSEHKSRKRTSESRSRARKRSSKSKSHRSQTRSRSRSRRRRRSSRSRSKSRGRRSVSKEKRKRSPKHRSKSRERKRKRSSSRDNRKTVRARSRTPSRRSRSHTPSRRRRSRSVGRRRSFSISPSRRSRTPSRRSRTPSRRSRTPSRRSRTPSRRSRTPSRRSRTPSRRRRSRSVVRRRSFSISPVRLRRSRTPLRRRFSRSPIRRKRSRSSERGRSPKRLTDLDKAQLLEIAKANAAAMCAKAGVPLPPNLKPAPPPTIEEKVAKKSGGATIEELTEKCKQIAQSKEDDDVIVNKPHVSDEEEEEPPFYHHPFKLSEPKPIFFNLNIAAAKPTPPKSQVTLTKEFPVSSGSQHRKKEADSVYGEWVPVEKNGEENKDDDNVFSSNLPSEPVDISTAMSERALAQKRLSENAFDLEAMSMLNRAQERIDAWAQLNSIPGQFTGSTGVQVLTQEQLANTGAQAWIKKDQFLRAAPVTGGMGAVLMRKMGWREGEGLGKNKEGNKEPILVDFKTDRKGLVAVGERAQKRSGNFSAAMKDLSGKHPVSALMEICNKRRWQPPEFLLVHDSGPDHRKHFLFRVLINGSAYQPSFASPNKKHAKATAATVVLQAMGLVPKDLMANATCFRSASRR

SEQ ID NO: 40456 - protein, 22 aa, Homo sapiens
MPRYELALILKAMQRGWYSRLH

SEQ ID NO: 40457 - protein, 60 aa, Homo sapiens
MVPRSTSLTLIVFLFHRLSKAPGKMVENSPSPLPERAIYGFVLFLSSQFGFKNLKGSRVC

SEQ ID NO: 40458 - protein, 121 aa, Homo sapiens
MGTALDIKIKRANKVYHAGEVLSGVVVISSKDSVQHQGVSLTMEGTVNLQLSAKSVGVFEAFYNSVKPIQIINSTIEMVKPGKFPSGKTEIPFEFPLHLKGNKVLYETYHGVFVNIQVRAS

SEQ ID NO: 40459 - protein, 1214 aa, Homo sapiens [sequence omitted]

SEQ ID NO: 40460 - protein, 430 aa, Homo sapiens
MLGLRPPLLALVGLLSLGCVLSQECTKFKVSSCRECIESGPGCTWCQKLNFTGPGDPDSIRCDTRPQLLMRGCAADDIMDPTSLAETQEDHNGGQKQLSPQKVTLYLRPGQAAAFNVTFRRAKGYPIDLYYLMDLSYSMLDDLRNVKKLGGDLLRALNEITESGRIGFGSFVDKTVLPFVNTHPDKLRNPCPNKEKECQPPFAFRHVLKLTNNSNQFQTEVGKQLISGNLDAPEGGLDAMMQVAACPEEIGWRNVTRLLVFATDDGFHFAGDGKLGAILTPNDGRCHLEDNLYKRSNEFDYPSVGQLAHKLAENNIQPIFAVTSRMVKTYEKLTEIIPKSAVGELSEDSSNVVHLIKNAYNVSLPHHSAGTHGVASNLPTAGQLLLQVSRRVVWEESPCPVGQLQPPDLPSGLQDTLARHFHGELWVLSR

SEQ ID NO: 40461 - protein, 31 aa, Homo sapiens
MLGLRPPLLALVGLLSLGCGEFCVPRRGLHA

SEQ ID NO: 40462 - protein, 733 aa, Homo sapiens
MSSSSTDVKENRNLDNVSPKDGSTPGPGEGSQLSNGGGGGPGRKRPLEEGSNGHSKYRLKKRRKTPGPVLPKNALMQLNEIKPGLQYTLLSQTGPVHAPLFVMSVEVNGQVFEGSGPTKKKAKLHAAEKALRSFVQFPNASEAHLAMGRTLSVNTDFTSDQADFPDTLFNGFETPDKAEPPFYVGSNGDDSFSSSGDLSLSASPVPASLAQPPLPVLPPFPPPSGKNPVMILNELRPGLKYDFLSESGESHAKSFVMSVVVDGQFFEGSGRNKKLAKARAAQSALAAIFNLHLDQTPSRQPIPSEGLQLHLPQVLADAVSRLVLGKFGDLTDNFSSPHARRKVLAGVVMTTGTDVKDAKVISVSTGTKCINGEYMSDRGLALNDCHAEIISRRSLLRFLYTQLELYLNNKDDQKRSIFQKSERGGFRLKENVQFHLYISTSPCGDARIFSPHEPILEGSRSYTQAGVQWCNHGSLQPRPPGLLSDPSTSTFQGAGTTEPADRHPNRKARGQLRTKIESGEGTIPVRSNASIQTWDGVLQGERLLTMSCSDKIARWNVVGIQGSLLSIFVEPIYFSSIILGSLYHGDHLSRAMYQRISNIEDLPPLYTLNKPLLSGISNAEARQPGKAPNFSVNWTVGDSAIEVINATTGKDELGRASRLCKHALYCRWMRVHGKVPSHLLRSKITKPNVYHESKLAAKEYQAAKARLFTAFIKAGLGAWVEKPTEQDQFSLTP

SEQ ID NO: 40463 - protein, 139 aa, Homo sapiens [sequence omitted]

SEQ ID NO: 40464 - protein, 319 aa, Homo sapiens [sequence omitted]

SEQ ID NO: 40465 - protein, 1023 aa, Homo sapiens
MTRRRKSPVKKGSTAPGTQNCKASGARYLPQEEDLRTFKAGNQRLQQVMHAADPLEIQADVHWTHIREREEEERMAPASESSASGAPLDENDLEEDVDSEPAEIEGEAAEDGDPGDTGAELDDDQHWSDSPSDADRELRLPCPAEGEAELELRVSEDEEKLPASPKHQERGPSQATSPIRSPQESALLFIPVHSPSTEGPQLPPVPAATQEKSPEERLFPEPLLPKEKPKADAPSDLKAVHSPIRSQPVTLPEARTPVSPGSPQPQPPVAASTPPPSPLPICSQPQPSTEATVPSPTQSPIRFQPAPAKTSTPLAPLPVQSQSDTKDRLGSPLAVDEALRRSDLVEEFWMKSAEIRRSLGLTPVDRSKGPEPSFPTPAFRPVSLKSYSVEKSPQDEGLHLLKPLSIPKRLGLPKPEGEPLSLPTPRSPSDRELRSAQEERRELSSSSGLGLHGSSSNMKTLGSQSFNTSDSAMLTPPSSPPPPPPPGEEPATLRRKLREAEPNASVVPPPLPATWMRPPREPAQPPREEVRKSFVESVEEIPFADDVEDTYDDKTEDSSLQEKFFTPPSCWPRPEKPRHPPLAKENGRLPALEGTLQPQKRGLPLVSAEAKELAEERMRAREKSVKSQALRDAMARQLSRMQQMELASGAPRPRKASSAPSQGKERRPDSPTRPTLRGSEEPTLKHEATSEEVLSPPSDSGGPDGSFTSSEGSSGKSKKRSSLFSPRRNKKEKKSKGEGRPPEKPSSNLLEEAAAKPKSLWKSVFSGYKKDKKKKADDKSCPSTPSSGATVDSGKHRVLPVVRAELQLRRQLSFSEDSDLSSDDVLEKSSQKSRREPRTYTEEELNAKLTRRVQKAARRQAKQEELKRLHRAQIIQRQLQQVEERQRRLEERGVAVEKALRGEAGMGKKDDPKLMQEWFKLVQEKNAMVRYESELMIFARELELEDRQSRLQQELRERMAVEDHLKTEEELSEEKQILNEMLEVVEQRDSLVALLEEQRLREREEDKDLEAAMLSKGFSLNWS

SEQ ID NO: 40466 - protein, 973 aa, Homo sapiens [sequence omitted]

SEQ ID NO: 40467 - protein, 87 aa, Homo sapiens
MARACRVTAPPPAAAHGTRARRATAASPSTDFPRRTTRGEACGWPTASGWTPAARACGTRHPSTSTSAPNTLRRTALSWWESVDITG

SEQ ID NO: 40468 - protein, 136 aa, Homo sapiens
MKNFRNIQVDEANLLTWQGLIVPDNPPYDKGAFRIEINFPAEYPFKPPKITFKTKIYHPNIDEKGQVCLPVISAENWKPATKTDQVIQSLIALVNDPQPEHPLRADLAEEYSKDRKKFCKNAEEFTKKYGEKRPVD

SEQ ID NO: 40469 - protein, 857 aa, Homo sapiens
MVAEKPSLAQSIAKILSRGSLSSHKGLNGACSVHEYTGTFAGQPVRFKMTSVCGHVMTLDFLGKYNKWDKVDPAELFSQAPTEKKEANPKLNMVKFLQVEGRGCDYIVLWLDCDKEGENICFEVLDAVLPVMNKAHGGEKTVFRARFSSITDTDICNAMACLGEPDHNEALSVDARQELDLRIGCAFTRFQTKYFQGKYGDLDSSLISFGPCQTPTLGFCVERHDKIQSFKPETYWVLQAKVNTDKDRSLLLDWDRVRVFDREIAQMFLNMTKLEKEAQVEATSRKEKAKQRPLALNTVEMLRVASSSLGMGPQHAMQTAERLYTQGYISYPRTETTHYPENFDLKGSLRQQANHPYWADTVKRLLAEGINRPRKGHDAGDHPPITPMKSATEAELGGDAWRLYEYITRHFIATVSHDCKYLQSTISFRIGPELFTCSGKTVLSPGFTEVMPWQSVPLEESLPTCQRGDAFPVGEVKMLEKQTNPPDYLTEAELITLMEKHGIGTDASIPVHINNICQRNYVTVESGRRLKPTNLGIVLVHGYYKIDAELVLPTIRSAVEKQLNLIAQGKADYRQVLGHTLDVFKRKFHYFVDSIAGMDELMEVSFSPLAATGKPLSRCGKCHRFMKYIQAKPSRLHCSHCDETYTLPQNGTIKLYKELRCPLDDFELVLWSSGSRGKSYPLCPYCYNHPPFRDMKKGMGCNECTHPSCQHSLSMLGIGQCVECESGVLVLDPTSGPKWKVACNKCNVVAHCFENAHRVRVSADTCSVCEAALLDVDFNKAKSPLPGDETQHMGCVFCDPVFQELVELKHAASCHPMHRGGPGRRQGRGRGRARRPPGKPNPRRPKDKMSALAAYFV

SEQ ID NO: 40470 - protein, 459 aa, Homo sapiens
MFLNMTKLEKEAQVEATSRKEKAKQRPLALNTVEMLRVASSSLGMGPQHAMQTAERLYTQGYISYPRTETTHYPENFDLKGSLRQQANHPYWADTVKRLLAEGINRPRKGHDAGDHPPITPMKSATEAELGGDAWRLYEYITRHFIATVSHDCKYLQSTISFRIGPELFTCSGKTVLSPGFTEVMPWQSVPLEESLPTCQRGDAFPVGEVKMLEKQTNPPDYLTEAELITLMEKHGIGTDASIPVHINNICQRNYVTVESGRRLKPTNLGIVLVHGYYKIDAELVLPTIRSAVEKQLNLIAQGKADYRQVLGHTLDVFKRKFHYFVDSIAGMDELMEVSFSPLAATGKPLSRCGKCHRFMKYIQAKPSRLHCSHCDETYTLPQNGTIKLYKELRCPLDDFELVLWSSGSRGKSYPLCPYCYNHPPFRDMKKGECSHSLLSTGSCSLFSVPTPALHQAGL

SEQ ID NO: 40471 - protein, 374 aa, Homo sapiens
MCQSEARQGPELRAAKWLHFPQLALRRRLGQLSCMSRPALKLRSWPLTVLYYLLPFGALRPLSRVGWRPVSRVALYKSVPTRLLSRAWGRLNQVELPHWLRRPVYSLYIWTFGVNMKEAAVEDLHHYRNLSEFFRRKLKPQARPVCGLHSVISPSDGRILNFGQVKNCEVEQVKGVTYSLESFLGPRMCTEDLPFPPAASCDSFKNQLVTREGNELYHCVIYLAPGDYHCFHSPTDWTVSHRRHFPGSLMSVNPGMARWIKELFCHNERVVLTGDWKHGFFSLTAVGATNVGSIRIYFDRDLHTNSPRHSKGSYNDFSFVTHTNREGVPMRKGEHLGEFNLGSTIVLIFEAPKDFNFQLKTGQKIRFGEALGSL

SEQ ID NO: 40472 - protein, 1058 aa, Homo sapiens
MWRLKKSLVSTCAYITQKVEFAGIRAQAGELWVKNEKVMCGYISEDTRVVFRSTSAMVYIFIQMSCEMWDFDIYGDLYFEKAVNGFLADLFTKWKEKNCSHEVTVVLFSRTFYDAKSVDEFPEINRASIRQDHKGRFYEDFYKVVVQNERREEWTSLLVTIKKLFIQYPVLVRLEQAEGFPQGDNSTSAQGNYLEAINLSFNVFDKHYINRNFDRTGQMSVVITPGVGVFEVDRLLMILTKQRMIDNGIGVDLVCMGEQPLHAVPLFKLHNRSAPRDSRLGDDYNIPHWINHSFYTSKSQLFCNSFTPRIKLAGKKPASEKAKNGRDTSLGSPKESENALPIQVDYDAYDAQVFRLPGPSRAQCLTTCRSVRERESHSRKSASSCDVSSSPSLPSRTLPTEEVRSQASDDSSLGKSANILMIPHPHLHQYEVSSSLGYTSTRDVLENMMEPPQRDSSAPGRFHVGSAESMLHVRPGGYTPQRALINPFAPSRMPMKLTSNRRRWMHTFPVGPSGEAIQIHHQTRQNMAELQGSGQRDPTHSSAELLELAYHEAAGRHSNSRQPGDGMSFLNFSGTEELSVGLLSNSGAGMNPRTQNKDSLEDSVSTSPDPILTLSAPPVVPGFCCTVGVDWKSLTTPACLPLTTDYFPDRQGLQNDYTEGCYDLLPEADIDRRDEDGVQMTAQQVFEEFICQRLMQGYQIIVQPKTQKPNPAVPPPLSSSPLYSRGLVSRNRPEEEDQYWLSMGRTFHKVTLKDKMITVTRYLPKYPYESAQIHYTYSLCPSHSDSEFVSCWVEFSHERLEEYKWNYLDQYICSAGSEDFSLIESLKFWRTRFLLLPACVTATKRITEGEAHCDIYGDRPRADEDEWQLLDGFVRFVEGLNRIRRRHRSDRMMRKGTAMKGLQMTGPISTHSLESTAPPVGKKGTSALSALLEMEASQKCLGEQQAAVHGGKSSAQSAESSSVAMTPTYMDSPRKVSVDQTATPMLDGTSLGICTGQSMDRGNSQTFGNSQNIGEQGYSSTNSSDSSSQQLVASSLTSSSTLTEILEAMKHPSSPAAL

SEQ ID NO: 40473 - protein, 593 aa, Homo sapiens
MTPDLLNFKKGWMSILDEPGEPPSPSLTTTSTSQWKKHWFVLTDSSLKYYRDSTAEEADELDGEIDLRSCTDVTEYAVQRNYGFQIHTKDAVYTLSAMTSGIRRNWIEALRKTVRPTSAPDVTKLSDSNKENALHSYSTQKGPLKAGEQRAGSEVISRGGPRKADGQRQALDYVELSPLTQASPQRARTPARTPDRLAKQEELERDLAQRSEERRKWFEATDSRTPEVPAGEGPRRGLGAPLTEDQQNRLSEEIEKKWQELEKLPLRENKRVPLTALLNQSRGERRGPPSDGHEALEKEVQALRAQLEAWRLQGEAPQSALRSQEDGHIPPGYISQEACERSLAEMESSHQQVMEELQRHHERELQRLQQEKEWLLAEETAATASAIEAMKKAYQEELSRELSKTRSLQQGPDGLRKQHQSDVEALKRELQVLSEQYSQKCLEIGALMRQAEEREHTLRRCQQEGQELLRHNQELHGRLSEEIDQLRGFIASQGMGNGCGRSNERSSCELEVLLRVKENELQYLKKEVQCLRDELQMMQKDKRFTSGKYQDVYVELSHIKTRSEREIEQLKEHLRLAMAALQEKESMRNSLAE

SEQ ID NO: 40474 - protein, 170 aa, Homo sapiens [sequence omitted]

SEQ ID NO: 40475 - protein, 407 aa, Homo sapiens
MRGGGFGDRDRDRDRGGFGARGGGGLPPKKFGNPGERLRKKKWDLSELPKFEKNFYVEHPEVARLTPYEVDELRRKKEITVRGGDVCPKPVFAFHHANFPQYVMDVLMDQHFTEPTPIQCQGFPLALSGRDMVGIAQTGSGKTLAYLLPAIVHINHQPYLERGDGPICLVLAPTRELAQQVQQVADDYGKCSRLKSTCIYGGAPKGPQIRDLERGVEICIATPGRLIDFLESGKTNLRRCTYLVLDEADRMLDMGFEPQIRKIVDQIRPDRQTLMWSATWPKEVRQLAEDFLRDYTQINVGNLELSANHNILQIVDVCMESEKDHKLIQLMEEIMAEKENKTIIFVETKRRCDDLTRRMRRDGWPAMCIHGDKSQPERDWVLNEFRSGKAPILIATDVASRGLGLYR

SEQ ID NO: 40476 - protein, 362 aa, Homo sapiens [sequence omitted]

SEQ ID NO: 40477 - protein, 1007 aa, Homo sapiens
MEGHGKTPPPGEESKQEKEQEREEQLMEDKKRKKEDKKKKEATQKVTEQKTKVPEVTKPSLSQPTAASPIGSSPSPPVNGGNNAKRVAVPNGQPPSAARYMPREVPPRFRCQQDHKVLLKRGQPPPPSCMLLGGGAGPPPCTAPGANPNNAQVTGALLQSESGTAPVWSKSTPPAPDNGTSAWGEPNESSPGWGEMDDTGASTTGWGNTPANAPNAMKPNSKSMQDGWGESDGPVTGARHPSWEEEEDGGVWNTTGSQGSASSHNSASWGQGGKKQMKCSLKGGNNDSWMNPLAKQFSNMGLLSQTEDNPSSKMDLSVGSLSDKKFDVDKRAMNLGDFNDIMRKDRSGFRPPNSKDMGTTDSGPYFEKGGSHGLFGNSTAQSRGLHTPVQPLNSSPSLRAQVPPQFISPQVSASMLKQFPNSGLSPGLFNVGPQLSPQQIAMLSQLPQIPQFQLACQLLLQQQQQQQLLQNQRKISQAVRQQQEQQLARMVSALQQQQQQQQRQPGMKHSPSHPVGPKPHLDNMVPNALNVGLPDLQTKGPIPGYGSGFSSGGMDYGMVGGKEAGTESRFKQWTSMMEGLPSVATQEANMHKNGAIVAPGKTRGGSPYNQFDIIPGDTLGGHTGPAGDSWLPAKSPPTNKIGSKSSNASWPPEFQPGVPWKGIQNIDPESDPYVTPGSVLGGTATSPIVDTDHQLLRDNTTGSNSSLNTSLPSPGAWPYSASDNSFTNVHSTSAKFPDYKSTWSPDPIGHNPTHLSNKMWKNHISSRNTTPLPRPPPGLTNPKPSSPWSSTAPRSVRGWGTQDSRLASASTWSDGGSVRPSYWLVLHNLTPQIDGSTLRTICMQHGPLLTFHLNLTQGTALIRYSTKQEAAKAQTALHMCVLGNTTILAEFATDDEVSRFLAQAQPPTPAATPSAPAAGWQSLETGQNQSDPVGPALNLFGGSTGLGQWSSSAGGSSGADLAGASLWGPPNYSSSLWGVPTVEDPHRMGSPAPLLPGDLLGGGSDSI

SEQ ID NO: 40478 - protein, 459 aa, Homo sapiens
MCFVFSDRYKFRTWRQLWLWLAEAEQTLGLPITDEQIQEMKSNLENIDFKMAAEEEKRLRHDVMAHVHTFGHCCPKAAGIIHLGATSCYVGDNTDLIILRNALDLLLPKLARVISRLADFAKERASLPTLGFTHFQPAQLTTVGKRCCLWIQDLCMDLQNLKRVRDDLRFRGVKGTTGTQASFLQLFEGDDHKVEQLDKMVTEKAGFKRAFIITGQTYTRKVDIEVLSVLASLGASVHKICTDIRLLANLKEMEEPFEKQQIGSSAMPYKRNPMRSERCCSLARHLMTLVMDPLQTASVQWFERTLDDSANRRICLAEAFLTADTILNTLQNISEGLVVYPKVIERRIRQELPFMATENIIMAMVKAGGSRQDCHEKIRVLSQQAASVVKQEGGDNDLIERIQVDAYFSPIHSQLDHLLDPSSFTGRASQQVQRFLEEEVYPLLKPYESVMKVKAELCL

SEQ ID NO: 40479 - protein, 324 aa, Homo sapiens
MLETILPAQLTTVGKRCCLWIQDLCMDLQNLKRVRDDLRFRGVKGTTGTQASFLQLFEGDDHKVEQLDKMVTEKAGFKRAFIITGQTYTRKVDIEVLSVLASLGASVHKICTDIRLLANLKEMEEPFEKQQIGSSAMPYKRNPMRSERCCSLARHLMTLVMDPLQTASVQWFERTLDDSANRRICLAEAFLTADTILNTLQNISEGLVVYPKVIERRIRQELPFMATENIIMAMVKAGGSRQDCHEKIRVLSQQAASVVKQEGGDNDLIERIQVDAYFSPIHSQLDHLLDPSSFTGRASQQVQRFLEEEVYPLLKPYESVMKGR

SEQ ID NO: 40480 - protein, 261 aa, Homo sapiens [sequence omitted]

SEQ ID NO: 40481 - protein, 218 aa, Homo sapiens
MDDVIDTLTSLRLTNSALRREASTLRAEKANLTNMLESVMAELTLLRTRARIPGALQITPPISSITSNGTRPMTTPPTSLPEPFSGDPGRLAGFLMQMDRFMIFQASRFPGEAERVAFLVSRLTGEAEKWAIPHMQPDSPLRNNYQGFLAELRRTYKSPLRHARRAQIRKTSASNRAVRERQMLCRQLASAGTGPCPVHPASNGTSPAPALPARARNL

SEQ ID NO: 40482 - protein, 507 aa, Homo sapiens
MGAPRSLLLALAAGLAVARPPNIVLIFADDLGYGDLGCYGHPSSTTPNLDQLAAGGLRFTDFYVPVSLCTPSRAALLTGRLPVRMGMYPGVLVPSSRGGLPLEEVTVAEVLAARGYLTGMAGKWHLGVGPEGAFLPPHQGFHRFLGIPYSHDQGPCQNLTCFPPATPCDGGCDQGLVPIPLLANLSVEAQPPWLPGLEARYMAFAHDLMADAQRQDRPFFLYYASHHTHYPQFSGQSFAERSGRGPFGDSLMELDAAVGTLMTAIGDLGLLEETLVIFTADNGPETMRMSRGGCSGLLRCGKGTTYEGGVREPALAFWPGHIAPGVTHELASSLDLLPTLAALAGAPLPNVTLDGFDLSPLLLGTGKSPRQSLFFYPSYPDEVRGVFAVRTGKYKAHFFTQGSAHSDTTADPACHASSSLTAHEPPLLYDLSKDPGENYNLLGGVAGATPEVLQALKQLQLLKAQLDAAVTFGPSQVARGEDPALQICCHPGCTPRPACCHCPDPHA

SEQ ID NO: 40483 - protein, 196 aa, Homo sapiens
MGAPRSLLLALAAGLAVARPPNIVLIFADDLGYGDLGCYGHPSSTTPNLDQLAAGGLRFTDFYVPVSLCTPSRAALLTGRLPVRMGMYPGVLVPSSRGGLPLEEVTVAEVLAARGYLTGMAGKWHLGVGPEGAFLPPHQGFHRFLGIPYSHDQVGTTRALSHPPTSQSPPALDAPAAPPASPALTAAARLRAPART

SEQ ID NO: 40484 - protein, 187 aa, Homo sapiens [sequence omitted]

SEQ ID NO: 40485 - protein, 167 aa, Homo sapiens
MILIPGQTLPLQLFHPQEVSMVRNLIQKDRTFAVLAYSNVQEREAQFGTTAEIYAYREEQDFGIEIVKVKAIGRQRFKVLELRTQSDGIQQAKVQILPECVLPSTMSAVQLESLNKCQIFPSKPVSREDQCSYKWWQKYQKRKFHCANLTSWPRWLYSLYDAVSNLP

SEQ ID NO: 40486 - protein, 713 aa, Homo sapiens
MSFVIAACQLVLGLLMTSLTESSIQNSECPQLCVCEIRPWFTPQSTYREATTVDCNDLRLTRIPSNLSSDTQVLLLQSNNIAKTVDELQQLFNLTELDFSQNNFTNIKEVGLANLTQLTTLHLEENQITEMTDYCLQDLSNLQELYINHNQISTISAHAFAGLKNLLRLHLNSNKLKVIDSRWFDSTPNLEILMIGENPVIGILDMNFKPLANLRSLVLAGMYLTDIPGNALVGLDSLESLSFYDNKLVKVPQLALQKVPNLKFLDLNKNPIHKIQEGDFKNMLRLKELGINNMGELVSVDRYALDNLPELTKLEATNNPKLSYIHRLAFRSVPALESLMLNNNALNAIYQKTVESLPNLREISIHSNPLRCDCVIHWINSNKTNIRFMEPLSMFCAMPPEYKGHQVKEVLIQDSSEQCLPMISHDSFPNRLNVDIGTTVFLDCRAMAEPEPEIYWVTPIGNKITVETLSDKYKLSSEGTLEISNIQIEDSGRYTCVAQNVQGADTRVATIKVNGTLLDGTQVLKIYVKQTESHSILVSWKVNSNVMTSNLKWSSATMKIDNPHITYTARVPVDVHEYNLTHLQPSTDYEVCLTVSNIHQQTQKSCVNVTTKNAAFAVDISDQETSTALAAVMGSMFAVISLASIAVYFAKRFKRKNYHHSLKKYMQKTSSIPLNELYPPLINLWEGDSEKDKDGSADTKPTQVDTSRSYYMW

SEQ ID NO: 40487 - protein, 564 aa, Homo sapiens [sequence omitted]

SEQ ID NO: 40488 - protein, 262 aa, Homo sapiens
MAGPELLLDSNIRLWVVLPIVIITFFVGMIRHYVSILLQSDKKLTQEQVSDSQVLIRSRVLRENGKYIPKQSFLTRKYYFNNPEDGFFKKTKRKVVPPSPMTDPTMLTDMMKGNVTNVLPMILIGGWINMTFSGFVTTKVPFPLTLRFKPMLQQGIELLTLDASWVSSASWYFLNVFGLRSIYSLILGQDNAADQSRMMQEQMTGAAMAMPADTNKAFKVYSFTFQSCSNALKGVTKSYFKNSFLEGSVVWFHRFNLNLVKT

SEQ ID NO: 40489 - protein, 48 aa, Homo sapiens
MAGPELLLDSNICLWVVLPIVITLRRHDPPLRVHPAGERQEAHPGTSI

SEQ ID NO: 40490 - protein, 65 aa, Homo sapiens
MGSGKKRERCPWRPSGARSSTTGAARRKGVPASAAASGSPVMWPPPAGQLRGLRRVLEGPAAPSA

SEQ ID NO: 40491 - protein, 635 aa, Homo sapiens
MASLEEEACSLKVDSKDSSHNSTNSEFAAEAEGQNDTIEEPNKVQKRKRDRLRDQGSTMIYLKAIQGILGKSMPKRKGEAATRAKPSAAEHPSHGEGPARSEGPAKTAEGAARSVTVTAAQKEKDATPEVSMEEDKTVPERSSFYDRRVVIDPQEKPSEEPLGDRRTVIDKCSPPLEFLDDSDSHLEIQKHKDREVVMEHPSSGSDWSDVEEISTVRFSQEEPVSLKPSAVPEPSSFTTDYVMYPPHLYSSPWCDYASYWTSSPKPSSYPSTGSSSNDAAQVGKSSRSRMSDYSPNSTGSVQNTSRDMEASEEGWSQNSRSFRFSRSSEEREVKEKRTFQEEMPPRPCGGHASSSLPKSHLEPSLEEGFIDTHCHLDMLYSKLSFQGTFTKFRKIYSSSFPKEFQGCISDFCDPRTLTDCLWEELLKEDLVWGAFGCHPHFARYYSESQERNLLQALRHPKAVAFGEMGLDYSYKCTTPVPEQHKVFERQLQLAVSLKKPLVIHCREADEDLLEIMKKFVPPDYKIHRHCFTGSYPVIEPLLKYFPNMSVGFTAVLTYSSAWEAREALRQIPLERIIVETDAPYFLPRQVPKSLCQYAHPGLALHTVREIARVKDQPLSLTLAALRENTSRLYSL

SEQ ID NO: 40492 - protein, 460 aa, Homo sapiens
MPLVVVLSTICLVTVGLNLLVLYAVRSERKLHTVGNLYIVSLSVADLIVGAVVMPMNILYLLMSKWSLGRPLCLFWLSMDYVASTASIFSVFILCIDRYRSVQQPLRYLKYRTKTRASATILGAWFLSFLWVIPILGWNHFMQQTSVRREDKCETDFYDVTWFKVMTAIINFYLPTLLMLWFYAKIYKAVRQHCQHRELINRSLPSFSEIKLRPENPKGDAKKPGKESPWEVLKRKPKDAGGGSVLKSPSQTPKEMKSPVVFSQEDDREVDKLYCFPLDIVHMQAAAEGSSRDYVAVNRSHGQLKTDEQGLNTHGASEISEDQMLGDSQSFSRTDSDTTTETAPGKGKLRSGSNTGLDYIKFTWKRLRSHSRQYVSGLHMNRERKAAKQLGFIMAAFILCWIPYFIFFMVIAFCKNCCNEHLHMFTIWLGYINSTLNPLIYPLCNENFKKTFKRILHIRS

SEQ ID NO: 40493 - protein, 433 aa, Homo sapiens
MCVDWSNIRQLFSQHRYSTPHAFTFNTSSPSSEGSLSQRQRSTSTPNVHMVSTTLPVDSRMIEDAIRSHSESASPSALSSSPNNLSPTGWSQPKTPVPAQRERAPVSGTQEKNKIRPRGQRDSSYYWEIEASEVMLSTRIGSGSFGTVYKGKWHGDVAVKILKVVDPTPEQFQAFRNEVAVLRKTRHVNILLFMGYMTKDNLAIVTQWCEGSSLYKHLHVQETKFQMFQLIDIARQTAQGMDYLHAKNIIHRDMKSNNIFLHEGLTVKIGDFGLATVKSRWSGSQQVEQPTGSVLWMAPEVIRMQDNNPFSFQSDVYSYGIVLYELMTGELPYSHINNRDQIIFMVGRGYASPDLSKLYKNCPKAMKRLVADCVKKVKEERPLFPQILSSIELLQHSLPKINRSASEPSLHRAAHTEDINACTLTTSPRLPVF

SEQ ID NO: 40494 - protein, 122 aa, Homo sapiens
MKRFNKGVHEDTHKVHLLCLLANGFYRNNICSQPDLHAIGLSIIPARFTRVLPRDVDTYYLSNLVKWFIGTFTVNAELSASEQDNLQTTLERRFAIYSARDDEELVHVSDPPGSLFFISTVN

SEQ ID NO: 40495 - protein, 769 aa, Homo sapiens
MAGSSLENIQEKITEYLERVQALHSAVQSKSADPLKSKHQLDLERAHFLVTQAFDEDEKENVEDAIELYTEAVDLCLKTSYETADKVLQNKLKQLARQALDRAEALSEPLTKPVGKISSTSVKPKPPPVRAHFPLGANPFLERPQSFISPQSCDAQGQRYTAEEIEVLRTTSKINGIEYVPFMNVDLRERFAYPMPFCDRWGKLPLSPKQKTTFSKWVRPEDLTNNPTMIYTVSSFSIKQTIVSDCSFVASLAISAAYERRFNKKLITGIIYPQNKDGEPEYNPCGKYMVKLHLNGVPRKVIIDDQLPVDHKGELLCSYSNNKSELWVSLIEKAYMKVMGGYDFPGSNSNIDLHALTGWIPERIAMHSDSQTFSKDNSFRMLYQRFHKGDVLITASTGMMTEAEGEKWGLVPTHAYAVLDIREFKGLRFIQLKNPWSHLRWKGRYSENDVKNWTPELQKYLNFDPRTAQKIDNGIFWISWDDLCQYYDVIYLSWNPGLFKESTCIHSTWDAKQGPVKDAYSLANNPQYKLEVQCPQGGAAVWVLLSRHITDKDDFANNREFITMVVYKTDGKKVYYPADPPPYIDGIRINSPHYLTKIKLTTPGTHTFTLVVSQYEKQNTIHYTVRVYSACSFTFSKIPSPYTLSKRINGKWSGQSAGGCGNFQETHKNNPIYQFHIEKTGPLLIELRGPRQYSVGFEVVTVSTLGDPGPHGFLRKSSGDYRCGFCYLELENIPSGIFNIIPSTFLPKQEGPFFLDFNSIIPIKITQLQ

SEQ ID NO: 40496 - protein, 425 aa, Homo sapiens
MEQGLEEEEEVDPRIQGELEKLNQSTDDINRRETELEDARQKFRSVLVEATVKLDELVKKIGKAVEDSKPYWEARRVARQAQLEAQKATQDFQRATEVLRAAKETISLAEQRLLEDDKRQFDSAWQEMLNHATQRVMEAEQTKTRSELVHKETAARYNAAMGRMRQLEKKLKRAINKSKPYFELKAKYYVQLEQLKKTVDDLQAKLTLAKGEYKMALKNLEMISDEIHERRRSSAMGPRGCGVGAEGSSTSVEDLPGSKPEPDAISVASEAFEDDSCSNFVSEDDSETQSVSSFSSGPTSPSEMPDQFPAVVRPGSLDLPSPVSLSEFGMMFPVLGPRSECSGASSPECEVERGDRAEGAENKTSDKANNNRGLSSSSGSGGSSKSQSSTSPEGQALENRMKQLSLQCSKGRDGIIADIKMVQIG

SEQ ID NO: 40497 - protein, 506 aa, Homo sapiens [sequence omitted]

SEQ ID NO: 40498 - protein, 134 aa, Homo sapiens
MSDDDSRASTSSSSSSSSNQQTEKETNTPKKKESKVSMSKNSKLLSTSAKRIQKELADITLDPPPNCSAGPKGDNIYEWRSTILGPPGSVYEGGVFFLDITFTPEYPFKPPKVRNLPVCSNLLIPTREQLLRFF

SEQ ID NO: 40499 - protein, 532 aa, Homo sapiens
MIVTDNNGAVKFPQLCKFCDVRFSTCDNQKSCMSNCSITSICEKPQEVCVAVWRKNDENITLETVCHDPKLPYHDFILEDAASPKCIMKEKKKPGETFFMCSCSSDECNDNIIFSEEYNTSNPDLLLVIFQVTGISLLPPLGVAISVIIIFYCYRVNRQQKLSSTWETGKTRKLMEFSEHCAIILEDDRSDISSTCANNINHNTELLPIELDTLVGKGRFAEVYKAKLKQNTSEQFETVAVKIFPYEEYASWKTEKDIFSDINLKHENILQFLTAEERKTELGKQYWLITAFHAKGNLQEYLTRHVISWEDLRKLGSSLARGIAHLHSDHTPCGRPKMPIVHRDLKSSNILVKNDLTCCLCDFGLSLRLDPTLSVDDLANSGQVGTARYMAPEVLESRMNLENVESFKQTDVYSMALVLWEMTSRCNAVGEVKDYEPPFGSKVREHPCVESMKDNVLRDRGRPEIPSFWLNHQGIQMVCETLTECWDHDPEARLTAQCVAERFSELEHLDRLSGRSCSEEKIPEDGSLNTTK

SEQ ID NO: 40500 - protein, 430 aa, Homo sapiens
MIASRSYLAESLELRAWRWLLRLQLALFVNSLLLIGSLYIWRSTVSNLCHSPAAESTCFQLWKVVVLAFLALAHSSFFTMFFLVAEEPYLFSLAAYSCLGAYIIMLFFLFILSGMEQAYQLLAWRSGRVVGSLEKTRKLVLRPALAVGVTAVLSVAGILNAAQPPAVKTVEVPIHQLPASMNNLKIVLLSDIHLGPTVGRTKMEMFVRMVNVLEPDITVIVGDLSDSEASVLRTAVAPLGQLHSHLGAYFVTGNHEYYTSDVSNWFALLESLHVQPLHNENVKISATRAQRGGGGSGSGSEDEDWICLAGVDDIEADILHYSGHGMDLDKALEGCSPDHTIILLAHQPLAAKRALQARPDINLILSGHTHAGQIFPLNVAAYLLNPFFAGLYQVAQATFVYVSPGTAYYGIPMRLGSRAEITELILQRSP

SEQ ID NO: 40501 - protein, 2083 aa, Homo sapiens
MERSLSSYRGKYSELVTAYQMLQREKKKLQGILSQSQDKSLRRIAELREELQMDQQAKKHLQEEFDASLEEKDQYISVLQTQVSLLKQRLRNGPMNVDVLKPLPQLEPQAEVFTKEENPESDGEPVVEDGTSVKTLETLQQRVKRQENLLKRCKETIQSHKEQCTLLTSEKEALQEQLDERLQELEKIKDLHMAEKTKLITQLRDAKNLIEQLEQDKGMVIAETKRQMHETLEMKEEEIAQLRSRIKQMTTQGEELREQKEKSERAAFEELEKALSTAQKTEEARRKLKAEMDEQIKTIEKTSEEERISLQQELSRVKQEVVDVMKKSSEEQIAKLQKLHEKELARKEQELTKKLQTREREFQEQMKVALEKSQSEYLKISQEKEQQESLALEELELQKKAILTESENKLRDLQQEAETYRTRILELESSLEKSLQENKNQSKDLAVHLEAEKNKHNKEITVMVEKHKTELESLKHQQDALWTEKLQVLKQQYQTEMEKLREKCEQEKETLLKDKEIIFQAHIEEMNEKTLEKLDVKQTELESLSSELSEVLKARHKLEEELSVLKDQTDKMKQELEAKMDEQKNHHQQQVDSIIKEHEVSIQRTEKALKDQINQLELLLKERDKHLKEHQAHVENLEADIKRSEGELQQASAKLDVFQSYQSATHEQTKAYEEQLAQLQQKLLDLETERILLTKQVAEVEAQKKDVCTELDAHKIQVQDLMQQLEKQNSEMEQKVKSLTQVYESKLEDGNKEQEQTKQILVEKENMILQMREGQKKEIEILTQKLSAKEDSIHILNEEYETKFKNQEKKMEKVKQKAKEMQETLKKKLLDQEAKLKKELENTALELSQKEKQFNAKMLEMAQANSAGISDAVSRLETNQKEQIESLTEVHRRELNDVISIWEKKLNQQAEELQEIHEIQLQEKEQEVAELKQKILLFGCEKEEMNKEITWLKEEGVKQDTTLNELQEQLKQKSAHVNSLAQDETKLKAHLEKLEVDLNKSLKENTFLQEQLVELKMLAEEDKRKVSELTSKLKTTDEEFQSLKSSHEKSNKSLEDKSLEFKKLSEELAIQLDICCKKTEALLEAKTNELINISSSKTNAILSRISHCQHRTTKVKEALLIKTCTVSELEAQLRQLTEEQNTLNISFQQATHQLEEKENQIKSMKADIESLVTEKEALQKEGGNQQQAASEKESCITQLKKELSENINAVTLMKEELKEKKVEISSLSKQLTDLNVQLQNSISLSEKEAAISSLRKQYDEEKCELLDQVQDLSFKVDTLSKEKISALEQVDDWSNKFSEWKKKAQSRFTQHQNTVKELQIQLELKSKEAYEKDEQINLLKEELDQQNKRFDCLKGEMEDDKSKMEKKESNLETELKSQTARIMELEDHITQKTIEIESLNEVLKNYNQQKDIEHKELVQKLQHFQELGEEKDNRVKEAEEKILTLENQVYSMKAELETKKKELEHVNLSVKSKEEELKALEDRLESESAAKLAELKRKAEQKIAAIKKQLLSQMEEKEEQYKKGTESHLSELNTKLQEREREVHILEEKLKSVESSQSETLIVPRSAKNVAAYTEQEEADSQGCVQKTYEEKISVLQRNLTEKEKLLQRVGQEKEETVSSHFEMRCQYQERLIKLEHAEAKQHEDQSMIGHLQEELEEKNKKYSLIVAQHVEKEGGKNNIQAKQNLENVFDDVQKTLQEKELTCQILEQKIKELDSCLVRQKEVHRVEMEELTSKYEKLQALQQMDGRNKPTELLEENTEEKSKSHLVQPKLLSNMEAQHNDLEFKLAGAEREKQKLGKEIVRLQKDLRMLRKEHQQELEILKKEYDQEREEKIKQEQEDLELKHNSTLKQLMREFNTQLAQKEQELEMTIKETINKAQEVEAELLESHQEETNQLLKKIAEKDDDLKRTAKRYEEILDAREEEMTAKVRDLQTQLEELQKKYQQKLEQEENPGNDNVTIMELQTQLAQKTTLISDSKLKEQEFREQIHNLEDRLKKYEKNVYATTVGTPYKGGNLYHTDVSLFGEPTEFEYLRKVLFEYMMGRETKTMAKVITTVLKFPDDQTQKILEREDARLMSWLRSSS

SEQ ID NO: 40502 - protein, 309 aa, Homo sapiens
MRPDRAEAPGPPAMAAGGPGAGSAAPVSSTSSLPLAALNMRVRRRLSLFLNVRTQVAADWTALAEEMDFEYLEIRQLETQADPTGRLLDAWQGRPGASVGRLLELLTKLGRDDVLLELGPSIEEDCQKYILKQQQEEAEKPLQVAAVDSSVPRTAELAGITTLDDPLGHMPERFDAFICYCPSDIQFVQEMIRQLEQTNYRLKLCVSDRDVLPGTCVWSIASELIEKRCRRMVVVVSDDYLQSKECDFQTKFALSLSPGAHQKRLIPIKYKAMKKEFPSILRFITVCDYTNPCTKSWFWTRLAKALSLP

SEQ ID NO: 40503 - protein, 258 aa, Homo sapiens
MRPDRAEAPGPPAMAAGGPGAGSAAPVSSTSSLPLAALNMRVRRRLSLFLNVRTQVAADWTALAEEMDFEYLEIRQLETQADPTGRLLDAWQGRPGASVGRLLELLTKLGRDDVLLELGPSIEEDCQKYILKQQQEEAEKPLQVAAVDSSVPRTAELAGITTLDDPLGHMPERFDAFICYCPSDIQFVQEMIRQLEQTNYRLKLCVSDRDVLPGTCVWSIASAAGWWWLSLMITCRARNVTSRPNLHSASLQVPIRSD

SEQ ID NO: 40504 - protein, 180 aa, Homo sapiens
MAICSCQCPAAMAFCFLETLWWEFTASYDTTCIGLASRPYAFLEFDSIIQKVKWHFNYVSSSQMECSLEKIQEELKLQPPAVLTLEDTDVANGVMNGHTPMHLEPAPNFRMEPVTALGILSLILNIMCAALNLIRGVHLAEHSLQVAHEEIGNILAFLVPFVACIFQDPRSWFCWLDQTS

SEQ ID NO: 40505 - protein, 233 aa, Homo sapiens
MAICSCQCPAAMAFCFLETLWWEFTASYDTTCIGLASRPYAFLEFDSIIQKVKWHFNYVSSSQMECSLEKIQEELKLQPPAVLTLEDTDVANGVMNGHTPMHLEPAPNFRMEPVTALGILSLILNIMCAALNLIRGVHLAEHSLQVAHEEIGNILAFLVPFVACIFQCYLYLFYSPARTMKVVLMLLFICLGNMYLHGLRNLWQILFHIGVAFLSSYQILTRQLQEKQSDCGV

SEQ ID NO: 40506 - protein, 118 aa, Homo sapiens [sequence omitted]

SEQ ID NO: 40507 - protein, 2553 aa, Homo sapiens [sequence omitted]

SEQ ID NO: 40508 - protein, 1049 aa, Homo sapiens
MVSYTITLVFQHYHAKFLGSLRARLMLLHPSPNCSLRAESLVHVHFKEEIGVAELIPLVTTYIILFAYIYFSTRKIDMVKSKWGLALAAVVTVLSSLLMSVGLCTLFGLTPTLNGGEIFPYLVVVIGLENVLVLTKSVVSTPVDLEVKLRIAQGLSSESWSIMKNMATELGIILIGYFTLVPAIQEFCLFAVVGLVSDFFLQMLFFTTVLSIDIRRMELADLNKRLPPEACLPSAKPVGQPTRYERQLAVRPSTPHTITLQPSSFRNLRLPKRLRVVYFLARTRLAQRLIMAGTVVWIGILVYTDPAGLRNYLAAQVTEQSPLGEGALAPMPVPSGMLPPSHPDPAFSIFPPDAPKLPENQTSPGESPERGGPAEVVHDSPVPEVTWGPEDEELWRKLSFRHWPTLFSYYNITLAKRYISLLPVIPVTLRLNPREALEGRHPQDGRSAWPPPGPIPAGHWEAGPKGPGGVQAHGDVTLYKVAALGLATGIVLVLLLLCLYRVLCPRNYGQLGGGPGRRRRGELPCDDYGYAPPETEIVPLVLRGHLMDIECLASDGMLLVSCCLAGHVCVWDAQTGDCLTRIPRPGRQRRDSGVGSGLEAQESWERLSDGGKAGPEEPGDSPPLRHRPRGPPPPSLFGDQPDLTCLIDTNFSAQPRSSQPTQPEPRHRAVCGRSRDSPGYDFSCLVQRVYQEEGLAAVCTPALRPPSPGPVLSQAPEDEGGSPEKGSPSLAWAPSAEGSIWSLELQGNLIVVGRSSGRLEVWDAIEGVLCCSSEEVSSGITALVFLDKRIVAARLNGSLDFFSLETHTALSPLQFRGTPGRGSSPASPVYSSSDTVACHLTHTVPCAHQKPITALKAAAGRLVTGSQDHTLRVFRLEDSCCLFTLQGHSGAITTVYIDQTMVLASGGQDGAICLWDVLTGSRVSHVFAHRGDVTSLTCTTSCVISSGLDDLISIWDRSTGIKFYSIQQDLGCGASLGVISDNLLVTGGQGCVSFWDLNYGDLLQTVYLGKNSEAQPARQILVLDNAAIVCNFGSELSLVYVPSVLEKLD

SEQ ID NO: 40509 - protein, 419 aa, Homo sapiens [sequence omitted]

SEQ ID NO: 40510 - protein, 121 aa, Homo sapiens
MFLTSAFLTGFSFHCLYSGIGHGEDILASVEQITIVSRPLSGQRGAGPGNSAYTPRRSQGGPRAATTPGFRFPCRGLVRRAVLRLTVTVQDCILTALLAVSFHSIGVVIMTSSYLLGPVVK

SEQ ID NO: 40511 - protein, 186 aa, Homo sapiens
MEPHLLEACVRDVLNDTAPRAMAVLESLRVIITNFPAAKSLDIQVPNFPADETKGFHQVPFAPIVFIERTDFKEEPEPGFKRLAWGQPVGLRHTGYVIELQHVVKGPSGCVESLEVTCRRADAGEKPKAFIHWVSQPLMCEVRLYERLFQHKNPEDPTEVPGGFLSDLNLLVFNRTVTLKEDPGKV

SEQ ID NO: 40512 - protein, 1089 aa, Homo sapiens
MLTWPSLLVEADEQLCIPPLNSQTCLLGSEENLAPLAGEKAVPPGNDPVSPAMVRSRNPGKDDCAKEEMAVAADAATLVDEPESMVNLAFVKNDSYEKGPDSVVVHVYVKEICRDTSRVLFREQDFTLIFQTRDGNFLRLHPGCGPHTTFRWQVKLRNLIEPEQCTFCFTASRIDICLRKRQSQRWGGLEAPAARGAVGGAKVAVPTGPTPLDSTPPGGAPHPLTGQEEARAVEKDKSKARSEDTGLDSVATRTPMEHVTPKPETHLASPKPTCMVPPMPHSPVSGDSVEEEEEEEKKVCLPGFTGLVNLGNTCFMNSVIQSLSNTRELRDFFHDRSFEAEINYNNPLGTGGRLAIGFAVLLRALWKGTHHAFQPSKLKAIVASKASQFTGYAQHDAQEFMAFLLDGLHEDLNRIQNKPYTETVDSDGRPDEVVAEEAWQRHKMRNDSFIVDLFQGQYKSKLVCPVCAKVSITFDPFLYLPVPLPQKQKVLPVFYFAREPHSKPIKFLVSVSKENSTASEVLDSLSQSVHVKPENLRLAEVIKNRFHRVFLPSHSLDTVSPSDTLLCFELLSSELAKERVVVLEVQQRPQVPSVPISKCAACQRKQQSEDEKLKRCTRCYRVGYCNQLCQKTHWPDHKGLCRPENIGYPFLVSVPASRLTYARLAQLLEGYARYSVSVFQPPFQPGRMALESQSPGCTTLLSTGSLEAGDSERDPIQPPELQLVTPMAEGDTGLPRVWAAPDRGPVPSTSGISSEMLASGPIEVGSLPAGERVSRPEAAVPGYQHPSEAMNAHTPQFFIYKIDSSNREQRLEDKGDTPLELGDDCSLALVWRNNERLQEFVLVASKELECAEDPGSAGEAARAGHFTLDQCLNLFTRPEVLAPEEAWYCPQCKQHREASKQLLLWRLPNVLIVQLKRFSFRSFIWRDKINDLVEFPVRNLDLSKFCIGQKEEQLPSYDLYAVINHYGGMIGGHYTACARLPNDRSSQRSDVGWRLFDDSTVTTVDESQVVTRYAYVLFYRRRNSPVERPPRAGHSEHHPDLGPAAEAAASQGLGPGQAPEVAPTRTAPERFAPPVDRPAPTYSNMEEVD

SEQ ID NO: 40513 - protein, 431 aa, Homo sapiens
MSQDLSATEAQLVAFLQGLRDDGFQPTILRSGDVYGYSSCTANPPSQTKLQARAPNPTATSPPASAPRTAMRLPAGRATLLPMPLSGRLAKASTPALAKHATTNLLLSSLKQSSASHARGAAVGFPTHLYPGVYPAMRLSVVLEALVPLKTPMPCLGAKHKAQSLQLSLADSPLKLRKSSGKGPGNPRPKAPRKTTSKGPKCLTRKGPGAGPRRGSGHQSKTNRATGSPSVRRMKGGSALGTKTAQAKVARTLAKAARAQAKVARTQAKAAKARAKAKAAQVKAKAKAKAAQVKAKAKVMAAWAKAKAKAKAVRAKAKVARTQPRGRGRPKGSAKARTTRKGQKNRPETVGQKRKRAEEAKDLPPKKRTRLGPRSPKAWLGPGTAKLLKFRAIKVDRRSSDDEVRQRAQRILRVNLSPVIRLQPLLPYSAV

SEQ ID NO: 40514 - protein, 90 aa, Homo sapiens [sequence omitted]

SEQ ID NO: 40515 - protein, 106 aa, Homo sapiens
MAESWSGQALQALPATVLGALGSEFLREWEAQDMRVTLFKLLLLWLVLSLLGIQLAWGFYGNTVTGLYHRPGEASYEPPWAGRPRPHPLPTVPLGSPLSCKRLIRT

SEQ ID NO: 40516 - protein, 492 aa, Homo sapiens
MLRVGLGTPDSEGFPPRALHNCPYKCICAADLLSCTGLGLQDVPAELPAATADLDLSHNALQRLRPGWLAPLFQLRALHLDHNELDALGRGVFVNASGLRLLDLSSNTLRALGRHDLDGLGALEKLLLFNNRLVHLDEHAFHGLRALSHLYLGCNELASFSFDHLHGLSATHLLTLDLSSNRLGHISVPELAALPAFLKNGLYLHNNPLPCDCRLYHLLQRWHQRGLSAVRDFAREYVCLAFKVPASRVRFFQHSRVFENCSSAPALGLERPEEHLYALVGRSLRLYCNTSVPAMRIAWVSPQQELLRAPGSRDGSIAVLADGSLAIGNVQEQHAGLFVCLATGPRLHHNQTHEYNVSVHFPRPEPEAFNTGFTTLLGCAVGLVLVLLYLFAPPCRCCRRACRCRRWPQTPSPLQELSAQSSVLSTTPPDAPSRKASVHKHVVFLEPGRRGLNGRVQLAVAEEFDLYNPGGLQLKAGSESASSIGSEGPMTT

SEQ ID NO: 40517 - protein, 281 aa, Homo sapiens
MVFFLIAVIYKKFHVPCPLPPNFNNTTGNFSHVEIVKEKVQLQVEPEASAFCTPSYFTLNSQTAYTIPIMAFAFVCHPEVLPIYTELKDPSKKKMQHISNLSIAVMYIMYFLAALFGYLTFYNGVESELLHTYSKVDPFDVLILCVRVAVLTAVTLTVPIVLFPVRRAIQQMLFPNQEFSWLRHVLIAVGLLTCINLLVIFAPNILGIFGVIGATSAPFLIFIFPAIFYFRIMPTEKEPARSTPKILALCFAMLGFLLMTMSLSFIIIDWASGTSRHGGNH

SEQ ID NO: 40518 - protein, 453 aa, Homo sapiens
MELKPTAPPIFTGRPFVVAWDVPTQDCGPRLKVPLDLNAFDVQASPNEGFVNQNITIFYRDRLGLYPRFDSAGRSVHGGVPQNVSLWAHRKMLQKRVEHYIRTQESAGLAVIDWEDWRPVWVRNWQDKDVYRRLSRQLVASRHPDWPPDRIVKQAQYEFEFAAQQFMLETLRYVKAVRPRHLWGFYLFPDCYNHDYVQNWESYTGRCPDVEVARNDQLAWLWAESTALFPSVYLDETLASSRHGRNFVSFRVQEALRVARTHHANHALPVYVFTRPTYSRRLTGLSEMDLISTIGESAALGAAGVILWGDAGYTTSTETCQYLKDYLTRLLVPYVVNVSWATQYCSRAQCHGHGRCVRRNPSASTFLHLSTNSFRLVPGHAPGEPQLRPVGELSWADIDHLQTHFRCQCYLGWSGEQCQWDHRQAAGGASEAWAGSHLTSLLALAALAFTWTL

SEQ ID NO: 40519 - protein, 722 aa, Homo sapiens [sequence omitted]

SEQ ID NO: 40520 - protein, 390 aa, Homo sapiens
MKIDAFHYVQLGTAYRGLQPVPDEEVIELYGGTQHIPLYQMSGFYGKGPSIKQFMDIFSLPEMALLSCVVDYFLGHSLEFDQAHLYKDVTDAIRDVHVKGLMYQWIEQDMEKYILRGDETFAVLSRLVAHGKQLFLITNSPFSFVDKGMRHMVGPDWRQLFDVVIVQADKPSFFTDRRKPFRKLDEKGSLQWDRITRLEKGKIYRQGNLFDFLRLTEWRGPRVLYFGDHLYSDLADLMLRHGWRTGAIIPELEREIRIINTEQYMHSLTWQQALTGLLERMQTYQDAESRQVLAAWMKERQELRCITKALFNAQFGSIFRTFHNPTYFSRRLVRFSDLYMASLSCLLNYRVDFTFYPRRTPLQHEAPLWMDQLCTGCMKTPFLGDMAHIR

SEQ ID NO: 40521 - protein, 242 aa, Homo sapiens
MKRPKLKKASKRMTCHKRYKIQKKVREHHRKLRKEAKKRGHKKPRKDPGVPNSAPFKEALLREAELRKQRLEELKQQQKLDRQKELEKKRKLETNPDIKPSNVEPMEKEFGLCKTENKAKSGKQNSKKLYCQELKKVIEASDVVLEVLDARDPLGCRCPQVEEAIVQSGQKKLVLILNKSDLVPKENLESWLNYLKKELPTVVFRASTKPKDKGKITKVSFISGKKCDSFRFWLKYDECTKS

SEQ ID NO: 40522 - protein, 852 aa, Homo sapiens
MEEVELSWEDYLEETGSTAVPYGSFKHVDTRLQNGFAPGMKLEVAVRTDPETYWVATVITTCEQLLLLRYDGYGEDRRADFWCDIRKADLYPIGWCEQNKKTLEAPEGIRDKVSDWDEFLRQTLIGACSPPVPLLEGLRNGRNPLDLIAPGSRLECQAFQDSLSTWIVTVVENIGGRLKLRYEGLESSDNYEHWLYYLDPFLHHVGWAAQQGYELQPPSAIRHLKNEAEWQEILAKVKEEEEEPLPSYLFKDKQVIGIHTFSVNMKLEAVDPWSPFGISPATVVKVFDEKYFLVEMDDLRPENHARRSFVCHADSPGIFPVQWSLKNGLHISPPPGYPSQDFDWADYLKQCGAEAAPQRCFPPLISEHEFKENMKLEAVNPILPEEVCVATITAVRGSYLWLQLEGSKKPIPECIVSVESMDIFPLGWCETNGHPLSTPRRARVYKQRKIAVVQPEKQVPSSRTVHEGLRNQELNSTESVMINGKYCCPKIYFNHRCFSGPYLNKGRIAELPQCVGPGNCVLVLREVLTLLINAAYKPSRVLRELQLDKDSVWHGCGEVLKAKYKGKSYRATVEIVKTADRVTEFCRQTCIKLECCPNLFGPRMVLDKCSENCSVLTKTKYTHYYGKKKNKRIGRPPGGHSNLACALKKASKRRKRRKNVFVHKKKRSSASVDNTPAGSPQGSGGEDEDDPDEGDDDSLSEGSTSEQQDELQEESEMSEKKSCSSSPTQSEISTSLPPDRQRRKRELRTFSFSDDENKPPSPKEIRIEVAERLHLDSNPLKWSVADVVRFIRSTDCAPLARIFLDQEIDGQALLLLTLPTVQECMDLKLGPAIKLCHHIERIKFAFYEQFAN

SEQ ID NO: 40523 - protein, 228 aa, Homo sapiens
MTDPVTLNVGGHLYTTSLTTLTRYPDSMLGAMFGGDFPTARDPQGNYFIDRDGPLFRYVLNFLRTSELTLPLDFKEFDLLRKEADFYQIEPLIQCLNDPKPLYPMDTFEEVVELSSTRKLSKYSNPVAVIITQLTITTKVHSLLEGISNYFTKWNKHMMDTRDCQVSFTFGPCDYHQEVSLRVHLMEYITKQGFTIRNTRVHHMSERANENTVEHNWTFCRLARKTDD

SEQ ID NO: 40524 - protein, 1235 aa, Homo sapiens
MQNAGIVHAENEEEDDVPEMNSSFTADSGEQEEHTLQETALPPVNSSIIAAPITDPSQKFPQYLPLSAEDNLGPLPENWEMAYTENGEVYFIDHNTKTTSWLDPRCLNKQQKPLEECEDDEGVHTEELDSELELPAGWEKIEDPVYGIYYVDHINRKTQYENPVLEAKRKKQLEQQQQQQQQQQQQQQQQQQQQTEEWTEDHSALVPPVIPNHPPSNPEPAREVPLQGKPFFTRNPSELKGKFIHTKLRKSSRGFGFTVVGGDEPDEFLQIKSLVLDGPAALDGKMETGDVIVSVNDTCVLGHTHAQVVKIFQSIPIGASVDLELCRGYPLPFDPDDPNTSLVTSVAILDKEPIIVNGQETYDSPASHSSKTGKVNGMKDARPSSPADVASNSSHGYPNDTVSLASSIATQPELITVHIVKGPMGFGFTIADSPGGGGQRVKQIVDSPRCRGLKEGDLIVEVNKKNVQALTHNQVVDMLVECPKGSEVTLLVQRGGLPVPKKSPKSQPLERKDSQNSSQHSVSSHRSLHTASPSHSTQVLPEFPPAEAQAPDQTDSSGQKKPDPFKIWAQSRSMYENRLPDYQEQDIFLWRKETGFGFRILGGNEPGEPIYIGHIVPLGAADTDGRLRSGDELICVDGTPVIGKSHQLVVQLMQQAAKQGHVNLTVRRKVVFAVPKTENEVPSPASSHHSSNQPASLTEEKRTPQGSQNSLNTVSSGSGSTSGIGSGGGGGSGVVSTVVQPYDVEIRRGENEGFGFVIVSSVSRPEAGTTFGNACVAMPHKIGRIIEGSPADRCGKLKVGDRILAVNGCSITNKSHSDIVNLIKEAGNTVTLRIIPGDESSNATLLTNAEKIATITTTHTPSQQGTQETRNTTKPKQESQFEFKAPQATQEQDFYTVELERGAKGFGFSLRGGREYNMDLYVLRLAEDGPAERCGKMRIGDEILEINGETTKNMKHSRAIELIKNGGRRVRLFLKRGDGSVPEYDPSSDRHGPATGPQGVPEVRAGPDRRQHPSLESSYPPDLHKSSPHGEKRAHARDPKGSREYSRQPNEHHTWNGTSRKPDSGACRPKDRAPEGRRDAQAERAAAANGPKRRSPEKRREGTRSADNTLERREKHEKRRDVSPERRRERSPTRRRDGSPSRRRRSLERLLEQRRSPERRRGGSPERRAKSTDRRRARSPERRRERSLDKRNREDRASHREREEANLKQDAGRSSRHPPEQRRRPYKECSTDLSI

SEQ ID NO: 40525 - protein, 675 aa, Homo sapiens [sequence omitted]

SEQ ID NO: 40526 - protein, 676 aa, Homo sapiens [sequence omitted]

SEQ ID NO: 40527 - protein, 124 aa, Homo sapiens [sequence omitted]

SEQ ID NO: 40528 - protein, 283 aa, Homo sapiens
MLGTGKLFWVFFLIPYLDIWNIHGKESCDVQLYIKRQSEHSILAGDPFELECPVKYCANRPHVTWCKLNGTTCVKLEDRQTSWKEEKNISFFILHFEPVLPNDNGSYRCSANFQSNLIESHSTTLYVTDVKSASERPSKDEMASRPWLLYRLLPLGGLPLLITTCFCLFCCLRRHQGKQNELSDTAGREINLVDAHLKSEQTEASTRQNSQVLLSETGIYDNDPDLCFRMQEGSEVYSNPCLEENKPGIVYASLNHSVIGPNSRLARNVKEAPTEYASICVRS

SEQ ID NO: 40529 - protein, 235 aa, Homo sapiens
MLGTGKLFWVFFLIPYLDIWNIHGKESCDVQLYIKRQSEHSILAGDPFELECPVKYCANRPHVTWCKLNGTTCVKLEDRQTSWKEEKNISFFILHFEPVLPNDNGSYRCSANFQSNLIESHSTTLYVTGKQNELSDTAGREINLVDAHLKSEQTEASTRQNSQVLLSETGIYDNDPDLCFRMQEGSEVYSNPCLEENKPGIVYASLNHSVIGPNSRLARNVKEAPTEYASICVRS

SEQ ID NO: 40530 - protein, 408 aa, Homo sapiens [sequence omitted]

SEQ ID NO: 40531 - protein, 566 aa, Homo sapiens
MAAVPPGLEPWNRVRIPKAGNRSAVTVQNPGAALDLCIAAVIKECHLVILSLKSQTLDAETDVLCAVLYSNHNRMGRHKPHLALKQVEQCLKRLKNMNLEGSIQDLFELFSSNENQPLTTKVCVVPSQPVVELVLMKVLGACKLLLRLLDCCCKTFLLTVKHLGLQEFIILNLVMVGLVSRLWVLYKGVLKRLILLYEPLFGLLQEVARIQPMPYFKDFTFPSDITEFLGQPYFEAFKKKMPIAFAAKGINKLLNKLFLINEQSPRASEETLLGISKKAKQMKINVQNNVDLGQPVKNKRVFKEESSEFDVRAFCNQLKHKATQETSFDFKCSQSRLKTTKYSSQKVIGTPHAKSFVQRFREAESFTQLSEEIQMAVVWCRSKKLKAQAIFLGNKLLKSNRLKHLEAQGTSLPKKLECIKTSICNHLLRGSGIKTSKHHLRQRRSQNKFLRRQRKPQRKLQSTLLREIQQFSQGTRKSATDTSAKWRLSHCTVHRTDLYPNSKQLLNSGVSMPVIQTKEKMIHENLRGIHENETDSWTVMQINKNSTSGTIKETDDIDDIFALMGV

SEQ ID NO: 40532 - protein, 110 aa, Homo sapiens [sequence omitted]

SEQ ID NO: 40533 - protein, 1239 aa, Homo sapiens
MVQTSGKSHAASDAPENLTLLAETADARGRSGSSSRTNFTILPVGYSLEIATALTSQSGNLASESLHLPSSSSEFDERIAAFQTKSGTASEMGTERAMGLSEEWTVHSQEATTSAWSPSFLPALEMGELTTPSRKRNSSGPDLSWLHFYRTAASSPLLDLSSSSESTEKLNNSTGLQSSSVSQTKTMHVATVFTDGGPRTLRSLTVSLGPVSKTEGFPKDSRIATTSSSVLLSPSAVESRRNSRVTGNPGDEEFIEPSTENEFGLTSLRWQNDSPTFGEHQLASSSEVQNGSPMSQTETVSRSVAPMRGGEITAHWLLTNSTTSADVTGSSASYPEGVNASVLTQFSDSTVQSGGSHTALGDRSYSESSSTSSSESLNSSAPRGERSIAGISYGQVRGTAIEQRTSSDHTDHTYLSSTFTKGERALLSITDNSSSSDIVESSTSYIKISNSSHSEYSSFFHAQTERSNISSYDGEYAQPSTESPVLHTSNLPSYTPTINMPNTSVVLDTDAEFVSDSSSSSSSSSSSSSSGPPLPLPSVSQSHHLFSSILPSTRASVHLLKSTSDASTPWSSSPSPLPVSLTTSTSAPLSVSQTTLPQSSSTPVLPRARETPVTSFQTSTMTSFMTMLHSSQTADLKSQSTPHQEKVITESKSPSLVSLPTESTKAVTTNSPLPPSLTESSTEQTLPATSTNLAQMSPTFTTTILKTSQPLMTTPGTLSSTASLVTGPIAVQTTAGKQLSLTHPEILVPQISTEGGISTERNRVIVDATTGLIPLTSVPTSAKEMTTKLGVTAEYSPASRSLGTSPSPQTTVVSTAEDLAPKSATFAVQSSTQSPTTVSSSASVNSCAVNPCLHNGECVADNTSRGYHCRCPPSWQGDDCSVDVNECLSNPCPSTAMCNNTQGSFICKCPVGYQLEKGICNLVRTFVTEFKLKRTFLNTTVEKHSDLQEVENEITKTLNMCFSALPSYIRSTVHASRESNAVVISLQTTFSLASNVTLFDLADRMQKCVNSCKSSAEVCQLLGSQRRIFRAGSLCKRKSPECDKDTSICTDLDGVALCQCKSGYFQFNKMDHSCRACEDGYRLENETCMSCPFGLGGLNCGNPYQLITVVIAAAGGGLLLILGIALIVTCCRKNKNDISKLIFKSGDFQMSPYAEYPKNPRSQEWGREAIEMHENGSTKNLLQMTDVYYSPTSVRNPELERNGLYPAYTGLPGSRHSCIFPGQYNPSFISDESRRRDYF

SEQ ID NO: 40534 - protein, 898 aa, Homo sapiens
MSTTSGEAGSPAAAMHQETEGASLHVNVTDDMGLVSRSLAASSALGVAGISYGQVRGTAIEQRTSSDHTDHTYLSSTFTKGERALLSITDNSSSSDIVESSTSYIKISNSSHSEYSSFFHAQTERSNISSYDGEYAQPSTESPVLHTSNLPSYTPTINMPNTSVVLDTDAEFVSDSSSSSSSSSSSSSSGPPLPLPSVSQSHHLFSSILPSTRASVHLLKSTSDASTPWSSSPSPLPVSLTTSTSAPLSVSQTTLPQSSSTPVLPRARETPVTSFQTSTMTSFMTMLHSSQTADLKSQSTPHQEKVITESKSPSLVSLPTESTKAVTTNSPLPPSLTESSTEQTLPATSTNLAQMSPTFTTTILKTSQPLMTTPGTLSSTASLVTGPIAVQTTAGKQLSLTHPEILVPQISTEGGISTERNRVIVDATTGLIPLTSVPTSAKEMTTKLGVTAEYSPASRSLGTSPSPQTTVVSTAEDLAPKSATFAVQSSTQSPTTVSSSASVNSCAVNPCLHNGECVADNTSRGYHCRCPPSWQGDDCSVDVNECLSNPCPSTAMCNNTQGSFICKCPVGYQLEKGICNLVRTFVTEFKLKRTFLNTTVEKHSDLQEVENEITKTLNMCFSALPSYIRSTVHASRESNAVVISLQTTFSLASNVTLFDLADRMQKCVNSCKSSAEVCQLLGSQRRIFRAGSLCKRKSPECDKDTSICTDLDGVALCQCKSGYFQFNKMDHSCRACEDGYRLENETCMSCPFGLGGLNCGNPYQLITVVIAAAGGGLLLILGIALIVTCCRKNKNDISKLIFKSGDFQMSPYAEYPKNPRSQEWGREAIEMHENGSTKNLLQMTDVYYSPTSVRNPELERNGLYPAYTGLPGSRHSCIFPGQYNPSFISDESRRRDYF

SEQ ID NO: 40535 - protein, 459 aa, Homo sapiens
MVLDFVVPSPQGTSWGLGGTCVNVGCIPKKLMHQAALLGQALCDSRKFGWEYNQQVRHNWETMTKAIQNHISSLNWGYRLSLREKAVAYVNSYGEFVEHHKIKATNKKGQETYYTAAQFVIATGERPRYLGIQGDKEYCITSDDLFSLPYCPGKTLVVGASYVALECAGFLAGFGLDVTVMVRSILLRGFDQEMAEKVGSYMEQHGVKFLRKFIPVMVQQLEKGSPGKLKVLAKSTEGTETIEGVYNTVLLAIGRDSCTRKIGLEKIGVKINEKSGKIPVNDVEQTNVPYVYAVGDILEDKPELTPVAIQSGKLLAQRLFGASLEKCDYINVPTTVFTPLEYGCCGLSEEKAIEVYKKENLEIYHTLFWPLEWTVAGRENNTCYAKIICNKFDHDRVIGFHILGPNAGEVTQGFAAAMKCGLTKQLLDDTIGIHPTCGEVFTTLEITKSSGLDITQKGC

SEQ ID NO: 40536 - protein, 470 aa, Homo sapiens
MAHPAVLNAQHPDSHHPGLAHNYMEPAQLLPPDEVDVFFNHLDSQGNPYYANPAHARARVSYSPAHARLTGGQMCRPHLLHSPGLPWLDGGKAALSAAAAHHHNPWTVSPFSKTPLHPSAAGGPGGPLSVYPGAGGGSGGGSGSSVASLTPTAAHSGSHLFGFPPTPPKEVSPDPSTTGAASPASSSAGGSAARGEDKDGVKYQVSLTESMKMESGSPLRPGLATMGTQPATHHPIPTYPSYVPAAAHDYSSGLFHPGGFLGGPASSFTPKQRSKARSCSEGRECVNCGATATPLWRRDGTGHYLCNACGLYHKMNGQNRPLIKPKRRLSAARRAGTCCANCQTTTTTLWRRNANGDPVCNACGLYYKLHNVNRPLTMKKEGIQTRNRKMSNKSKKSKKGAECFEELSKCMQEKSSPFSAAALAGHMAPVGHLPPFSHSGHILPTPTPIHPSSSLSFGHPHPSSMVTAMG

SEQ ID NO: 40537 - protein, 82 aa, Homo sapiens
MGTLVRCGKAKGVVIGTGENSEFGEVFKMMQAEEAPKTPLQKSMDLLGKQLSFYSFGIIGIIMLVGWLLGKDILEMFTISVR

SEQ ID NO: 40538 - protein, 362 aa, Homo sapiens [sequence omitted]

SEQ ID NO: 40539 - protein, 5 aa, Homo sapiens
MFTKL

SEQ ID NO: 40540 - protein, 447 aa, Homo sapiens
MKQIDIMVAHKKSEWEGRTHALETCLKIREQELKSLRSQLDVTHKEVGMLHQQVEEHEKIKQEMTMEYKQELKKLHEELCILKRSYEKLQKKQMREFRGNTKNHREDRSEIERLTAKIEEFRQKSLDWEKQRLIYQQQVSSLEAQRKALAEQSEIIQAQLVNRKQKLESVELSSQSEIQHLSSKLERANDTICANELEIERLTMRVNDLVGTSMTVLQEQQQKEEKLRESEKLLEALQEEKRELKAALQSQENLIHEARIQKEKLQEKVKATNTQHAVEAISLESVSATCKQLSQELMEKYEELKRMEAHNNEYKAEIKKLKEQILQGEQSYSSALEGMKMEISHLTQELHQRDITIASTKGSSSDMEKRLRAEMQKAEDKAVEHKEILDQLESLKLENRHLSEMVMKLELGLHERWGFTMLSSLVLNFGIQAIRQPQRPKVLELQV

SEQ ID NO: 40541 - protein, 513 aa, Homo sapiens
MKQIDIMVAHKKSEWEGRTHALETCLKIREQELKSLRSQLDVTHKEVGMLHQQVEEHEKIKQEMTMEYKQELKKLHEELCILKRSYEKLQKKQMREFRGNTKNHREDRSEIERLTAKIEEFRQKSLDWEKQRLIYQQQVSSLEAQRKALAEQSEIIQAQLVNRKQKLESVELSSQSEIQHLSSKLERANDTICANELEIERLTMRVNDLVGTSMTVLQEQQQKEEKLRESEKLLEALQEEKRELKAALQSQENLIHEARIQKEKLQEKVKATNTQHAVEAIRPREESLAEKKYTSQGQGDLDSVLSQLNFTHTSEDLLQAEVTCLEGSLESVSATCKQLSQELMEKYEELKRMEAHNNEYKAEIKKLKEQILQGEQSYSSALEGMKMEISHLTQELHQRDITIASTKGSSSDMEKRLRAEMQKAEDKAVEHKEILDQLESLKLENRHLSEMVMKLELGLHECSLPVSPLGSIATRFLEEEELRSHHILERLDAHIEELKRESEKTVRQFTALK

SEQ ID NO: 40542 - protein, 675 aa, Homo sapiens
MKQIDIMVAHKKSEWEGRTHALETCLKIREQELKSLRSQLDVTHKEVGMLHQQVEEHEKIKQEMTMEYKQELKKLHEELCILKRSYEKLQKKQMREFRGNTKNHREDRSEIERLTAKIEEFRQKSLDWEKQRLIYQQQVSSLEAQRKALAEQSEIIQAQLVNRKQKLESVELSSQSEIQHLSSKLERANDTICANELEIERLTMRVNDLVGTSMTVLQEQQQKEEKLRESEKLLEALQEEKRELKAALQSQENLIHEARIQKEKLQEKVKATNTQHAVEAIRPREESLAEKKYTSQGQGDLDSVLSQLNFTHTSEDLLQAEVTCLEGSLESVSATCKQLSQELMEKYEELKRMEAHNNEYKAEIKKLKEQILQGEQSYSSALEGMKMEISHLTQELHQRDITIASTKGSSSDMEKRLRAEMQKAEDKAVEHKEILDQLESLKLENRHLSEMVMKLELGLHEAKEISLADLQENYIEALNKLVSENQQLQKDLMNTKSQLEISTQMCKKQNDRIFKPTHSRTTEFKNTEFKPTHGQHRHDGIKTEHYKTDLHSPRGQASDSINPMSRVLSPLSPQISPCSSTRSLTSYSLCKTHSLPSALDTNEANFSDTMSESMNDQEEFISSCSLPVSPLGSIATRFLEEEELRSHHILERLDAHIEELKRESEKTVRQFTALK

SEQ ID NO: 40543 - protein, 185 aa, Homo sapiens
MNPTNTPNVFDAKCLIGCRFDDAVVQSDMKHWPFMVVNDAVRLKVQVEYKGETKSFYPEEVPSMVLTKMKEIAEADLGKIVTNAVVTVSAYFNDCQCQATKDAGTIAGLNVLRIINEPTAAAIAYGLDKKVGAERNVLIFDLGDDTFNVSILTTEDGIFEVKSRAGDTHLCGEDFDYRMVNHFYC

SEQ ID NO: 40544 - protein, 1064 aa, Homo sapiens [sequence omitted]

SEQ ID NO: 40545 - protein, 131 aa, Homo sapiens
MGLPRRRFSSEAAESGSPETKKPTFMDEEVQSILTKMTGLNLQKTFKPAIQELKPPTYKLMTQAQLEEATRQAVEAAKVRLKMPPVLEERVPINDVLAEDKILEGTETTKYVFTDISYSIPHRVSICLIAK

SEQ ID NO: 40546 - protein, 260 aa, Homo sapiens
MAGASVNRVVSPGPLHCLKVILEKEGPRSLFRGLGPNLVGVAPSRAIYFAAYSNCKEKLNDVFDPDSTQVHMISAAMAGFTAITATNPIWLIKTRLQLDARNRGERRMGAFECVRKVYQTDGLKGFYRGMSASYAGISETVIHFVIYESIKQKLLEYKTASTMENDEESVKEASDFVGMMLAAATSKTCATTIAYPHVVRTRLREEGTKYRSFFQTLSLLVQEEGYGSLYRGLTTHLVRQIPNTAIMMATYELVVYLLNG

SEQ ID NO: 40547 - protein, 2578 aa, Homo sapiens
MLLDFIQHIMKSSPLMFVNVSGSHEAKGSCIEFSNWIITRLLRIAATPSCHLLHKKICEVICSLLFLFKSKSPAIFGVLTKELLQLFEDLVYLHRRNVMGHAVEWPVVMSRFLSQLDEHMGYLQSAPLQLMSMQNLEFIEVTLLMVLTRIIAIVFFRRQELLLWQIGCVLLEYGSPKIKSLAISFLTELFQLGGLPAQPASTFFSSFLELLKHLVEMDTDQLKLYEEPLSKLIKTLFPFEAEAYRNIEPVYLNMLLEKLCVMFEDGVLMRLKSDLLKAALCHLLQYFLKFVPAGYESALQVRKVYVRNICKALLDVLGIEVDAEYLLGPLYAALKMESMEIIEEIQCQTQQENLSSNSDGISPKRRRLSSSLNPSKRAPKQTEEIKHVDMNQKSILWSALKQKAESLQISLEYSGLKNPVIEMLEGIAVVLQLTALCTVHCSHQNMNCRTFKDCQHKSKKKPSVVITWMSLDFYTKVLKSCRSLLESVQKLDLEATIDKVVKIYDALIYMQVNSSFEDHILEDLCGMLSLPWIYSHSDDGCLKLTTFAANLLTLSCRISDSYSPQAQSRCVFLLTLFPRRIFLEWRTAVYNWALQSSHEVIRASCVSGFFILLQQQNSCNRVPKILIDKVKDDSDIVKKEFASILGQLVCTLHGMFYLTSSLTEPFSEHGHVDLFCRNLKATSQHECSSSQLKASVCKPFLFLLKKKIPSPVKLAFIDNLHHLCKHLDFREDETDVKAVLGTLLNLMEDPDKDVRVAFSGNIKHILESLDSEDGFIKELFVLRMKEAYTHAQISRNNELKDTLILTTGDIGRAAKGDLVPFALLHLLHCLLSKSASVSGAAYTEIRALVAAKSVKLQSFFSQYKKPICQFLVESLHSSQMTALPNTPCQNADVRKQDVAHQREMALNTLSEIANVFDFPDLNRFLTRTLQVLLPDLAAKASPAASALIRTLGKQLNVNRREILINNFKYIFSHLVCSCSKDELERALHYLKNETEIELGSLLRQDFQGLHNELLLRIGEHYQQVFNGLSILASFASSDDPYQGPRDIISPELMADYLQPKLLGILAFFNMQLLSSSVGIEDKKMALNSLMSLMKLMGPKHVSSVRVKMMTTLRTGLRFKDDFPELCCRAWDCFVRCLDHACLGSLLSHVIVALLPLIHIQPKETAAIFHYLIIENRDAVQDFLHEIYFLPDHPELKKIKAVLQEYRKETSESTDLQTTLQLSMKAIQHENVDVRIHALTSLKETLYKNQEKLIKYATDSETVEPIISQLVTVLLKGCQDANSQARLLCGECLGELGAIDPGRLDFSTTETQGKDFTFVTGVEDSSFAYGLLMELTRAYLAYADNSRAQDSAAYAIQELLSIYDCREMETNGPGHQLWRRFPEHVREILEPHLNTRYKSSQKSTDWSGVKKPIYLSKLGSNFAEWSASWAGYLITKVRHDLASKIFTCCSIMMKHDFKVTIYLLPHILVYVLLGCNQEDQQEVYAEIMAVLKHDDQHTINTQDIASDLCQLSTQTVFSMLDHLTQWARHKFQALKAEKCPHSKSNRNKVDSMVSTVDYEDYQSVTRFLDLIPQDTLAVASFRSKAYTRAVMHFESFITEKKQNIQEHLGFLQKLYAAMHEPDGVAGVSAIRKAEPSLKEQILEHESLGLLRDATACYDRAIQLEPDQIIHYHGVVKSMLGLGQLSTVITQVNGVHANRSEWTDELNTYRVEAAWKLSQWDLVENYLAADGKSTTWSVRLGQLLLSAKKRDITAFYDSLKLVRAEQIVPLSAASFERGSYQRGYEYIVRLHMLCELEHSIKPLFQHSPGDSSQEDSLNWVARLEMTQNSYRAKEPILALRRALLSLNKRPDYNEMVGECWLQSARVARKAGHHQTAYNALLNAGESRLAELYVERAKWLWSKGDVHQALIVLQKGVELCFPENETPPEGKNMLIHGRAMLLVGRFMEETANFESNAIMKKYKDVTACLPEWEDGHFYLAKYYDKLMPMVTDNKMEKQGDLIRYIVLHFGRSLQYGNQFIYQSMPRMLTLWLDYGTKAYEWEKAGRSDRVQMRNDLGKINKVITEHTNYLAPYQFLTAFSQLISRICHSHDEVFVVLMEIIAKVFLAYPQQAMWMMTAVSKSSYPMRVNRCKEILNKAIHMKKSLEKFVGDATRLTDKLLELCNKPVDGSSSTLSMSTHFKMLKKLVEEATFSEILIPLQSVMIPTLPSILGTHANHASHEPFPGHWAYIAGFDDMVEILASLQKPKKISLKGSDGKFYIMMCKPKDDLRKDCRLMEFNSLINKCLRKDAESRRRELHIRTYAVIPLNDECGIIEWVNNTAGLRPILTKLYKEKGVYMTGKELRQCMLPKSAALSEKLKVFREFLLPRHPPIFHEWFLRTFPDPTSWYSSRSAYCRSTAVMSMVGYILGLGDRHGENILFDSLTGECVHVDFNCLFNKGETFEVPEIVPFRLTHNMVNGMGPMGTEGLFRRACEVTMRLMRDQREPLMSVLKTFLHDPLVEWSKPVKGHSKAPLNETGEVVNEKAKTHVLDIEQRLQGVIKTRNRVTGLPLSIEGHVHYLIQEATDENLLCQMYLGWTPYM

SEQ ID NO: 40548 - protein, 106 aa, Homo sapiens
MSTAKRTLSKKEQEELKKKEDEKAAAEIYEEFLAAFEGSDGNKVKTFVRGGVVNAAKEEHETDEKRGKIYKPSSRFADQKNPPNQSSNERPPSLLVIETKKPVSHT

SEQ ID NO: 40549 - protein, 198 aa, Homo sapiens
MEKVASAVLFPCKYATTGCSLTLHHTEKPEHEDICEYRPYSCPCPGASCKWQGSLEAVMSHLMHAHKSITTLQGEDIVFLATDINLPGAVDWVMMQSCFGHHFMLVLEKQEKYEGHQQFFAIVLLIGTRKQAENFAYRLELNGNRRRLTWEATPRSIHDGVAAAIMNSDCLVFDTAIAHLFADNGNLGINVTISTCCP

SEQ ID NO: 40550 - protein, 355 aa, Homo sapiens
MTLLSLLGRIMRYFLLRPETLFLLCISLALWSYFFHTDEVKTIVKSSRDAVKMVKGKVAEIMQNDRLGGLDVLEAEFSKTWEFKNHNVAVYSIQGRRDHMEDRFEVLTDLANKTHPSIFGIFDGHGGETAAEYVKSRLPEALKQHLQDYEKDKENSVLSYQTILEQQILSIDREMLEKLTVSYDEAGTTCLIALLSDKDLTVANVGDSRGVLCDKDGNAIPLSHDHKPYQLKERKRIKRAGGFISFNGSWRVQGILAMSRSLGDYPLKNLNVVIPDPDILTFDLDKLQPEFMILASDGLWDAFSNEEAVRFIKERLDEPHFGAKSIVLQSFYRGCPDNITVMVVKFRNSSKTEEQ

SEQ ID NO: 40551 - protein, 816 aa, Homo sapiens
MDTEPNPGTSSVSTTTSSTTTTTITTSSSRMQQPQISVYSGSDRHAVQVIQQALHRPPSSAAQYLQQMYAAQQQHLMLHTAALQQQHLSSSQLQSLAAVQASLSSGRPSTSPTGSVTQQSSMSQTSLIFTPATTVAAVQSDIPVVSSSSSSSCQSAATQVQNLTLRSQKLGVLSSSQNGPPKSTSQTQSLTICHNKTTVTSSKISQRDPSPESNKKGESPSLESRSTAVTRTSSIHQLIAPASYSPIQPHSLIKHQQIPLHSPPSKVSHHQLILQQQQQQIQPITLQNSTQDPPPSQHCIPLQNHGLPPAPSNAQSQHCSPIQSHPSPLTVSPNQSQSAQQSVVVSPPPPHSPSQSPTIIIHPQALIQPHPLVSSALQPGPNLQQSTANQVQATAQLNLPSHLPLPASPVVHIGPVQQSALVSPGQQIVSPSHQQYSSLQSSPIPIASPPQMSTSPPAQIPPLPLQSMQSLQVQPEILSQGQVLVQNALVSEEELPAAEALVQLPFQTLPPPQTVAVNLQVQPPAPVDPPVVYQVEDVCEEEMPEESDECVRMDRTPPPPTLSPAAITVGRGEDLTSEHPLLEQVELPAVASVSASVIKSPSDPSHVSVPPPPLLLPAATTRSNSTSMHSSIPSIENKPPQAIVKPQILTHVIEGFVIQEGLEPFPVSRSSLLIEQPVKKRPLLDNQVINSVCVQPELQNNTKHADNSSDTEMEDMIAEETLEEMDSELLKCEFCGKMGYANEFLRSKRFCTMSCAKRYNVSCSKKFALSRWNRKPDNQSLGHRGRRPSGPDGAAREHILRQKKTWLLMKILCHLL

SEQ ID NO: 40552 - protein, 1200 aa, Homo sapiens [sequence omitted]

SEQ ID NO: 40553 - protein, 205 aa, Homo sapiens
MVPFVFVGTKESIGNVQVLLEYHIAYLKEVEQLRMERLQIDEQLRQIGSRSYSGRGRGRRGPNYTSGYGTNSELSNPSETESERKDELSDWSLAGEDDRDSRHQRDSRRRPGGRGRSVSGGRGRGGPRGGKSSISSVLKDPDSNPYSLLDNTESDQTADTDASESHHSTNRRRRSRRRRTDEDAVLMDGMTESDTASVNENGLGM

SEQ ID NO: 40554 - protein, 26 aa, Homo sapiens
MAGILFEDIFDVKDIDPEGKKFDRGK

SEQ ID NO: 40555 - protein, 86 aa, Homo sapiens
MDGFYDQQVPFMVPGKSRSEECRGRPVIDRKRKFLDTDLAHDSEELFQDLSQLQEAWLAEAQVPDDEQFVPDFQSDNRKMSCFPLS

SEQ ID NO: 40556 - protein, 44 aa, Homo sapiens [sequence omitted]

SEQ ID NO: 40557 - protein, 489 aa, Homo sapiens
MAAPTANKAASLGCNNKPAFPELDFRSGARVEELNKLIQEFTKHDQREYDDQRALEIHTAKDFIFSMLGMVQKLDQKLPVANEYLLLSGGVREGVVDLDLDELNVYARGTDYDMDFTLLVPALKLHDRNQPVTLDMRHSALCHSWLSLRLFDEGTISKWKDCCTIVDHINGATNYFFSPTKVADWFYDSISIVLSEIQKKPQRGMPKVEKVEKNGTIISIILGVGSSRMLYDIVPVVSFKGWPAVAQSWLMENHFWDGKITEEEVISGFYLVPACSYKGKKDNEWRLSFARSEVQLKKCISSSLMQAYQACKAIIIKLLSRPKAISPYHLRSMMLWACDRLPANYLAQEDYAAHFLLGLIDDLQHCLVNKMCPNYFIPQCNMLEHLSEETVMLHARKLSSVRSDPAEHLRTAIEHVKAANRLTLELQRRGSTTSIPSPQSDGGDPNQPDDRLAKKLQQLVTENPGKSISVFINPDDVTRPHFRIDDKFF

SEQ ID NO: 40558 - protein, 1155 aa, Homo sapiens
MSNKLSNGHAVCLIENPTEENRHRISKYSQTESQQIRYFTHHSVKYFWNDTIHNFDFLKGLDEGVSCTSIYEKHSAGLTKGMHAYRKLLYGVNEIAVKVPSVFKLLIKEVLNPFYIFQLFSVILWSTDEYYYYALAIVVMSIVSIVSSLYSIRKQYVMLHDMVATHSTVRVSVCRVNEEIEEIFSTDLVPGDVMVIPLNGTIMPCDAVLINGTCIVNESMLTGESVPVTKTNLPNPSVDVKGIGDELYNPETHKRHTLFCGTTVIQTRFYTGELVKAIVVRTGFSTSKGQLVRSILYPKPTDFKLYRDAYLFLLCLVAVAGIGFIYTIINSILNEVQVGVIIIESLDIITITVPPALPAAMTAGIVYAQRRLKKIGIFCISPQRINICGQLNLVCFDKTGTLTEDGLDLWGIQRVENARFLSPEENVCNEMLVKSQFVACMATCHSLTKIEGVLSGDPLDLKMFEAIGWILEEATEEETALHNRIMPTVVRPPKQLLPESTPAGNQEMELFELPATYEIGIVRQFPFSSALQRMSVVARVLGDRKMDAYMKGAPEAIAGLCKPETVPVDFQNVLEDFTKQGFRVIALAHRKLESKLTWHKVQNISRDAIENNMDFMGLIIMQNKLKQETPAVLEDLHKANIRTVMVTGDSMLTAVSVARDCGMILPQDKVIIAEALPPKDGKVAKINWHYADSLTQCSHPSAIDPEAIPVKLVHDSLEDLQMTRYHFAMNGKSFSVILEHFQDLVPKLMLHGTVFARMAPDQKTQLIEALQNVDYFVGMCGDGANDCGALKRAHGGISLSELEASVASPFTSKTPSISCVPNLIREGRAALITSFCVFKFMALYSIIQYFSVTLLYSILSNLGDFQFLFIDLAIILVVVFTMSLNPAWKELVAQRPPSGLISGALLFSVLSQIIICIGFQSLGFFWVKQQPWYEVWHPKSDACNTTGSGFWNSSHVDNETELDEHNIQNYENTTVFFISSFQYLIVAIAFSKGKPFRQPCYKNYFFVFSVIFLYIFILFIMLYPVASVDQVLQIVCVPYQWRVTMLIIVLVNAFVSITVENFFLDMVLWKVVFNRDKQGEYRFSTTQPPQESVDRWGKCCLPWALGCRKKTPKAKYMYLAQELLVDPEWPPKPQTTTEAKALVKENGSCQIITIT

SEQ ID NO: 40559 - protein, 372 aa, Homo sapiens
MFILFPVCGSKFKSNSDREARERKRRRQLRASVFALALPLSLGPCWALWVAVPKASATIRGPQRRLLASLLQENTEILGYLLGSVAAFGSWASRIPPLSRIAPPPTLGITTQHEIWRGQMSKPSQSPSRSPSGHWRAAAQRQVLGTEMCRGKTFPSIHLWTRLLSALAGLLYASAIVAHDQHPEYLLRATPWFLTSLGRAALDLAIIFLSCVMKSKMRQALGFAKEARESPDTQALLTCAEKEEENQENLDWVPLTTLSHCKSLRTMTAISRYMELTIEPVQQAGCSATRLPGDGQTSAGDASLQDPPSYPPVQVIRARVSSGSSSEVSSINSDLEWDPEDVNLEGSKENVELLGSQVHQDSVRTAHLSDDD

SEQ ID NO: 40560 - protein, 759 aa, Homo sapiens [sequence omitted]

SEQ ID NO: 40561 - protein, 37 aa, Homo sapiens
MELLPLWLCLGFHFLTVGWRNRSGTATAASQGVCKLA

SEQ ID NO: 40562 - protein, 217 aa, Homo sapiens
MCSEIILRQEVLKDGFHRDLLIKVKFGESIEDLHTCRLLIKQDIPAGLYVDPYELASLRERNITEAVMVSENFDIEAPNYLSKESEVLIYARRDSQCIDCFQAFLPVHCRYHRPHSEDGEASIVVNNPDLLMFCDQEFPILKCWAHSEVAAPCALENEDICQWNKMKYKSVYKNVILQVPVGLTVHTSLVCSVTLLITILCSTLILVAVFKYGHFSL

SEQ ID NO: 40563 - protein, 588 aa, Homo sapiens
MKFNGESQSPGESGTIVVTLNNHKRKGFCYGCCQGPEHHRNGGPLIPKKFQLNQHRRIKLSPLMMYEKLSMIRFRYRILRSQHFRTKSKVCKLRKAQRSWVQKVTGDHQETRRENGEGGSCSPFPSPEPKDPSCRHQPYFPDMDSSAVVKGTNSHVPDCHTKGSSFLGKELSLDEAFPDQQNGSATNAWDQSSCSSPKWECTELIHDIPLPEHRSNTMFISETEREIMTLGQENQTSSVSDDRVKLSVSGADTSVSSVDGPVSQKAVQNENSYQMEEDGSLKQSILSSELLDHPYCKSPLEAPLVCSGLKLENQVGGGKNSQKASPVDDEQLSVCLSGFLDEVMKKYGSLVPLSEKEVLGRLKDVFNEDFSNRKPFINREITNYRARHQKCNFRIFYNKHMLDMDDLATLDGQNWLNDQVINMYGELIMDAVPDKVHFFNSFFHRQLVTKGYNGVKRWTKKVDLFKKSLLLIPIHLEVHWSLITVTLSNRIISFYDSQGIHFKFCVENIRKYLLTEAREKNRPEFLQGWQTAVTKCIPQQKNDSDCGVFVLQYCKCLALEQPFQFSQEDMPRVRKRIYKELCECRLMD

SEQ ID NO: 40564 - protein, 912 aa, Homo sapiens
MQSILYHGLIRDQACRRQTDYWQFVKDIRWLSPHSALHVEKFISVHENDQSSADGASERAVAELWLQHSLQYHCLSAQLRPLLGDRQYIRKFYTDAAFLLSDAHVTAMLQCLEAVEQNNPRLLAQIDASMFARKHESPLLVTKSQSLTALPSSTYTPPNSYAQHSYFGSFSSLHQSVPNNGSERRSTSFPLSGPPRKPQESRGHVSPAEDQTIQAPPVSVSALARDSPLTPNEMSSSTLTSPIEASWVSSQNDSPGDASEGPEYLAIGNLDPRGRTASCQSHSSNAESSSSNLFSSSSSQKPDSAASSLGDQEGGGESQLSSVLRRSSFSEGQTLTVTSGAKKSHIRSHSDTSIASRGAPESCNDKAKLRGPLPYSGQSSEVSTPSSLYMEYEGGRYLCSGEGMFRRPSEGQSLISYLSEQDFGSCADLEKENAHFSISESLIAAIELMKCNMMSQCLEEEEVEEEDSDREIQELKQKIRLRRQQIRTKNLLPMYQEAEHGSFRVTSSSSQFSSRDSAQLSDSGSADEVDEFEIQDADIRRNTASSSKSFVSSQSFSHCFLHSTSAEAVAMGLLKQFEGMQLPAASELEWLVPEHDAPQKLLPIPDSLPISPDDGQHADIYKLRIRVRGNLEWAPPRPQIIFNVHPAPTRKIAVAKQNYRCAGCGIRTDPDYIKRLRYCEYLGKYFCQCCHENAQMAIPSRVLRKWDFSKYYVSNFSKDLLIKIWNDPLFNVQDINSALYRKVKLLNQVRLLRVQLCHMKNMFKTCRLAKELLDSFDTVPGHLTEDLHLYSLNDLTATRKGELGPRLAELTRAGATHVERCMLCQAKGFICEFCQNEDDIIFPFELHKCRTCEECKACYHKACFKSGSCPRCERLQARREALARQSLESYLSDYEEEPAEALALEAAVLEAT

SEQ ID NO: 40565 - protein, 628 aa, Homo sapiens
MSSSTLTSPIEASWVSSQNDSPGDASEGPEYLAIGNLDPRGRTASCQSHSSNAESSSSNLFSSSSSQKPDSAASSLGDQEGGGESQLSSVLRRSSFSEGQTLTVTSGAKKSHIRSHSDTSIASRGAPESCNDKAKLRGPLPYSGQSSEVSTPSSLYMEYEGGRYLCSGEGMFRRPSEGQSLISYLSEQDFGSCADLEKENAHFSISESLIAAIELMKCNMMSQCLEEEEVEEEDSDREIQELKQKIRLRRQQIRTKNLLPMYQEAEHGSFRVTSSSSQFSSRDSAQLSDSGSADEVDEFEIQDGSEGSNLTHISKNGLSVSLASMFSDADIRRNTASSSKSFVSSQSFSHCFLHSTSAEAVAMGLLKQFEGMQLPAASELEWLVPEHDAPQKLLPIPDSLPISPDDGQHADIYKLRIRVRGNLEWAPPRPQIIFNVHPAPTRKIAVAKQNYRCAGCGIRTDPDYIKRLRYCEYLGKYFCQCCHENAQMAIPSRVLRKWDFSKYYVSNFSKDLLIKIWNDPLFNVQDINSALYRKVKLLNQVRLLRVQLCHMKNMFKTCRLAKELLDSFDTVPGHLTEDLHLYSLNDLTATRKGELGPRLAELTRAGATHVERCMVRKSHCSMQLSPCF

SEQ ID NO: 40566 - protein, 381 aa, Homo sapiens
MAVRGRLLTALVLPDLLHAKLPPDSCPLLVFVNPKSGGLKGRDLLCSFRKLLNPHQVFDLTNGGPLPGLHLFSQVPCFRVLVCGGDGTVGWVLGALEETRYRLACPEPSVAILPLGTGNDLGRVLRWGAGYSGEDPFSVLLSVDEADAVLMDRWTILLDAHEAGSAENDTADAEPPKIVQMSNYCGIGIDAELSLDFHQAREEEPGKFTSRLHNKGVYVRVGLQKISHSRSLHKQIRLQVERQEVELPSIEGLIFINIPSWGSGADLWGSDSDTRFEKPRMDDGLLEVVGVTGVVHMGQVQGGLRSGIRIAQGSYFRVTLLKATPVQVDGEPWVQAPGHMIISAAGPKVHMLRKAKQKPRRAGTTRDARADAAPAPESDPR

SEQ ID NO: 40567 - protein, 586 aa, Homo sapiens
MQKFNGHDALPFIPADKLKDLTSRVFNGEPGAHDAKLRFESQEMKGIGTPPNTTPIKNGSPEIKLKITKTYMNGKPLFESSICGDSAADVSQSEENGQKPENKARRNRKRSIKYDSLLEQGLVEAALVSKISSPSDKKIPAKKESCPNTGRDKDHLLKYNVGDLVWSKVSGYPWWPCMVSADPLLHSYTKLKGQKKSARQYHVQFFGDAPERAWIFEKSLVAFEGEGQFEKLCQESAKQAPTKAEKIKLLKPISGKLRAQWEMGIVQAEEAASMSVEERKAKFTFLYVGDQLHLNPQVAKEAGIAAESLGEMAESSGVSEEAAENPKSVREECIPMKRRRRAKLCSSAETLESHPDIGKSTPQKTAEADPRRGVGSPPGRKKTTVSMPRSRKGDAASQFLVFCQKHRDEVVAEHPDASGEEIEELLRSQWSLLSEKQRARYNTKFALVAPVQAEEDSGNVNGKKRNHTKRIQDPTEDAEAEDTPRKRLRTDKHSLRKRDTITDKTARTSSYKAMEAASSLKSQAATKNLSDACKPLKKRNRASTAASSALGFSKSSSPSASLTENELLWEPTPVKLDLNPAALYCT

SEQ ID NO: 40568 - protein, 1304 aa, Homo sapiens
MQKFNGHDALPFIPADKLKDLTSRVFNGEPGAHDAKLRFESQEMKGIGTPPNTTPIKNGSPEIKLKITKTYMNGKPLFESSICGDSAADVSQSEENGQKPENKARRNRKRSIKYDSLLEQGLVEAALVSKISSPSDKKIPAKKESCPNTGRDKDHLLKYNVGDLVWSKVSGYPWWPCMVSADPLLHSYTKLKGQKKSARQYHVQFFGDAPERAWIFEKSLVAFEGEGQFEKLCQESAKQAPTKAEKIKLLKPISGKLRAQWEMGIVQAEEAASMSVEERKAKFTFLYVGDQLHLNPQVAKEAGIAAESLGEMAESSGVSEEAAENPKSVREECIPMKRRRRAKLCSSAETLESHPDIGKSTPQKTAEADPRRGVGSPPGRKKTTVSMPRSRKGDAASQFLVFCQKHRDEVVAEHPDASGEEIEELLRSQWSLLSEKQRARYNTKFALVAPVQAEEDSGNVNGKKRNHTKRIQDPTEDAEAEDTPRKRLRTDKHSLRKRDTITDKTARTSSYKAMEAASSLKSQAATKNLSDACKPLKKRNRASTAASSALGFSKSSSPSASLTENEVSDSPGDEPSESPYESADETQTEVSVSSKKSERGVTAKKEYVCQLCEKPGSLLLCEGPCCGAFHLACLGLSRRPEGRFTCSECASGIHSCFVCKESKTDVKRCVVTQCGKFYHEACVKKYPLTVFESRGFRCPLHSCVSCHASNPSNPRPSKGKMMRCVRCPVAYHSGDACLAAGCSVIASNSIICTAHFTARKGKRHHAHVNVSWCFVCSKGGSLLCCESCPAAFHPDCLNIEMPDGSWFCNDCRAGKKLHFQDIIWVKLGNYRWWPAEVCHPKNVPPNIQKMKHEIGEFPVFFFGSKDYYWTHQARVFPYMEGDRGSRYQGVRGIGRVFKNALQEAEARFREIKLQREARETQESERKPPPYKHIKVNKPYGKVQIYTADISEIPKCNCKPTDENPCGFDSECLNRMLMFECHPQVCPAGEFCQNQCFTKRQYPETKIIKTDGKGWGLVAKRDIRKGEFVNEYVGELIDEEECMARIKHAHENDITHFYMLTIDKDRIIDAGPKGNYSRFMNHSCQPNCETLKWTVNGDTRVGLFAVCDIPAGTELTFNYNLDCLGNEKTVCRCGASNCSGFLGDRPKTSTTLSSEEKGKKTKKKTRRRRAKGEGKRQSEDECFRCGDGGQLVLCDRKFCTKAYHLSCLGLGKRPFGKWECPWHHCDVCGKPSTSFCHLCPNSFCKEHQDGTAFSCTPDGRSYCCEHDLGAASVRSTKTEKPPPEPGKPKGKRRRRRGWRRVTEGK

SEQ ID NO: 40569 - protein, 3135 aa, Homo sapiens
MKAFESLKSFQQQQQQQQQQQQQQQQQQQQQPPPPPPPPPPPQLPQPPPQAQPLLPQPQPPPPPPPPPPGPAVAEEPLHRPKKELSATKKDRVNHCLTICENIVAQSVRNSPEFQKLLGIAMELFLLCSDDAESDVRMVADECLNKVIKALMDSNLPRLQLELYKEIKKNGAPRSLRAALWRFAELAHLVRPQKCRPYLVNLLPCLTRTSKRPEESVQETLAAAVPKIMASFGNFANDNEIKVLLKAFIANLKSSSPTIRRTAAGSAVSICQHSRRTQYFYSWLLNVLLGLLVPVEDEHSTLLILGVLLTLRYLVPLLQQQVKDTSLKGSFGVTRKEMEVSPSAEQLVQVYELTLHHTQHQDHNVVTGALELLQQLFRTPPPELLQTLTAVGGIGQLTAAKEESGGRSRSGSIVELIAGGGSSCSPVLSRKQKGKVLLGEEEALEDDSESRSDVSSSALTASVKDEISGELAASSGVSTPGSAGHDIITEQPRSQHTLQADSVDLASCDLTSSATDGDEEDILSHSSSQVSAVPSDPAMDLNDGTQASSPISDSSQTTTEGPDSAVTPSDSSEIVLDGTDNQYLGLQIGQPQDEDEEATGILPDEASEAFRNSSMALQQAHLLKNMSHCRQPSDSSVDKFVLRDEATEPGDQENKPCRIKGDIGQSTDDDSAPLVHCVRLLSASFLLTGGKNVLVPDRDVRVSVKALALSCVGAAVALHPESFFSKLYKVPLDTTEYPEEQYVSDILNYIDHGDPQVRGATAILCGTLICSILSRSRFHVGDWMGTIRTLTGNTFSLADCIPLLRKTLKDESSVTCKLACTAVRNCVMSLCSSSYSELGLQLIIDVLTLRNSSYWLVRTELLETLAEIDFRLVSFLEAKAENLHRGAHHYTGLLKLQERVLNNVVIHLLGDEDPRVRHVAAASLIRLVPKLFYKCDQGQADPVVAVARDQSSVYLKLLMHETQPPSHFSVSTITRIYRGYNLLPSITDVTMENNLSRVIAAVSHELITSTTRALTFGCCEALCLLSTAFPVCIWSLGWHCGVPPLSASDESRKSCTVGMATMILTLLSSAWFPLDLSAHQDALILAGNLLAASAPKSLRSSWASEEEANPAATKQEEVWPALGDRALVPMVEQLFSHLLKVINICAHVLDDVAPGPAIKAALPSLTNPPSLSPIRRKGKEKEPGEQASVPLSPKKGSEASAASRQSDTSGPVTTSKSSSLGSFYHLPSYLKLHDVLKATHANYKVTLDLQNSTEKFGGFLRSALDVLSQILELATLQDIGKCVEEILGYLKSCFSREPMMATVCVQQLLKTLFGTNLASQFDGLSSNPSKSQGRAQRLGSSSVRPGLYHYCFMAPYTHFTQALADASLRNMVQAEQENDTSGWFDVLQKVSTQLKTNLTSVTKNRADKNAIHNHIRLFEPLVIKALKQYTTTTCVQLQKQVLDLLAQLVQLRVNYCLLDSDQVFIGFVLKQFEYIEVGQFRESEAIIPNIFFFLVLLSYERYHSKQIIGIPKIIQLCDGIMASGRKAVTHAIPALQPIVHDLFVLRGTNKADAGKELETQKEVVVSMLLRLIQYHQVLEMFILVLQQCHKENEDKWKRLSRQIADIILPMLAKQQMHIDSHEALGVLNTLFEILAPSSLRPVDMLLRSMFVTPNTMASVSTVQLWISGILAILRVLISQSTEDIVLSRIQELSFSPYLISCTVINRLRDGDSTSTLEEHSEGKQIKNLPEETFSRFLLQLVGILLEDIVTKQLKVEMSEQQHTFYCQELGTLLMCLIHIFKSGMFRRITAAATRLFRSDGCGGSFYTLDSLNLRARSMITTHPALVLLWCQILLLVNHTDYRWWAEVQQTPKRHSLSSTKLLSPQMSGEEEDSDLAAKLGMCNREIVRRGALILFCDYVCQNLHDSEHLTWLIVNHIQDLISLSHEPPVQDFISAVHRNSAASGLFIQAIQSRCENLSTPTMLKKTLQCLEGIHLSQSGAVLTLYVDRLLCTPFRVLARMVDILACRRVEMLLAANLQSSMAQLPMEELNRIQEYLQSSGLAQRHQRLYSLLDRFRLSTMQDSLSPSPPVSSHPLDGDGHVSLETVSPDKDWYVHLVKSQCWTRSDSALLEGAELVNRIPAEDMNAFMMNSEFNLSLLAPCLSLGMSEISGGQKSALFEAAREVTLARVSGTVQQLPAVHHVFQPELPAEPAAYWSKLNDLFGDAALYQSLPTLARALAQYLVVVSKLPSHLHLPPEKEKDIVKFVVATLEALSWHLIHEQIPLSLDLQAGLDCCCLALQLPGLWSVVSSTEFVTHACSLIYCVHFILEAVAVQPGEQLLSPERRTNTPKAISEEEEEVDPNTQNPKYITAACEMVAEMVESLQSVLALGHKRNSGVPAFLTPLLRNIIISLARLPLVNSYTRVPPLVWKLGWSPKPGGDFGTAFPEIPVEFLQEKEVFKEFIYRINTLGWTSRTQFEETWATLLGVLVTQPLVMEQEESPPEEDTERTQINVLAVQAITSLVLSAMTVPVAGNPAVSCLEQQPRNKPLKALDTRFGRKLSIIRGIVEQEIQAMVSKRENIATHHLYQAWDPVPSLSPATTGALISHEKLLLQINPERELGSMSYKLGQVSIHSVWLGNSITPLREEEWDEEEEEEADAPAPSSPPTSPVNSRKHRAGVDIHSCSQFLLELYSRWILPSSSARRTPAILISEVVRSLLVVSDLFTERNQFELMYVTLTELRRVHPSEDEILAQYLVPATCKAAAVLGMDKAVAEPVSRLLESTLRSSHLPSRVGALHGVLYVLECDLLDDTAKQLIPVISDYLLSNLKGIAHCVNIHSQQHVLVMCATAFYLIENYPLDVGPEFSASIIQMCGVMLSGSEESTPSIIYHCALRGLERLLLSEQLSRLDAESLVKLSVDRVNVHSPHRAMAALGLMLTCMYTGKEKVSPGRTSDPNPAAPDSESVIVAMERVSVLFDRIRKGFPCEARVVARILPQFLDDFFPPQDIMNKVIGEFLSNQQPYPQFMATVVYKVFQTLHSTGQSSMVRDWVMLSLSNFTQRAPVAMATWSLSCFFVSASTSPWVAAILPHVISRMGKLEQVDVNLFCLVATDFYRHQIEEELDRRAFQSVLEVVAAPGSPYHRLLTCLRNVHKVTTC

SEQ ID NO: 40570 - protein, 153 aa, Homo sapiens
MAVDITLLFRASVKTVKTRNKALGVAVGGGVDGSRDELFRRSPRPKGDFSSRAREVISHIGKLRDFLLEHRKDYINAYSHTMSEYGRMTDTERDQIDQDAQIFMRTCSEAIQQLRTEAHKEIHSQQVKEHRTAVLDFIEDYLKSISFSFKGQM

SEQ ID NO: 40571 - protein, 918 aa, Homo sapiens
MDVGWVYTVQESMRAYAANVYTSVVEELARGQQRRFIAVEQEFFRLWWDGVASDQQKYQVRQLLEEGRLEFVIGGQVMHDEAVTHLDDQILQLTEGHGFLYETFGIRPQFSWHVDPFGASATTPTLFALAGFNAHLGSRIDYDLKAAMQEARGLQFVWRGSPSLSERQEIFTHIMDQYSYCTPSHIPFSNRSGFYWNGVAVFPKPPQDGVYPNMSEPVTPANINLYAEALVANVKQRAAWFRTPHVLWPWGCDKQFFNASVQFANMDPLLDHINSHAAELGVSVQYATLGDYFRALHALNVTWRVRDHHDFLPYSTEPFQAWTGFYTSRSSLKGLARRASALLYAGESMFTRYLWPAPRGHLDPTWALQQLQQLRWAVSEVQHHDAITGTESPKVRDMYATHLASGMLGMRKLMASIVLDELQPQAPMAASSDAGPAGHFASVYNPLAWTVTTIVTLTVGFPGVRVTDEAGHPVPSQIQNSTETPSAYDLLILTTIPGLSYRHYNIRPTAGAQEGTQEPAATVASTLQFGRRLRRRTSHAGRYLVPVANDCYIVLLDQDTNLMHSIWERQSNRTVRVTQEFLEYHVNGDVKQGPISDNYLFTPGKAAVPAWEAVEMEIVAGQLVTEIRQYFYRNMTAQNYTYAIRSRLTHVPQGHDGELLCHRIEQEYQAGPLELNREAVLRTSTNLNSQQVIYSDNNGYQMQRRPYVSYVNNSIARNYYPMVQSAFMEDGKSRLVLLSERAHGISSQGNGQVEVMLHRRLWNNFDWDLGYNLTLNDTSVVHPVLWLLLGSWSLTTALRQRSALALQHRPVVLFGDLAGTAPKLPGPQQQEAVTLPPNLHLQILSIPGWRYSSNHTEHSQNLRKGHRGEAQADLRRVLLRLYHLYEVGEDPVLSQPVTVNLEVNFPTPIQTISQGSKP

SEQ ID NO: 40572 - protein, 678 aa, Homo sapiens
MGILDGRPGNPLQNLQHVNLKAPRLLSAPEYGPKLKLRALEDRHSLQSVDSGIPTLEIGNPEPVPCSAVHVRRKQSDSDLIPERAFQSACALPSCAPPAPSSTEREQSVRKSSTFPRTGYDSVKLYSPTSKALTRSDDVSVCSVSSLGTELSTTLSVSNEDILDLVVTSSSSAIVTLENDDDPQFTNVTLSSIKETRGLHQQDCVHEAEEGSKLKILGPFSNFFARNLLARKQSARLDKHNDLGWKLFGKAPLRENAQKDSKRIQKEYEDKAGRPSKPPSPKQNVRKNLDFEPLSTTALILEDRPANLPAKPAEEAQKHRQQYEEMVVQAKKRELKEAQRRKKQLEERCRVEESIGNAVLTWNNEILPNWETMWCSRKVRDLWWQGIPPSVRGKVWSLAIGNELNITHELFDICLARAKERWRSLSTGGSEVENEDAGFSAADREASLELIKLDISRTFPNLCIFQQGGPYHDMLHSILGAYTCYRPDVGYVQGMSFIAAVLILNLDTADAFIAFSNLLNKPCQMAFFRVDHGLMLTYFAAFEVFFEENLPKLFAHFKKNNLTPDIYLIDWIFTLYSKSLPLDLACRIWDVFCRDGEEFLFRTALGILKLFEDILTKMDFIHMAQFLTRLPEDLPAEELFASIATIQMQSRNKKWAQVLTALQKDSREMEKGSPSLRH

SEQ ID NO: 40573 - protein, 185 aa, Homo sapiens
MQTDESNKETANLQERSISNDDGEEKIVTSVRRRGRKPKRSLTVSDDAESSEPERKRQKSVSDPVEDKKEQESDEEEEEEEEDEPSGATTRSTTRSEAQRKQHSKPSARATSKLGSPDTVSPRNRQKLAKEKLPTSEKVSNSPPLGRSKTQLSPSIKRKREVSPPGARTRGQQRVEEAPVKKAKR

SEQ ID NO: 40574 - protein, 670 aa, Homo sapiens
MAPFPEEVDVFTAPHWRMKQLVGLYCDKLSKTNFSNNNDFRALLQSLYATFKEFKMHEQIENEYIIGLLQQRSQTIYNVHSDNKLSEMLSLFEKGLKNVKNEYEQLNYAKQLKERLEAFTRDFLPHMKEEEEVFQPMLMEYFTYEELKDIKKKVIAQHCSQKDTAELLRGLSLWNHAEERQKFFKYSVDEKSDKEAEVSEHSTGITHLPPEVMLSIFSYLNPQELCRCSQVSMKWSQLTKTGSLWKHLYPVHWARGDWYSGPATELDTEPDDEWVKNRKDESRAFHEWDEDADIDESEESAEESIAISIAQMEKRLLHGLIHNVLPYVGTSVKTLVLAYSSAVSSKMVRQILELCPNLEHLDLTQTDISDSAFDSWSWLGCCQSLRHLDLSGCEKITDVALEKISRALGILTSHQSGFLKTSTSKITSTAWKNKDITMQSTKQYACLHDLTNKGIGEEIDNEHPWTKPVSSENFTSPYVWMLDAEDLADIEDTVEWRHRNVESLCVMETASNFSCSTSGCFSKDIVGLRTSVCWQQHCASPAFAYCGHSFCCTGTALRTMSSLPESSAMCRKAARTRLPRGKDLIYFGSEKSDQETGRVLLFLSLSGCYQITDHGLRVLTLGGGLPYLEHLNLSGCLTITGAGLQDLVSACPSLNDEYFYYCDNINGNAF

SEQ ID NO: 40575 - protein, 595 aa, Homo sapiens
MAAAAAAAAAAAAAAQCRSPRCAAERRGFRRELDSWRHRLMHCVGFESILEGLYGPRLRRDLSLFEDCEPEELTDWSMDEKCSFCNLQREAVSDCIPSLDSSQSTPTEELSSQGQSNTDKIECQAENYLNALFRKKDLPQNCDPNIPLVAQELMKKMIRQFAIEYISKSGKTQENRNGSIGPSIVCKSIQMNQAENSLQEEQEGPLDLTVNRMQEQNTQQGDGVLDLSTKKTSIKSEESSICDPSSENSVAGRLHRNREDYVERSAEFADGLLSKALKDIQSGALDINKAGILYGIPQKTLLLHLEALPAGKPASFKNKTRDFHDSYSYKDSKETCAVLQKVALWARAQAERTEKSKLNLLETSEIKFPTASTYLHQLTLQKMVTQFKEKNESLQYETSNPTVQLKIPQLRVSSVSKSQPDGSGLLDVMYQVSKTSSVLEGSALQKLKNILPKQNKIECSGPVTHSSVDSYFLHGDLSPLCLNSKNGTVDGTSENTEDGLDRKDSKQPRKKRGRYRQYDHEIMEEAIAMVMSGKMSVSKAQGIYGVPHSTLEYKVKERSGTLKTPPKKKLRLPDTGLYNMTDSGTGSCKNSSKPV

SEQ ID NO: 40576 - protein, 1103 aa, Homo sapiens [sequence omitted]

SEQ ID NO: 40577 - protein, 25 aa, Homo sapiens
MDSPPAQAVPRMPPSTCASRPGPGL

SEQ ID NO: 40578 - protein, 348 aa, Homo sapiens
MGLEVIPVTSTTNKITVQQGRTGNSEKETALPSTKAEFTSPPSLFKTGLPPSRRLPGAIDVIGQTITISRVEGRRRANENSNIQVLSERSATEVDNNFSKPPPFFPPGAPPTHLPPPPFLPPPPTVSTAPPLIPPPGIPITVPPPGFPPPPGAPPPSLIPTIESGHSSGYDSRSARAFPYGNVAFPHLPGSAPSWPSLVDTSKQWDYYARREKDRDRERDRDRERDRDRDRERERTRERERERDHSPTPSVFNSDEERYRYREYAERGYERHRASREKEERHRERRHREKEETRHKSSRSNSRRRHESEEGDSHRRHKHKKSKRSKEGKEAGSEPAPEQESTEATPAE

SEQ ID NO: 40579 - protein, 134 aa, Homo sapiens
MNLQGRHKCIENVSRQNCPICLEDIHTSRVVAHVLPCGHLLHRTCYEEMLKEGYRCPLCMHSALDMTRYWRQLDDEVAQTPMPSEYQNMTVDILCNDCNGRSTVQFHILGMKCKICESYNTAQAGGRRISLDQQ

SEQ ID NO: 40580 - protein, 1056 aa, Homo sapiens
MVAENRRRKTAGVLPVEVQPLLLSDSPECLVLGGGDTNPDLLRHMPTDRGVGDQPNDSEVDMFGDYDSFTENSFIAQVDDLEQKYMQLPEHKKHATDFATENLCSESIKNKLSITTIGNLTELQTDKHTENQSGYEGVTIEPGADLLYDVPSSQAIYFENLQNSSNDLGDHSMKERDWKSSSHNTVNEELPHNCIEQPQQNDESSSKVRTSSDMNRRKSIKDHLKNAMTGNAKAQTPIFSRSKQLKDTLLSEEINVAKKTVESSSNDLGPFYSLPSKVRDLYAQFKGIEKLYEWQHTCLTLNSVQERKNLIYSLPTSGGKTLVAEILMLQELLCCRKDVLMILPYVAIVQEKISGLSSFGIELGFFVEEYAGSKGRFPPTKRREKKSLYIATIEKGHSLVNSLIETGRIDSLGLVVVDELHMIGEGSRGATLEMTLAKILYTSKTTQIIGMSATLNNVEDLQKFLQAEYYTSQFRPVELKEYLKINDTIYEVDSKAENGMTFSRLLNYKYSDTLKKMDPDHLVALVTEVIPNYSCLVFCPSKKNCENVAEMICKFLSKEYLKHKEKEKCEVIKNLKNIGNGNLCPVLKRTIPFGVAYHHSGLTSDERKLLEEAYSTGVLCLFTCTSTLAAGVNLPARRVILRAPYVAKEFLKRNQYKQMIGRAGRAGIDTIGESILILQEKDKQQVLELITKPLENCYSHLVQEFTKGIQTLFLSLIGLKIATNLDDIYHFMNGTFFGVQQKVLLKEKSLWEITVESLRYLTEKGLLQKDTIYKSEEEVQYNFHITKLGRASFKGTIDLAYCDILYRDLKKGLEGLVLESLLHLIYLTTPYDLVSQCNPDWMIYFRQFSQLSPAEQNVAAILGVSESFIGKKASGQAIGKKVDKNVVNRLYLSFVLYTLLKETNIWTVSEKFNMPRGYIQNLLTGTASFSSCVLHFCEELEEFWVYRALLVELTKKLTYCVKAELIPLMEVTGVLEGRAKQLYSAGYKSLMHLANANPEVLVRTIDHLSRRQAKQIVSSAKMLLHEKAEALQEEVEELLRLPSDFPGAVASSTDKA

SEQ ID NO: 40581 - protein, 1152 aa, Homo sapiens [sequence omitted]

SEQ ID NO: 40582 - protein, 295 aa, Homo sapiens [sequence omitted]

SEQ ID NO: 40583 - protein, 321 aa, Homo sapiens
MKGPLHLEHRAAGTKLSAVSSSSCHHPQPLAMASVLAPGQPRSLDSSKHRLEVHTISDTSSPEAAEKDKSQQGKNEDVGAEDPSKKKRQRRQRTHFTSQQLQELEATFQRNRYPDMSTREEIAVWTNLTEARVRVWFKNRRAKWRKRERNQQAELCKNGFGPQFNGLMQPYDDMYPGYSYNNWAAKGLTSASLSTKSFPFFNSMNVNPLSSQSMFSPPNSISSMSMSSSMVPSAVTGVPGSSLNSLNNLNNLSSPSLNSAVPTPACPYAPPTPPYVYRDTCNSSLASLRLKAKQHSSFGYASVQNPASNLSACQYAVDRPV

SEQ ID NO: 40584 - protein, 385 aa, Homo sapiens
MSFIMKLHRHFQRTVILLATFCMVSIIISAYYLYSGYKQENELSETASEVDCGDLQHLPYQLMEVKAMKLFDASRTDPTVLVFVESQYSSLGQDIIMILESSRFQYHIEIAPGKGDLPVLIDKMKGKYILIIYENILKYINMDSWNRSLLDKYCVEYGVGVIGFHKTSEKSVQSFQLKGFPFSIYGNLAVKDCCINPHSPLIRVTKSSKLEKGSLPGTDWTVFQINHSAYQPVIFAKVKTPENLSPSISKGAFYATIIHDLGLHDGIQRVLFGNNLNFWLHKLIFIDAISFLSGKRLTLSLDRYILVDIDDIFVGKEGTRMNTNDVKVRLYFLKFQSSVHLPAGIQLSQFVLQLGYPGHGIYWESLGNLGLSLTLNQLRRLCISI

SEQ ID NO: 40585 - protein, 358 aa, Homo sapiens
MARPMIKEARMASLLLENPYYILLLFTEEEMKLVHRYKEMFNVAGNKCRARRSSLKNVSDLFVMGGALVLESAALLHWLEREGYGPLGMTGISMGGHMASLAVSNWPKPMPLIPCLSWSTASGVFTTGVLSKSINWRELEKQYYTQTVYEEEIIHMLEYCGTDSFKMGQEFVKHFTSSADKLTNLNLVSRTLNLDISNQVVSQKPADCHNSSKTSVSATSEGLLLQDTSKMKRFNQTLSTNKSGYTSRNPQSYHLLSKEQSRNSLRKESLIFMKGVMDECTHVANFSVPVDPSLIIVVQAKEDAYIPRTGVRSLQEIWPGCEIRYLEGGHISAYLFKQGLFRQAIYDAFDRFLHKYAN

SEQ ID NO: 40586 - protein, 1109 aa, Homo sapiens
MPAAHSREDPPAVTAERESLLAAANRPAEQPPPPECEGKEAAREERAAAATSAGARGEPSPALVLGRSVPQAAVPVRPLALHLAHKARGPGGPFGGEPPPPPPPPSPLPPLLRDPPAEDAREEVAAGPAEKRQPPLLPPKGNPWTKKPPQHLSPDTTGPPPPPLETLEAEFGSLKIIKAGKLKTKKSNKASDFSDMENWPTPSELVNTGFQSVLSQGNKKPQNRKEKEEKVEKRSNSDSKENRETKLNGPGENVSEDEAQSSNQRKRANKHKWVPLHLDVVRSESQERPGSRNSSRCQPEANKPTHNNRRNDTRSWKRDREKRDDQDDVSSVRSEGGNIRGSFRGRGRGRGRGRGRGRGNPRLNFDYSYGYQEHGERTDQPFQTELNTSMMYYYDDGTGVQVYPVEEALLKEYIKRQIEYYFSVENLERDFFLRGKMDEQGFLPISLIAGFQRVQALTTNLNLILEALKDSTEVEIVDEKMRKKIEPEKWPIPGPPPRSVPPTDFSQLIDCPEFVPGQAFCSHTESAPNSPRIGSPLSPKKNSETSILQAMSRGLSTSLPDLDSEPWIEVKKRHQPAPVKLRESVSVPEGSLNQLCSSEEPEQEELDFLFDEEIEQIGRKNTFTDWSDNDSDYEIDDQDLNKILIVTQTPPYVKKHPGGDRTGTHMSRAKITSELAKVINDGLYYYEQDLWMEEDENKHTAIKQEVENFKKLNLISKEQFENLTPELPFEPNQEVPVAPSQSRQGGVQGVLHIPKKDLTDELAQKLFDVSEITSAAMVHSLPTAVPESPRIHPTRTPKTPRTPRLQDPNKTPRFYPVVKEPKAIDVKSPRKRKTRHSTNPPLECHVGWVMDSRDRGPGTSSVSTSNASPSEGAPLAGSYGCTPHSFPKFQHPSHELLKENGFTQQVYHKYRRRCLSERKRLGIGQSQEMNTLFRFWSFFLRDHFNKKMYEEFRQLAWEDAKENYRYGLECLFRFYSYGLEKKFRREIFQDFQEETKKDYESGQLYGLEKFWAYLKYSQSKTQSIDPKLQEYLCSFKRLEDFRVDPPISDEFGRKRHSSTSGEESNRHRLPPNSSTKPPNAAKPTSTSELQVPINSPRRNISPESSDNSH

SEQ ID NO: 40587 - protein, 327 aa, Homo sapiens
MYYYDDGTGVQVYPVEEALLKEYIKRQIEYYFSVENLERDFFLRGKMDEQGFLPISLIAGFQRVQALTTNLNLILEALKDSTEVEIVDEKMRKKIEPEKWPIPGPPPRSVPPTDFSQLIDCPEFVPGQAFCSHTESAPNSPRIGSPLSPKKNSETSILQAMSRGLSTSLPDLDSEPWIEVKKRHQPAPVKLRESVSVPEGSLNQLCSSEEPEQEELDFLFDEEIEQIGRKNTFTDWSDNDSDYEIDDQDLNKILIVTQTPPYVKKHPGGDRTGTHMSRAKITSELAKVINDGLYYYEQDLWMEEDENKHTAIKVIVSGQHLSTDALF

SEQ ID NO: 40588 - protein, 787 aa, Homo sapiens
MKLHDSYQLNPDEYYVLADPWRQEWEKGVQVPVSPGTIPQPVARVVSEEKSLMFIRPKKYIVSSGSEPPELGYVDIRTLADSVCRYDLNDMDAAWLELTNEEFKEMGMPELDEYTMERVLEEFEQRCYDNMNHAIETEEGLGIEYDEDVVCDVCQSPDGEDGNEMVFCDKCNICVHQACYGILKVPEGSWLCRTCALGVQPKCLLCPKKGGAMKPTRSGTKWVHVSCALWIPEVSIGSPEKMEPITKVSHIPSSRWALVCSLCNEKFGASIQCSVKNCRTAFHVTCAFDRGLEMKTILAENDEVKFKSYCPKHSSHRKPEESLGKGAAQENGAPECSPRNPLEPFASLEQNREEAHRVSVRKQKLQQLEDEFYTFVNLLDVARALRLPEEVVDFLYQYWKLKRKVNFNKPLITPKKDEEDNLAKREQDVLFRRLQLFTHLRQDLERVRNLTYMVTRREKIKRSVCKVQEQIFNLYTKLLEQERVSGVPSSCSSSSLENMLLFNSPSVGPDAPKIEDLKWHSAFFRKQMGTSLVHSLKKPHKRDPLQNSPGSEGKTLLKQPDLCGRREGMVVPESFLGLEKTFAEARLISAQQKNGVVMPDHGKRRDNRFHCDLIKGDLKDKSFKQSHKPLRSTDVSQRHLDNTRAATSPGVGQSAPGTRKEIVPKCNGSLIKVNYNQTAVKVPTTPASPVKNWGGFRIPKKGERQQQGEAHDGACHQHSDYPYLGLGRVPAKERAKSKLKSDNENDGYVPDVEMSDSESEASEKKCIHTSSTISRRTDIIRRSILAS

SEQ ID NO: 40589 - protein, 454 aa, Homo sapiens
MKLHDSYQLNPDEYYVLADPWRQEWEKGVQVPVSPGTIPQPVARVVSEEKSLMFIRPKKYIVSSGSEPPELGYVDIRTLADSVCRYDLNDMDAAWLELTNEEFKEMGMPELDEYTMERVLEEFEQRCYDNMNHAIETEEGLGIEYDEDVVCDVCQSPDGEDGNEMVFCDKCNICVHQACYGILKVPEGSWLCRTCALGVQPKCLLCPKKGGAMKPTRSGTKWVHVSCALWIPEVSIGSPEKMEPITKVSHIPSSRWALVCSLCNEKFGASIQCSVKNCRTAFHVTCAFDRGLEMKTILAENDEVKFKSYCPKHSSHRKPEESLGKGAAQENGAPECSPRNPLEPFASLEQNREEAHRVSVRKQKLQQLEDEFYTFVNLLDVARALRLPEEVVDFLYQYWKLKRKVNFNKPLITPKKDEEDNLAKREQDVLFRRLQLFTHLRQDLERVMIDTDTL

SEQ ID NO: 40590 - protein, 225 aa, Homo sapiens [sequence omitted]

SEQ ID NO: 40591 - protein, 360 aa, Homo sapiens
MVEEAVEGHLDDDGLPHGFCTVTYSSTDRFEGNFVHGEKNGRGKFFFFDGSTLEGYYVDDALQGQGVYTYEDGGVLQGTYVDGELNGPAQEYDTDGRLIFKGQYKDNIRHGVCWIYYPDGGSLVGEVNEDGEMTGEKIAYVYPDERTALYGKFIDGEMIEGKLATLMSTEEGRPHFELMPGNSVYHFDKSTSSCISTNALLPDPYESERVYVAESLISSAGEGLFSKVAVGPNTVMSFYNGVRITHQEVDSRDWALNGNTLSLDEETVIDVPEPYNHVSKYCASLGHKANHSFTPNCIYDMFVHPRFGPIKCIRTLRAVEADEELTVAYGYDHSPPGKSGPEAPEWYQVELKAFQATQQK

SEQ ID NO: 40592 - protein, 54 aa, Homo sapiens
MMNADMDDLSARVDAVKEENLKLKSENQVLGQYIENLMSASSVFQTTDTKSKRK

SEQ ID NO: 40593 - protein, 276 aa, Homo sapiens [sequence omitted]

SEQ ID NO: 40594 - protein, 1002 aa, Homo sapiens
MFDLTTRLILEGQDPFQRQVGHQVLEAYARYHRPEFESFFNKTFVLGLLHQGYHSLDRKDVAILDYIHNGLKLIMSCPSVLDLFSLLQVEVLRMVCERPEPQLCARLSDLLTDFVQCIPKGKLSITFCQQLVRTIGHFQCVSTQERELREYVSQVTKVSNLLQNIWKAEPATLLPSLQEVFASISSTDASFEPSVALASLVQHIPLQMITVLIRSLTTDPNVKDASMTQALCRMIDWLSWPLAQHVDTWVIALLKGLAAVQKFTILIDVTLLKIELVFNRLWFPLVRPGALAVLSHMLLSFQHSPEAFHLIVPHVVNLVHSFKNDGLPSSTAFLVQLTELIHCMMYHYSGFPDLYEPILEAIKDFPKPSEEKIKLILNQSAWTSQSNSLASCLSRLSGKSETGKTGLINLGNTCYMNSVIQALFMATDFRRQVLSLNLNGCNSLMKKLQHLFAFLAHTQREAYAPRIFFEASRPPWFTPRSQQDCSEYLRFLLDRLHEEEKILKVQASHKPSEILECSETSLQEVASKAAVLTETPRTSDGEKTLIEKMFGGKLRTHIRCLNCRSTSQKVEAFTDLSLAFCPSSSLENMSVQDPASSPSIQDGGLMQASVPGPSEEPVVYNPTTAAFICDSLVNEKTIGSPPNEFYCSENTSVPNESNKILVNKDVPQKPGGETTPSVTDLLNYFLAPEILTGDNQYYCENCASLQNAEKTMQITEEPEYLILTLLRFSYDQKYHVRRKILDNVSLPLVLELPVKRITSFSSLSESWSVDVDFTDLSENLAKKLKPSGTDEASCTKLVPYLLSSVVVHSGISSESGHYYSYARNITSTDSSYQMYHQSEALALASSQSHLLGRDSPSAVFEQDLENKEMSKEWFLFNDSRVTFTSFQSVQKITSRFPKDTAYVLLYKKQHSTNGLSGNNPTSGLWINGDPPLQKELMDAITKDNKLYLQEQELNARARALQAASASCSFRPNGFDDNDPPGSCGPTGGGGGGGFNTVGRLVF

SEQ ID NO: 40595 - protein, 697 aa, Homo sapiens [sequence omitted]

SEQ ID NO: 40596 - protein, 317 aa, Homo sapiens [sequence omitted]

SEQ ID NO: 40597 - protein, 1631 aa, Homo sapiens
MCETVRYERHEANEVLYYPDDIGTCWYILLSGSVFIKESMFLPRSSFGKRSAGSFRRGCECIVLEPSEMIVVDYMDENEEYFQRQASHRQSRRRFRKINQKGERQTIIDTVDPYPMGKPPLPRGYHTLPADFTKLHLTDSLHPQVTHVSSSHSGCSITSDSGSSSLSDIYQATESEAGDMDLSGLPETAVDSEDDDDEEDIERASDPLMSRDIVRDCLEKDPIDRTDDDIEQLLEFMHQLPAFANMTMSVRRELCAVMVFAVVERAGTIVLNDGEELDSWSVILNGSVEVTYPDGKAEILCMGNSFGVSPTMDKEYMKGVMRTKVDDCQFVCIAQQDYCRILNQVEKNMQKVEEEGEIVMVKEHRELDRTGTRKGHIVIKGTSERLTMHLVEEHSVVDPTFIEDFLLTYRTFLSSPMEVGKKLLEWFNDPSLRDKVTRVVLLWVNNHFNDFEGDPAMTRFLEEFENNLEREKMGGHLRLLNIACAAKAKRRLMTLTKPSREAPLPFILLGGSEKGFGIFVDSVDSGSKATEAGLKRGDQILEVNGQNFENIQLSKAMEILRNNTHLSITVKTNLFVFKELLTRLSEEKRNGAPHLPKIGDIKKASRYSIPDLAVDVEQVIGLEKVNKKSKANTVGGRNKLKKILDKTRISILPQKPYNDIGIGQSQDDSIVGLRQTKHIPTALPVSGTLSSSNPDLLQSHHRILDFSATPDLPDQVLRVFKADQQSRYIMISKDTTAKEVVIQAIREFAVTATPDQYSLCEVSVTPEGVIKQRRLPDQLSKLADRIQLSGRYYLKNNMETETLCSDEDAQELLRESQISLLQLSTVEVATQLSMRNFELFRNIEPTEYIDDLFKLRSKTSCANLKRFEEVINQETFWVASEILRETNQLKRMKIIKHFIKIALHCRECKNFNSMFAIISGLNLAPVARLRTTWEKLPNKYEKLFQDLQDLFDPSRNMAKYRNVLNSQNLQPPIIPLFPVIKKDLTFLHEGNDSKVDGLVNFEKLRMIAKEIRHVGRMASVNMDPALMFRTRKKKWRSLGSLSQGSTNATVLDVAQTGGHKKRVRRSSFLNAKKLYEDAQMARKVKQYLSNLELEMDEESLQTLSLQCEPATNTLPKNPGDKKPVKSETSPVAPRAGSQQKAQSLPQPQQQPPPAHKINQGLQVPAVSLYPSRKKVPVKDLPPFGINSPQALKKILSLSEEGSLERHKKQAEDTISNASSQLSSPPTSPQSSPRKGGSGNQLRSFGSGQLDLTSSSSSLGSYTLAPSGTVDNFSDSGHSEISSRSSIVSNSSFDSVPVSLHDERRQRHSVSIVETNLGMGRMERRTMIEPDQYSLGSYAPMSEGRGLYATATVISSPSTEELSQDQGDRASLDAADSGRGSWTSCSSGSHDNIQTIQHQRSWETLPFGHTHFDYSGDPAGLWASSSHMDQIMFSDHSTKYNRQNQSRESLEQAQSRASWASSTGYWGEDSEGDTGTIKRRGGKDVSIEAESSSLTSVTTEETKPVPMPAHIAVASSTTKGLIARKEGRYREPPPTPPGYIGIPITDFPEGHSHPARKPPDYNVALQRSRMVARSSDTAGPSSVQQPHGHPTSSRPVNKPQWHKPNESDPRLAPYQSQGFSTEEDEDEQVSAV

SEQ ID NO: 40598 - protein, 1549 aa, Homo sapiens
MDENEEYFQRQASHRQSRRRFRKINQKGERQTIIDTVDPYPMGKPPLPRGYHTLPADFTKLHLTDSLHPQVTHVSSSHSGCSITSDSGSSSLSDIYQATESEAGDMDLSGLPETAVDSEDDDDEEDIERASDPLMSRDIVRDCLEKDPIDRTDDDIEQLLEFMHQLPAFANMTMSVRRELCAVMVFAVVERAGTIVLNDGEELDSWSVILNGSVEVTYPDGKAEILCMGNSFGVSPTMDKEYMKGVMRTKVDDCQFVCIAQQDYCRILNQVEKNMQKVEEEGEIVMVKEHRELDRTGTRKGHIVIKGTSERLTMHLVEEHSVVDPTFIEDFLLTYRTFLSSPMEVGKKLLEWFNDPSLRDKVTRVVLLWVNNHFNDFEGDPAMTRFLEEFENNLEREKMGGHLRLLNIACAAKAKRRLMTLTKPSREAPLPFILLGGSEKGFGIFVDSVDSGSKATEAGLKRGDQILEVNGQNFENIQLSKAMEILRNNTHLSITVKTNLFVFKELLTRLSEEKRNGAPHLPKIGDIKKASRYSIPDLAVDVEQVIGLEKVNKKSKANTVGGRNKLKKILDKTRISILPQKPYNDIGIGQSQDDSIVGLRQTKHIPTALPVSGTLSSSNPDLLQSHHRILDFSATPDLPDQVLRVFKADQQSRYIMISKDTTAKEVVIQAIREFAVTATPDQYSLCEVSVTPEGVIKQRRLPDQLSKLADRIQLSGRYYLKNNMETETLCSDEDAQELLRESQISLLQLSTVEVATQLSMRNFELFRNIEPTEYIDDLFKLRSKTSCANLKRFEEVINQETFWVASEILRETNQLKRMKIIKHFIKIALHCRECKNFNSMFAIISGLNLAPVARLRTTWEKLPNKYEKLFQDLQDLFDPSRNMAKYRNVLNSQNLQPPIIPLFPVIKKDLTFLHEGNDSKVDGLVNFEKLRMIAKEIRHVGRMASVNMDPALMFRTRSLSQGSTNATVLDVAQTGGHKKRVRRSSFLNAKKLYEDAQMARKVKQYLSNLELEMDEESLQTLSLQCEPATNTLPKNPGDKKPVKSETSPVAPRAGSQQKAQSLPQPQQQPPPAHKINQGLQVPAVSLYPSRKKVPVKDLPPFGINSPQALKKILSLSEEGSLERHKKQAEDTISNASSQLSSPPTSPQSSPRKGGSGNQLRSFGSGQLDLTSSSSSLGSYTLAPSGTVDNFSDSGHSEISSRSSIVSNSSFDSVPVSLHDERRQRHSVSIVETNLGMGRMERRTMIEPDQYSLGSYAPMSEGRGLYATATVISSPSTEELSQDQGDRASLDAADSGRGSWTSCSSGSHDNIQTIQHQRSWETLPFGHTHFDYSGDPAGLWASSSHMDQIMFSDHSTKYNRQNQSRESLEQAQSRASWASSTGYWGEDSEGDTGTIKRRGGKDVSIEAESSSLTSVTTEETKPVPMPAHIAVASSTTKGLIARKEGRYREPPPTPPGYIGIPITDFPEGHSHPARKPPDYNVALQRSRMVARSSDTAGPSSVQQPHGHPTSSRPVNKPQWHKPNESDPRLAPYQSQGFSTEEDEDEQVSAV

SEQ ID NO: 40599 - protein, 687 aa, Homo sapiens [sequence omitted]

SEQ ID NO: 40600 - protein, 205 aa, Homo sapiens
MAAYSYRPGPGAGPGPAAGAALPDQSFLWNVFQRVDKDRSGVISDTELQQALSNGTWTPFNPVTVRSIISMFDRENKAGVNFSEFTGVWKYITDWQNVFRTYDRDNSGMIDKNELKQALSGFGYRLSDQFHDILIRKFDRQGRGQIAFDDFIQGCIVLQTLAPSPRPECGGANTAHCSLDPQAQAILTPRTPKVLGSQARVTMLA

SEQ ID NO: 40601 - protein, 120 aa, Homo sapiens
MTFCRLLNRCGEAARSLPLGARCFGVRVSPTGEKVTHTGQVYDDKDYRRIRFVGRQKEVNENFAIDLIAEQPVSEVETRVIACDGGGGALGHPKVYINLDKETKTGTCGYCGLQFRQHHH

SEQ ID NO: 40602 - protein, 1655 aa, Homo sapiens [sequence omitted]

SEQ ID NO: 40603 - protein, 154 aa, Homo sapiens
MWSWAVVTGIKKKTDFGEIILAGFLASVIDVDHFFLAGSMSLKAALTLPRRPFLHCSTVIPVVVLTLKFTMHLFKLKDSWCFLPWMLFISWTSHHIRDGIRHGLWICPFGKTSPLPFWLYVIITSSLPHICSFVMYLTGTRQMMSSKHGVRIDV

SEQ ID NO: 40604 - protein, 632 aa, Homo sapiens
MILYEDDSVQVQYVDGSTLQLSPCGSEFLFEKSPPVSAHPLEQPERIRQRTHFVISTYREQLQRALDFRNSSATCPFLSETIIPSERKKHIFIDITEVRWPSLDTDGTMIYMESGIVKITSLDGHAYLCLPRSQHEFTVHFLCKVSQKSDSSAVLSETNNKAPKDKLVEKTGKICIRGNLPGQRLKNKENEFHCQIMKSKETLKKMSCVNGTEGREELPSPGTKHTCVYTWVKQCWSVAACPEEWKYPLSLALHFHNKISNMSKIDAHITQSRFLTSDISEERGKVVSVLPRALSLSCPVPHLHRWNFCDSLLQRQSDEYSYPELVKMVWYKGVTYRLTHQNMNSIEIYSGDGSVFKSEGAYFGNYFTYYSIQEGSGKREEKTYSVNNLPPDRPGSPFTVGSLIKQATRILQHCVKMRLSLSHNYRICCWKMVPGINDSNILPLVLKESLIPSVGRFLAYSDDKVHAIFLDGITLTLNWNFSSPIEKRQVNQGLNLGWCKLTFPDGQEQLIQIEHPEPYERYVTTVTSWCRRLTQTSPREMPTHSSSSVLQENWSVASELEKIQKFNLLLENSGILNQISNKKNEQQSFDHYKPGSSETLLGEVNENRVSIALKKTSEILHDIDCLLSNSKK

SEQ ID NO: 40605 - protein, 904 aa, Homo sapiens [sequence omitted]

SEQ ID NO: 40606 - protein, 153 aa, Homo sapiens [sequence omitted]

SEQ ID NO: 40607 - protein, 278 aa, Homo sapiens
MSPVSTKHCLVAVGTRGPKVQLCDLKSGSCSHILQGHRQEILAVSWSPRYDYILATASADSRVKLWDVRRASGCLITLDQHNGKKSQAVESANTAHNGKVNGLCFTSDGLHLLTVGTDNRMRLWNSSNGENTLIPAGSIGREQADSNLSAFKLIMMMKLRNKNEKPGKVSKGCKKPAKQNGKKATSKVPSAPQFVHSNDHANREAEIKKRVEEMREKQQAAQEQERQKRRSIKSYCEDILRRQEEFQCKEEVLQELNMFPQLDDEATMKAYYKESVRW

SEQ ID NO: 40608 - protein, 20 aa, Homo sapiens
MEVNPPKQEHLLALKGPVSL

SEQ ID NO: 40609 - protein, 2427 aa, Homo sapiens
MSDPNFWTVLSNFTLPHLRSGNRLRRTQSCRTSNRKSLIGNGQSPALPRPHSPLSAHAGNSPQDSPRNFSPSASAHFSFARRTDGRRWSLASLPSSGYGTNTPSSTVSSSCSSQEKLHQLPYQPTPDELHFLSKHFCTTESIATENRCRNTPMRPRSRSLSPGRSPACCDHEIIMMNHVYKERFPKATAQMEERLKEIITSYSPDNVLPLADGVLSFTHHQIIELARDCLDKSHQGLITSRYFLELQHKLDKLLQEAHDRSESGELAFIKQLVRKILIVIARPARLLECLEFDPEEFYYLLEAAEGHAKEGQGIKTDIPRYIISQLGLNKDPLEEMAHLGNYDSGTAETPETDESVSSSNASLKLRRKPRESDFETIKLISNGAYGAVYFVRHKESRQRFAMKKINKQNLILRNQIQQAFVERDILTFAENPFVVSMYCSFETRRHLCMVMEYVEGGDCATLMKNMGPLPVDMARMYFAETVLALEYLHNYGIVHRDLKPDNLLVTSMGHIKLTDFGLSKVGLMSMTTNLYEGHIEKDAREFLDKQVCGTPEYIAPEVILRQGYGKPVDWWAMGIILYEFLVGCVPFFGDTPEELFGQVISDEINWPEKDEAPPPDAQDLITLLLRQNPLERLGTGGAYEVKQHRFFRSLDWNSLLRQKAEFIPQLESEDDTSYFDTRSEKYHHMETEEEDDTNDEDFNVEIRQFSSCSHRFSKVFSSIDRITQNSAEEKEDSVDKTKSTTLPSTETLSWSSEYSEMQQLSTSNSSDTESNRHKLSSGLLPKLAISTEGEQDEAASCPGDPHEEPGKPALPPEECAQEEPEVTTPASTISSSTLSVGSFSEHLDQINGRSECVDSTDNSSKPSSEPASHMARQRLESTEKKKISGKVTKSLSASALSLMIPGDMFAVSPLGSPMSPHSLSSDPSSSRDSSPSRDSSAASASPHQPIVIHSSGKNYGFTIRAIRVYVGDSDIYTVHHIVWNVEEGSPACQAGLKAGDLITHINGEPVHGLVHTEVIELLLKSGNKVSITTTPFENTSIKTGPARRNSYKSRMVRRSKKSKKKESLERRRSLFKKLAKQPSPLLHTSRSFSCLNRSLSSGESLPGSPTHSLSPRSPTPSYRSTPDFPSGTNSSQSSSPSSSAPNSPAGSGHIRPSTLHGLAPKLGGQRYRSGRRKSAGNIPLSPLARTPSPTPQPTSPQRSPSPLLGHSLGNSKIAQAFPSKMHSPPTIVRHIVRPKSAEPPRSPLLKRVQSEEKLSPSYGSDKKHLCSRKHSLEVTQEEVQREQSQREAPLQSLDENVCDVPPLSRARPVEQGCLKRPVSRKVGRQESVDDLDRDKLKAKVVVKKADGFPEKQESHQKSHGPGSDLENFALFKLEEREKKVYPKAVERSSTFENKASMQEAPPLGSLLKDALHKQASVRASEGAMSDGRVPAEHRQGGGDFRRAPAPGTLQDGLCHSLDRGISGKGEGTEKSSQAKELLRCEKLDSKLANIDYLRKKMSLEDKEDNLCPVLKPKMTAGSHECLPGNPVRPTGGQQEPPPASESRAFVSSTHAAQMSAVSFVPLKALTGRVDSGTEKPGLVAPESPVRKSPSEYKLEGRSVSCLKPIEGTLDIALLSGPQASKTELPSPESAQSPSPSGDVRASVPPVLPSSSGKKNDTTSARELSPSSLKMNKSYLLEPWFLPPSRGLQNSPAVSLPDPEFKRDRKGPHPTARSPGTVMESNPQQREGSSPKHQDHTTDPKLLTCLGQNLHSPDLARPRCPLPPEASPSREKPGLRESSERGPPTARSERSAARADTCREPSMELCFPETAKTSDNSKNLLSVGRTHPDFYTQTQAMEKAWAPGGKTNHKDGPGEARPPPRDNSSLHSAGIPCEKELGKVRRGVEPKPEALLARRSLQPPGIESEKSEKLSSFPSLQKDGAKEPERKEQPLQRHPSSIPPPPLTAKDLSSPAARQHCSSPSHASGREPGAKPSTAEPSSSPQDPPKPVAAHSESSSHKPRPGPDPGPPKTKHPDRSLSSQKPSVGATKGKEPATQSLGGSSREGKGHSKSGPDVFPATPGSQNKASDGIGQGEGGPSVPLHTDRAPLDAKPQPTSGGRPLEVLEKPVHLPRPGHPGPSEPADQKLSAVGEKQTLSPKHPKPSTVKDCPTLCKQTDNRQTDKSPSQPAANTDRRAEGKKCTEALYAPAEGDKLEAGLSFVHSENRLKGAERPAAGVGKGFPEARGKGPGPQKPPTEADKPNGMKRSPSATGQSSFRSTALPEKSLSCSSSFPETRAGVREASAASSDTSSAKAAGGMLELPAPSNRDHRKAQPAGEGRTHMTKSDSLPSFRVSTLPLESHHPDPNTMGGASHRDRALSVTATVGETKGKDPAPAQPPPARKQNVGRDVTKPSPAPNTDRPISLSNEKDFVVRQRRGKESLRSSPHKKAL

SEQ ID NO: 40610 - protein, 102 aa, Homo sapiens
MGSKMASASRVVQVVKPHTPLIRFPDRRDNPKPNVSEALRSAGLPSHSSVISQHSKGSKSPDLLMYQGPPDTAEIIKTLPQKYRRKLVSQEEMEFIQRGGPE

SEQ ID NO: 40611 - protein, 371 aa, Homo sapiens
MKKKAKIGIHHKNSPPKVTVPTSGNTIESPLHENISNSTSFKDEKIMETDSEPEEGEITDSQTEDSYDEAITSEGNVTAEDSEDEDEDKIWPPCIRVIVIRSPVLQIGSLFIITAVNPATIGREKDMEHTLRIPEVGVSKFHAEIYFDHDLQSYVLVDQGSQNGTIVNGKQILQPKTKCDPYVLEHGDEVKIGETVLSFHIHPGSDTCDGCEPGQVRAHLRLDKKDESFVGPTLSKEEKELERRKELKKIRVKYGLQNTEYEDEKTLKNPKYKDRAGKRREQVGSEGTFQRDDAPASVHSEITDSNKGRKMLEKMGWKKGEGLGKDGGGMKTPENTDPGAEHEDRAGRRRKWKEGSFSLSLILLGLDAGES

SEQ ID NO: 40612 - protein, 364 aa, Homo sapiens
MPPLFHTHYVPDIVRCVPPFREIAFLEPREITLPEAKDKLSQQILELFETCQQQISDLKKKELCRTQLQREIQLLFPQSRLFLVGSSLNGFGTRSSDGDLCLVVKEEPVNQKTEARHILTLVHKHFCTRLSGYIERPQLIRAKVPIVKFRDKVSCVEFDLNVNNIVGIRNTFLLRTYAYLENRVRPLVLVIKKWASHHQINDASRGTLSSYSLVLMVLHYLQTLPEPILPSLQKIYPESFSPAIQLHLVHQAPCNVPPYLSKNESNLGDLLLGFLKYYATEFDWNSQMISVREAKAIPRPDGIEWRNKYICVEEPFDGTNTARAVHEKQKFDMIKDQFLKSWHRLKNKRDLNSILPVRAAVLKR

SEQ ID NO: 40613 - protein, 186 aa, Homo sapiens [sequence omitted]

SEQ ID NO: 40614 - protein, 138 aa, Homo sapiens
MAKAALVDYLDGKAVDYIEKALEYFTCALQHRADVSCLWKLAGDACTCLYAVAPSKVNVHVLGVLLGQKEGKQVLKKNELLHLGGRCYGRALKLMSTSNTWCDLGINYYRQAQHLAETGSNMNDLKELLEKSLHVWYK

SEQ ID NO: 40615 - protein, 44 aa, Homo sapiens
MKGGNLDLNGLDHLTTARVTTAFVAGKKIAVSTQESSNFTVFVF

SEQ ID NO: 40616 - protein, 326 aa, Homo sapiens
MGVPTYGAIILDETLENVLLVQGYLAKSGWGFPKGKVNKEEAPHDCAAREVFEETGFDIKDYICKDDYIELRINDQLARLYIIPGIPKDTKFNPKTRREIRNIEWFSIEKLPCHRNDMTPKSKLGLAPNKFFMAIPFIRPLRDWLSRRFGDSSDSDNGFSSTGSTPAKPTVEKLSRTKFRHSQQLFPDGSPGDQWVKHRQPLQQKPYNNHSEMSDLLKGKNQSMRGNGRKQYQDSPNQKKRTNGLQPAKQQNSLMKCEKKLHPRKLQDNFETDAVYDLPSSSEDQLLEHAEGQPVACNGHCKFPFSSRAFLSFKFDHNAIMKILDL

SEQ ID NO: 40617 - protein, 497 aa, Homo sapiens
MAALTTVVVAAAATAVAGAVAGAGAATGTGVGATPAPQQSDGCFSTSGGIRPFHLQNWKQKVNQTKKAEFVRTAEKFKNQVINMEKDKHSHFYNQKSDFRIEHSMLEELENKLIHSRKTERAKIQQQLAKIHNNVKKLQHQLKDVKPTPDFVEKLREMMEEIENAINTFKEEQRLIYEELIKEEKTTNNELSAISRKIDTWALGNSETEKAFRAISSKVPVDKVTPSTLPEEVLDFEKFLQQTGGRQGAWDDYDHQNFVKVRNKHKGKPTFMEEVLEHLPGKTQDEVQQHEKWYQKFLALEERKKESIQIWKTKKQQKREEIFKLKEKADNTPVLFHNKQEDNQKQKEEQRKKQKLAVEAWKKQKSIEMSMKCASQLKEEEEKEKKHQKERQRQFKLKLLLESYTQQKKEQEEFLRLEKEIREKAEKAEKRKNAADEISRFQERVENNVSRDPSRLYKPTKGWEERTKKIGPTGSGPLLHIPHRAIPTWRQGIQRRV

SEQ ID NO: 40618 - protein, 1153 aa, Homo sapiens
MKERERRNQEIQQGEDAFPPSSPLFAEPYKVTSKEDKLSSRIQSMLGNYDEMKDFIGDRSIPKLVAIPKPTVPPSADEKSNPNFFEQRHGGSHQSSKWTPVGPAPSTSQSQKRSSGLQSGHSSQRTSAGSSSGTNSSGQRHDRESYNNSGSSSRKKGQHGSEHSKSRSSSPGKPQAVSSLNSSHSRSHGNDHHSKEHQRSKSPRDPDANWDSPSRVPFSSGQHSTQSFPPSLMSKSNSMLQKPTAYVRPMDGQESMEPKLSSEHYSSQSHGNSMTELKPSSKAHLTKLKIPSQPLDASASGDVSCVDEILKEMTHSWPPPLTAIHTPCKTEPSKFPFPTKESQQSNFGTGEQKRYNPSKTSNGHQSKSMLKDDLKLSSSEDSDGEQDCDKTMPRSTPGSNSEPSHHNSEGADNSRDDSSSHSGSESSSGSDSESESSSSDSEANEPSQSASPEPEPPPTNKWQLDNWLNKVNPHKVSPASSVDSNIPSSQGYKKEGREQGTGNSYTDTSGPKETSSATPGRDSKTIQKGSESGRGRQKSPAQSDSTTQRRTVGKKQPKKAEKAAAEEPRGGLKIESETPVDLASSMPSSRHKAATKGSRKPNIKKESKSSPRPTAEKKKYKSTSKSSQKSREIIETDTSSSDSDESESLPPSSQTPKYPESNRTPVKPSSVEEEDSFFRQRMFSPMEEKELLSPLSEPDDRYPLIVKIDLNLLTRIPGKPYKETEPPKGEKKNVPEKHTREAQKQASEKVSNKGKRKHKNEDDNRASESKKPKTEDKNSAGHKPSSNRESSKQSAAKEKDLLPSPAGPVPSKDPKTEHGSRKRTISQSSSLKSSSNSNKETSGSSKNSSSTSKQKKTEGKTSSSSKEVKEKAPSSSSNCPPSAPTLDSSKPRRTKLVFDDRNYSADHYLQEAKKLKHNADALSDRFEKAVYYLDAVVSFIECGNALEKNAQESKSPFPMYSETVDLIKYTMKLKNYLAPDATAADKRLTVLCLRCESLLYLRLFKLKKENALKYSKTLTEHLKNSYNNSQAPSPGLGSKAVGMPSPVSPKLSPGNSGNYSSGASSASASGSSVTIPQKIHQMAASYVQVTSNFLYATEIWDQAEQLSKEQKEFFAELDKVMGPLIFNASIMTDLVRYTRQGLHWLRQDAKLIS

SEQ ID NO: 40619 - protein, 471 aa, Homo sapiens
MIIEMATGNPYLPSSSDLDLLHKIVLKVGNLSPHLQNIFSKSPIFAGVVLPQVQHPKNARKKYPKLNGLLADIVHACLQIDPADRISSSDLLHHEYFTRDGFIEKFMPELKAKLLQEAKVNSLIKPKESSKENELRKDERKTVYTNTLLSSSVLGKEIEKEKKPKEIKVRVIKVKGGRGDISEPKKKEYEGGLGQQDANENVHPMSPDTKLVTIEPPNPINPSTNCNGLKENPHCGGSVTMPPINLTNSNLMAANLSSNLFHPSVRLTERAKKRRTSSQSIGQVMPNSRQEDPGPIQSQMEKGIFNERTGHSDQMANENKRKLNFSRSDRKEFHFPELPVTIQSKDTKGMEVKQIKMLKRESKKTESSKIPTLLNVDQNQEKQEAKEILTKESNVQEVRCPVTVCGDVHGQFHDLMELFRIGGKSPDTNYLFMGDYVDRGYYSVETVTLLVALKVISILCWGMLKWVRQSS

SEQ ID NO: 40620 - protein, 102 aa, Homo sapiens
MGLNVLDPHTSHSWLCDGRLLCLHDPSNKNNWKIFRECWKQGQPVLVSGVHKKLKSELWKPEAFSQEFGDQDVDLVNCRNCAIISDVKVRDFWDGFEIICSK

SEQ ID NO: 40621 - protein, 117 aa, Homo sapiens
MRLSLPLLLLLLGAWAIPGGLGDRAPLTATAPQLDDEEMYSAHMPAHLRCDACRAVAYQVSPSPLSPCPAHTPSQARPLHPPHIPPPAFDPQSLPLGIKPQMQPFIYSMPQFTHLPA

SEQ ID NO: 40622 - protein, 1197 aa, Homo sapiens
MSAFRKGHVKVVQYLVKEVNQFPSDIECMRYIATITDKELLKKCHQCVETIVKAKDQQAAEANKNASILLKELDLEKSREESRKQALAAKREKRKEKRKKKKEEQKRKQEEDEENKPKENSELPEDEDEEENDEDVEQEVPIEPPSATTTTTIGISATSATFTNVFGKKRANVVTTPSTNRKNKKNKTKETPPTAHLILPEQHMSLAQQKADKNKINGEPRGGGAGGNSDSDNLDSTDCNSESSSGGKSQELNFVMDVNSSKYPSLLLHSQEEKTSTATSKTQTRLEGEVTPNSLSTSYKTVSLPLSSPNIKLNLTSPKRGQKREEGWKEVVRRSKKLSVPASVVSRIMGRGGCNITAIQDVTGAHIDVDKQKDKNGERMITIRGGTESTRYAVQLINALIQDPAKELEDLIPKNHIRTPASTKSIHANFSSGVGTTAASSKNAFPLGAPTLVTSQATTLSTFQPANKLNKNVPTNVRSSFPVSLPLAYPHPHFALLAAQTMQQIRHPRLPMAQFGGTFSPSPNTWGPFPVRPVNPGNTNSSPKHNNTSRLPNQNGTVLPSESAGLATASCPITVSSVVAASQQLCVTNTRTPSSVRKQLFACVPKTSPPATVISSVTSTCSSLPSVSSAPITSGQAPTTFLPASTSQAQLSSQKMESFSAVPPTKEKVSTQDQPMANLCTPSSTANSCSSSASNTPGAPETHPSSSPTPTSSNTQEEAQPSSVSDLSPMSMPFASNSEPAPLTLTSPRMVAADNQDTSNLPQLAVPAPRVSHRMQPRGSFYSMVPNATIHQDPQSIFVTNPVTLTPPQGPPAAVQLSSAVNIMNGSQMHINPANKSLPPTFGPATLFNHFSSLFDSSQVPANQGWGDGPLSSRVATDASFTVQSAFLGNSVLGHLENMHPDNSKAPGFRPPSQRVSTSPVGLPSIDPSGSSPSSSSAPLASFSGIPGTRVFLQGPAPVGTPSFNRQHFSPHPWTSASNSCDSPIPSVSSGSSSPLSATSAPPTLGQPKGVSASQDRKIPPPIGTERLARIRQGGSVAQAPAGTSFVAPVGHSGIWSFGVNAVSEGLSGWSQSVMGNHPMHQQLSDPSTFSQHQPMERDDSGMVAPSNIFHQPMASGFVDFSKGLPISMYGGTIIPSHPQLADVPGGPLFNGLHNPDPAWNPMIKVIQNSTECTDAQQIWPGTWAPHIGNMHLKYVN

SEQ ID NO: 40623 - protein, 985 aa, Homo sapiens
MSLAQQKADKNKINGEPRGGGAGGNSDSDNLDSTDCNSESSSGGKSQELNFVMDVNSSKYPSLLLHSQEEKTSTATSKTQTRLEGEVTPNSLSTSYKTVSLPLSSPNIKLNLTSPKRGQKREEGWKEVVRRSKKLSVPASVVSRIMGRGGCNITAIQDVTGAHIDVDKQKDKNGERMITIRGGTESTRYAVQLINALIQDPAKELEDLIPKNHIRTPASTKSIHANFSSGVGTTAASSKNAFPLGAPTLVTSQATTLSTFQPANKLNKNVPTNVRSSFPVSLPLAYPHPHFALLAAQTMQQIRHPRLPMAQFGGTFSPSPNTWGPFPVRPVNPGNTNSSPKHNNTSRLPNQNGTVLPSESAGLATASCPITVSSVVAASQQLCVTNTRTPSSVRKQLFACVPKTSPPATVISSVTSTCSSLPSVSSAPITSGQAPTTFLPASTSQAQLSSQKMESFSAVPPTKEKVSTQDQPMANLCTPSSTANSCSSSASNTPGAPETHPSSSPTPTSSNTQEEAQPSSVSDLSPMSMPFASNSEPAPLTLTSPRMVAADNQDTSNLPQLAVPAPRVSHRMQPRGSFYSMVPNATIHQDPQSIFVTNPVTLTPPQGPPAAVQLSSAVNIMNGSQMHINPANKSLPPTFGPATLFNHFSSLFDSSQVPANQGWGDGPLSSRVATDASFTVQSAFLGNSVLGHLENMHPDNSKAPGFRPPSQRVSTSPVGLPSIDPSGSSPSSSSAPLASFSGIPGTRVFLQGPAPVGTPSFNRQHFSPHPWTSASNSCDSPIPSVSSGSSSPLSATSAPPTLGQPKGVSASQDRKIPPPIGTERLARIRQGGSVAQAPAGTSFVAPVGHSGIWSFGVNAVSEGLSGWSQSVMGNHPMHQQLSDPSTFSQHQPMERDDSGMVAPSNIFHQPMGLPISMYGGTIIPSHPQLADVPGGPLFNGLHNPDPAWNPMIKVIQNSTECTDAQQIWPGTWAPHIGNMHLKYVN

SEQ ID NO: 40624 - protein, 94 aa, Homo sapiens
MHPDNSKAPGFRPPSQRVSTSPVGLPSIDPSGSSPSSSSAPLASFSGIPGTRVFLQGPAPVGTPSFNRQHFSPHPWTSASNSCRNPGGTLPKEF

SEQ ID NO: 40625 - protein, 1183 aa, Homo sapiens
MQLLQLLLGLLGPGGYLFLLGDCQEVTTLTVKYQVSEEVPSGTVIGKLSQELGREERRRQAGAAFQVLQLPQALPIQVDSEEGLLSTGRRLDREQLCRQWDPCLVSFDVLATGDLALIHVEIQVLDINDHQPRFPKGEQELEISESASLRTRIPLDRALDPDTGPNTLHTYTLSPSEHFALDVIVGPDETKHAELIVVKELDREIHSFFDLVLTAYDNGNPPKSGTSLVKVNVLDSNDNSPAFAESSLALEIQEDAAPGTLLIKLTATDPDQGPNGEVEFFLSKHMPPEVLDTFSIDAKTGQVILRRPLDYEKNPAYEVDVQARDLGPNPIPAHCKVLIKVLDVNDNIPSIHVTWASQPSLVSEALPKDSFIALVMADDLDSGHNGLVHCWLSQELGHFRLKRTNGNTYMLLTNATLDREQWPKYTLTLLAQDQGLQPLSAKKQLSIQISDINDNAPVFEKSRYEVSTRENNLPSLHLITIKAHDADLGINGKVSYRIQDSPVAHLVAIDSNTGEVTAQRSLNYEEMAGFEFQVIAEDSGQPMLASSVSVWVSLLDANDNAPEVVQPVLSDGKASLSVLVNASTGHLLVPIETPNGLGPAGTDTPPLATHSSRPFLLTTIVARDADSGANGEPLYSIRSGNEAHLFILNPHTGQLFVNVTNASSLIGSEWELEIVVEDQGSPPLQTRALLRVMFVTSVDHLRDSARKPGALSMSMLTVICLAVLLGIFGLILALFMSICRTEKKDNRAYNCREAESTYRQQPKRPQKHIQKADIHLVPVLRGQAGEPCEVGQSHKDVDKEAMMEAGWDPCLQAPFHLTPTLYRTLRNQGNQGAPAESREVLQDTVNLLFNHPRQRNASRENLNLPEPQPATGQPRSRPLKVAGSPTGRLAGDQGSEEAPQRPPASSATLRRQRHLNGKVSPEKESGPRQILRSLVRLSVAAFAERNPVEELTVDSPPVQQISQLLSLLHQGQFQPKPNHRGNKYLAKPGGSRSAIPDTDGPSARAGGQTDPEQEEGPLDPEEDLSVKQLLEEELSSLLDPSTGLALDRLSAPDPAWMARLSLPLTTNYRDNVISPDAAATEEPRTFQTFGKAEAPELSPTGTRLASTFVSEMSSLLEMLLEQRSSMPVEAASEALRRLSVCGRTLSLDLATSAASGMKVQGDPGGKTGTEGKSRGSSSSSRCL

SEQ ID NO: 40626 - protein, 504 aa, Homo sapiens [sequence omitted]

SEQ ID NO: 40627 - protein, 1279 aa, Homo sapiens
MEEIEEAYCYTSPGPPKKKKKYKIHGEKTKKPRSAYLLYYYDIYLKVQQELPHLPQSEINKKISESWRLLSVAERSYYLEKAKLEKEGLDPNSKLSALTAVVPDIPGFRKILPRSDYIIIPKSSLQEDRSCPQLELCVAQNQMSPKGPPLVSNTAPETVPSHAGMAEQCLAVEALAEEVGALTQSGAVQEIATSEILSQDVLLEDASLEVGESHQPYQTSLVIEETLVNGSPDLPTGSLAVPHPQVGESVSVVTVMRDSSESSSSAPATQFIMLPLPAYSVVENPTSIKLTTTYTRRGHGTCTSPGCSFTYVTRHKPPKCPTCGNFLGGKWIPKEKPAKVKVELASGVSSKGSVVKRNQQPVTTEQNSSKENASKLTLENSEAVSQLLNVAPPREVGEESEWEEVIISDAHVLVKEAPGNCGTAVTKTPVVKSGVQPEVTLGTTDNDSPGADVPTPSEGTSTSSPLPAPKKPTGADLLTPGSRAPELKGRARGKPSLLAAARPMRAILPAPVNVGRGSSMGLPRARQAFSLSDKTPSVRTCGLKPSTLKQLGQPIQQPSGPGEVKLPSGPSNRTSQVKVVEVKPDMFPPYKYSCTVTLDLGLATSRGRGKCKNPSCSYVYTNRHKPRICPSCGVNLAKDRTEKTTKAIEVSSPLPDVLNATEPLSTAQREIQRQSTLQLLRKVLQIPENESELAEVFALIHELNSSRLILSNVSEETVTIEQTSWSNYYESPSTQCLLCSSPLFKGGQNSLAGPQECWLLTASRLQTVTAQVKMCLNPHCLALHSFIDIYTGLFNVGNKLLVSLDLLFAIRNQIKLGEDPRVSINVVLKSVQEQTEKTLTSEELSQLQELLCNGYWAFECLTVRDYNDMICGICGVAPKVEMAQRSEENVLALKSVEFTWPEFLGSNEVNVEDFWATMETEVIEQVAFPASIPITKFDASVIAPFFPPLMRGAVVVNTEKDKNLDVQPVPGSGSALVRLLQEGTCKLDEIGSYSEEKLQHLLRQCGIPFGAEDSKDQLCFSLLALYESVQNGARAIRPPRHFTGGKIYKVCPHQVVCGSKYLVRGESARDHVDLLASSRHWPPVYVVDMATSVALCADLCYPELTNQMWGRNQGCFSSPTEPPVSVSCPELLDQHYTVDMTETEHSIQHPVTKTATRRIVHAGLQPNPGDPSAGHHSLALCPELAPYATILASIVDSKPNGVRQRPIAFDNATHYYLYNRLMDFLTSREIVNRQIHDIVQSCQPGEVVIRDTLYRLGVAQIKTETEEEGEEEEVAAVAE

SEQ ID NO: 40628 - protein, 50 aa, Homo sapiens
MAPRKGKEKKEEQVISLGPQVAEGENVFGVCHIFASFNDTFVHVTDLSGK

SEQ ID NO: 40629 - protein, 21 aa, Homo sapiens
MQHPRACPVSSGLLPCTPRRP

SEQ ID NO: 40630 - protein, 506 aa, Homo sapiens
MTDAERVDQAYRENGFNIYVSDKISLNRSLPDIRHPNCNSKRYLETLPNTSIIIPFHNEGWSSLLRTVHSVLNRSPPELVAEIVLVDDFSDREHLKKPLEDYMALFPSVRILRTKKREGLIRTRMLGASVATGDVITFLDSHCEANVNWLPPLLDRIARNRKTIVCPMIDVIDHDDFRYETQAGDAMRGAFDWEMYYKRIPIPPELQKADPSDPFESPVMAGGLFAVDRKWFWELGGYDPGLEIWGGEQYEISFKVWMCGGRMEDIPCSRVGHIYRKYVPYKVPAGVSLARNLKRVAEVWMDEYAEYIYQRRPEYRHLSAGDVAVQKKLRSSLNCKSFKWFMTKIAWDLPKFYPPVEPPAAAWGEIRNVGTGLCADTKHGALGSPLRLEGCVRGRGEAAWNNMQVFTFTWREDIRPGDPQHTKKFCFDAISHTSPVTLYDCHSMKGNQLWKYRKDKTLYHPVSGSCMDCSESDHRIFMNTCNPSSLTQQWLFEHTNSTVLEKFNRN

SEQ ID NO: 40631 - protein, 269 aa, Homo sapiens
MTDAERVDQAYRENGFNIYVSDKISLNRSLPDIRHPNCNSKRYLETLPNTSIIIPFHNEGWSSLLRTVHSVLNRSPPELVAEIVLVDDFSDREHLKKPLEDYMALFPSVRILRTKKREGLIRTRMLGASVATGDVITFLDSHCEANVNWLPPLLDRIARNRKTIVCPMIDVIDHDDFRYETQAGDAMRGAFDWEMYYKRIPIPPELQKADPSDPFESPVMAGGLFAVDRKWFWELGGYDPGLEIWGGEQYEISFKVSQLSRRPVLGTAS

SEQ ID NO: 40632 - protein, 2529 aa, Homo sapiens
MDPEQPVTEDESIEEIFEETQTNATCNYETKSENGVKVAMGSEQDSTPESRHGAVKSPFLPLAPQTETQKNKQRNEVDGSNEKAALLPAPFSLGDTNITIEEQLNSINLSFQDDPDSSTSTLGNMLELPGTSSSSTSQELPFCQPKKKSTPLKYEVGDLIWAKFKRRPWWPCRICSDPLINTHSKMKVSNRRPYRQYYVEAFGDPSERAWVAGKAIVMFEGRHQFEELPVLRRRGKQKEKGYRHKVPQKILSKWEASVGLAEQYDVPKGSKNRKCIPGSIKLDSEEDMPFEDCTNDPESEHDLLLNGCLKSLAFDSEHSADEKEKPCAKSRARKSSDNPKRTSVKKGHIQFEAHKDERRGKIPENLGLNFISGDISDTQASNELSRIANSLTGSNTAPGSFLFSSCGKNTAKKEFETSNGDSLLGLPEGALISKCSREKNKPQRSLVCGSKVKLCYIGAGDEEKRSDSISICTTSDDGSSDLDPIEHSSESDNSVLEIPDAFDRTENMLSMQKNEKIKYSRFAATNTRVKAKQKPLISNSHTDHLMGCTKSAEPGTETSQVNLSDLKASTLVHKPQSDFTNDALSPKFNLSSSISSENSLIKGGAANQALLHSKSKQPKFRSIKCKHKENPVMAEPPVINEECSLKCCSSDTKGSPLASISKSGKVDGLKLLNNMHEKTRDSSDIETAVVKHVLSELKELSYRSLGEDVSDSGTSKPSKPLLFSSASSQNHIPIEPDYKFSTLLMMLKDMHDSKTKEQRLMTAQNLVSYRSPGRGDCSTNSPVGVSKVLVSGGSTHNSEKKGDGTQNSANPSPSGGDSALSGELSASLPGLLSDKRDLPASGKSRSDCVTRRNCGRSKPSSKLRDAFSAQMVKNTVNRKALKTERKRKLNQLPSVTLDAVLQGDRERGGSLRGGAEDPSKEDPLQIMGHLTSEDGDHFSDVHFDSKVKQSDPGKISEKGLSFENGKGPELDSVMNSENDELNGVNQVVPKKRWQRLNQRRTKPRKRMNRFKEKENSECAFRVLLPSDPVQEGRDEFPEHRTPSASILEEPLTEQNHADCLDSAGPRLNVCDKSSASIGDMEKEPGIPSLTPQAELPEPAVRSEKKRLRKPSKWLLEYTEEYDQIFAPKKKQKKVQEQVHKVSSRCEEESLLARGRSSAQNKQVDENSLISTKEEPPVLEREAPFLEGPLAQSELGGGHAELPQLTLSVPVAPEVSPRPALESEELLVKTPGNYESKRQRKPTKKLLESNDLDPGFMPKKGDLGLSKKCYEAGHLENGITESCATSYSKDFGGGTTKIFDKPRKRKRQRHAAAKMQCKKVKNDDSSKEIPGSEGELMPHRTATSPKETVEEGVEHDPGMPASKKMQGERGGGAALKENVCQNCEKLGELLLCEAQCCGAFHLECLGLTEMPRGKFICNECRTGIHTCFVCKQSGEDVKRCLLPLCGKFYHEECVQKYPPTVMQNKGFRCSLHICITCHAANPANVSASKGRLMRCVRCPVAYHANDFCLAAGSKILASNSIICPNHFTPRRGCRNHEHVNVSWCFVCSEGGSLLCCDSCPAAFHRECLNIDIPEGNWYCNDCKAGKKPHYREIVWVKVGRYRWWPAEICHPRAVPSNIDKMRHDVGEFPVLFFGSNDYLWTHQARVFPYMEGDVSSKDKMGKGVDGTYKKALQEAAARFEELKAQKELRQLQEDRKNDKKPPPYKHIKVNRPIGRVQIFTADLSEIPRCNCKATDENPCGIDSECINRMLLYECHPTVCPAGGRCQNQCFSKRQYPEVEIFRTLQRGWGLRTKTDIKKGEFVNEYVGELIDEEECRARIRYAQEHDITNFYMLTLDKDRIIDAGPKGNYARFMNHCCQPNCETQKWSVNGDTRVGLFALSDIKAGTELTFNYNLECLGNGKTVCKCGAPNCSGFLGVRPKNQPIATEEKSKKFKKKQQGKRRTQGEITKEREDECFSCGDAGQLVSCKKPGCPKVYHADCLNLTKRPAGKWECPWHQCDICGKEAASFCEMCPSSFCKQHREGMLFISKLDGRLSCTEHDPCGPNPLEPGEIREYVPPPVPLPPGPSTHLAEQSTGMAAQAPKMSDKPPADTNQMLSLSKKALAGTCQRPLLPERPLERTDSRPQPLDKVRDLAGSGTKSQSLVSSQRPLDRPPAVAGPRPQLSDKPSPVTSPSSSPSVRSQPLERPLGTADPRLDKSIGAASPRPQSLEKTSVPTGLRLPPPDRLLITSSPKPQTSDRPTDKPHASLSQRLPPPEKVLSAVVQTLVAKEKALRPVDQNTQSKNRAALVMDLIDLTPRQKERAASPHQVTPQADEKMPVLESSSWPASKGLGHMPRAVEKGCVSDPLQTSGKAAAPSEDPWQAVKSLTQARLLSQPPAKAFLYEPTTQASGRASAGAEQTPGPLSQSPGLVKQAKQMVGGQQLPALAAKSGQSFRSLGKAPASLPTEEKKLVTTEQSPWALGKASSRAGLWPIVAGQTLAQSCWSAGSTQTLAQTCWSLGRGQDPKPEQNTLPALNQAPSSHKCAESEQK

SEQ ID NO: 40633 - protein, 448 aa, Homo sapiens
MKGGTLGGIPGEPAVDHRDVDELLEFINSTEPKVPNSARAAKRARHKLKKKEKEKAQLAAEALKQANRVSGSREPRPARERLLEWPDRELDRVNSFLSSRLQEIKNTVKDSIRASFSVCELSMDSNGFSKEGAAEPEPQSLPPSNLSGSSEQQPDINLDLSPLTLGSPQNHTLQAPGEPAPPWAEMRGPHPPWTEVRGPPPGIVPENGLVRRLNTVPNLSRVIWVKTPKPGYPSSEEPSSKEVPSCKQELPEPVSSGGKPQKGKRQGSQAKKSEASPAPRPPASLEVPSAKGQVAGPKQPGRVLELPKVGSCAEAGEGSRGSRPGPGWAGSPKTEKEKGSSWRNWPGEAKARPQEQESVQPSGPARPQSLPQGKGRSRRSRNKQEKPASSLDDVFLPKDMDGVEMDETDREVEYFKRFCLDSAKQTRQKVAVNWTNFSLKKTTPSTAQ

SEQ ID NO: 40634 - protein, 121 aa, Homo sapiens
MRTLLLVLWLATRGSALYFHIGETEKKCFIEEIPDETMVIGNYRTQLYDKQREEYQPATPGLGMFVEVKDPEDKVILARQYGSEGRFTFTSHTPGEHQICLHSNSTKFSLFAGGMLVSGPM

SEQ ID NO: 40635 - protein, 445 aa, Homo sapiens
MCIPLEASHSVEEDTHPSHYLEARSLNERDYRDRRYVDEYRNDYCEGYVPRHYHRDIESGYRIHCSKSSVRSRRSSPKRKRNRHCSSHQSRSKSHRRKRSRSIEDDEEGHLICQSGDVLRARYEIVDTLGEGAFGKVVECIDHGMDGMHVAVKIVKNVGRYREAARSEIQVLEHLNSTDPNSVFRCVQMLEWFDHHGHVCIVFELLGLSTYDFIKENSFLPFQIDHIRQMAYQICQSINFLHHNKLTHTDLKPENILFVKSDYVVKYNSKMKRDERTLKNTDIKVVDFGSATYDDEHHSTLVSTRHYRAPEVILALGWSQPCDVWSIGCILIEYYLGFTVFQTHDSKEHLAMMERILGPIPQHMIQKTRKRKYFHHNQLDWDEHSSAGRYVRRRCKPLKEFMLCHDEEHEKLFDLVRRMLEYDPTQRITLDEALQHPFFDLLKKK

SEQ ID NO: 40636 - protein, 563 aa, Homo sapiens
MLENYRNLVSLGLPFTKPKVISLLQQGEDPWEVEKDGSGVSSLGSKSSHKTTKSTQTQDSSFQGLILKRSNRNVPWDLKLEKPYIYEGRLEKKQDKKGSFQIVSATHKKIPTIERSHKNTELSQNFSPKSVLIRQQILPREKTPPKCEIQGNSLKQNSQLLNQPKITADKRYKCSLCEKTFINTSSLRKHEKNHSGEKLFKCKECSKAFSQSSALIQHQITHTGEKPYICKECGKAFTLSTSLYKHLRTHTVEKSYRCKECGKSFSRRSGLFIHQKIHAEENPCKYNPGRKASSCSTSLSGCQRIHSRKKSYLCNECGNTFKSSSSLRYHQRIHTGEKPFKCSECGRAFSQSASLIQHERIHTGEKPYRCNECGKGFTSISRLNRHRIIHTGEKFYNCNECGKALSSHSTLIIHERIHTGEKPCKCKVCGKAFRQSSALIQHQRMHTGERPYKCNECGKTFRCNSSLSNHQRIHTGEKPYRCEECGISFGQSSALIQHRRIHTGEKPFKCNTCGKTFRQSSSRIAHQRIHTGEKPYECNTCGKLFNHRSSLTNHYKIHIEEDP

SEQ ID NO: 40637 - protein, 627 aa, Homo sapiens
MADRRTPTPFAGCRLPRQRRARDASQVSAPGTRRIMEGKWLLCMLLVLGTAIVEAHDGHDDDVIDIEDDLDDVIEEVEDSKPDTTAPPSSPKVTYKAPVPTGEVYFADSFDRGTLSGWILSKAKKDDTDDEIAKYDGKWEVEEMKESKLPGDKGLVLMSRAKHHAISAKLNKPFLFDTKPLIVQYEVNFQNGIECGGAYVKLLSKTPELNLDQFHDKTPYTIMFGPDKCGEDYKLHFIFRHKNPKTGIYEEKHAKRPDADLKTYFTDKKTHLYTLILNPDNSFEILVDQSVVNSGNLLNDMTPPVNPSREIEDPEDRKPEDWDERPKIPDPEAVKPDDWDEDAPAKIPDEEATKPEGWLDDEPEYVPDPDAEKPEDWDEDMDGEWEAPQIANPRCESAPGCGVWQRPVIDNPNYKGKWKPPMIDNPSYQGIWKPRKIPNPDFFEDLEPFRMTPFSAIGLELWSMTSDIFFDNFIICADRRIVDDWANDGWGLKKAADGAAEPGVVGQMIEAAEERPWLWVVYILTVALPVFLVILFCCSGKKQTSGMEYKKTDAPQPDVKEEEEEKEEEKDKGDEEEEGEEKLEEKQKSDAEEDGGTVSQEEEDRKPKAEEDEILNRSPRNRKPRRE

SEQ ID NO: 40638 - protein, 314 aa, Homo sapiens
MDANLCQVIHMELDHERMSYLLYQMLCGIKHLHSAGIIHRDLKPSNIVVKSDCTLKILDFGLARTACTNFMMTPYVVTRYYRAPEVILGMGYKENVDIWSVGCIMGELVKGCVIFQGTDHIDQWNKVIEQLGTPSAEFMKKLQPTVRNYVENRPKYPGIKFEELFPDWIFPSESERDKIKTSQARDLLSKMLVIDPDKRISVDEALRHPYITVWYDPAEAEAPPPQIYDAQLEEREHAIEEWKELIYKEVMDWEERSKNGVVKDQPSDAAVSSNATPSQSSSINDISSMSTEQTLASDTDSSLDASTGPLEGCR

SEQ ID NO: 40639 - protein, 625 aa, Homo sapiens
MTPNPVQTLQEEAVCAICLDYFTDPVSIGCGHNFCRVCVTQLWGGEDEEDRDELDREEEEEDGEEEEVEAVGAGAGWDTPMRDEDYEGDMEEEVEEEEEGVFWTSGMSRSSWDNMDYVWEEEDEEEDLDYYLGDMEEEDLRGEDEEDEEEVLEEVEEEDLDPVTPLPPPPAPRRCFTCPQCRKSFPRRSFRPNLQLANMVQVIRQMHPTPGRGSRVTDQGICPKHQEALKLFCEVDEEAICVVCRESRSHKQHSVVPLEEVVQEYKAKLQGHVEPLRKHLEAVQKMKAKEERRVTELKSQMKSELAAVASEFGRLTRFLAEEQAGLERRLREMHEAQLGRAGAAASRLAEQAAQLSRLLAEAQERSQQGGLRLLQDIKETFNRCEEVQLQPPEVWSPDPCQPHSHDFLTDAIVRKMSRMFCQAARVDLTLDPDTAHPALMLSPDRRGVRLAERRQEVADHPKRFSADCCVLGAQGFRSGRHYWEVEVGGRRGWAVGAARESTHHKEKVGPGGSSVGSGDASSSRHHHRRRRLHLPQQPLLQREVWCVGTNGKRYQAQSSTEQTLLSPSEKPRRFGVYLDYEAGRLGFYNAETLAHVHTFSAAFLGERVFPFFRVLSKGTRIKLCP

SEQ ID NO: 40640 - protein, 235 aa, Homo sapiens
MEPCASGISQRKGTTTRRFVGHTKDVLSVAFSSDNRQIVSGSRDKTIKLWNTLGVCKYTVQDESHSEWVSCVRFSPNSSNPIIVSCGWDKLVKVWNLANCKLKTNHIGHTGYLNTVTVSPDGSLCASGGKDGQAMLWDLNEGKHLYTLDGGDIINALCFSPNRYWLCAATGPSIKIWDLEGKIIVDELKQEVISTSSKAEPPQCTSLAWSADGQTLFAGYTDNLVRVWQVTIGTR

SEQ ID NO: 40641 - protein, 223 aa, Homo sapiens
MLGSGETDFGPQLKNLNKKLFTVVAWDPRGYGHSRPPDRDFPADFFERDAKDAVDLMKALKFKKVSLLGWSDGGITALIAAAKYPSYIHKMVIWGANAYVTDEDSMIYEGIRDVSKWSERTRKPLEALYGYDYFARTCEKWVDGIRQFKHLPDGNICRHLLPRVQCPALIVHGEKDPLVPRFHADFIHKHVKGSRLHLMPEGKHNLHLRFADEFNKLAEDFLQ

SEQ ID NO: 40642 - protein, 546 aa, Homo sapiens
MGNWTSLPTTPFATAPWEAAGNRSNSSGADGGDTPPLPSPPDKGDNASNCDCRAWDYGIRAGLVQNVVSKWDLVCDNAWKVHIAKFSLLVGLIFGYLITGCIADWVGRRPVLLFSIIFILIFGLTVALSVNVTMFSTLRFFEGFCLAGIILTLYALRIELCPPGKRFMITMVASFVAMAGQFLMPGLAALCRDWQVLQALIICPFLLMLLYWSIFPESLRWLMATQQFESAKRLILHFTQKNRMNPEGDIKGVIPELEKELSRRPKKVCIVKVVGTRNLWKNIVVLCVNSLTGYGIHHCFARSMMGHEVKVPLLENFYADYYTTASIALVSCLAMCVVVRFLGRRGGLLLFMILTALASLLQLGLLNLIGKYSQHPDSELQLKLAVGMSDSVKDKFSIAFSIVGMFASHAVGSLSVFFCAEITPTVIRCGGLGLVLASAGFGMLTAPIIELHNQKGYFLHHIIFACCTLICIICILLLPESRDQNLPENISNGEHYTRQPLLPHKKGEQPLLLTNAELKDYSGLHDAAAAGDTLPEGATANGMKAM

SEQ ID NO: 40643 - protein, 79 aa, Homo sapiens
MKVWGLAAACFLLQHHGMPAQFTLPPAPRDETSPADAVCPGLGRDLCGSSRCCLRPPSQPDWKEPSGAALRARPAPRGR

SEQ ID NO: 40644 - protein, 582 aa, Homo sapiens
MASSLAFLLLNFHVSLFLVQLLTPCSAQFSVLGPSGPILAMVGEDADLPCHLFPTMSAETMELRWVSSSLRQVVNVYADGKEVEDRQSAPYRGRTSILRDGITAGKAALRIHNVTASDSGKYLCYFQDGDFYEKALVELKVAALGSDLHIEVKGYEDGGIHLECRSTGWYPQPQIKWSDTKGENIPAVEAPVVADGVGLYAVAASVIMRGSSGGGVSCIIRNSLLGLEKTASISIADPFFRSAQPWIAALAGTLPISLLLLAGASYFLWRQQKEKIALSRETEREREMKEMGYAATEQEISLREKLQEELKWRKIQYMARGEKSLAYHEWKMALFKPADVILDPDTANAILLVSEDQRSVQRAEEPRDLPDNPERFEWRYCVLGCENFTSGRHYWEVEVGDRKEWHIGVCSKNVERKKGWVKMTPENGYWTMGLTDGNKYRALTEPRTNLKLPEPPRKVGIFLDYETGEISFYNATDGSHIYTFPHASFSEPLYPVFRILTLEPTALTICPIPKEVESSPDPDLVPDHSLETPLTPGLANESGEPQAEVTSLLLPAHPGAEVSPSATTNQNHKLQARTEALY

SEQ ID NO: 40645 - protein, 87 aa, Homo sapiens
MEREKIVWEFEQLYHSLKEHEYRLLARLEELDLAIYNSINGAITQFSCNISHLSSLIAQLEEKQQQPTRELLQDIGDTLSRYSFLFP

SEQ ID NO: 40646 - protein, 36 aa, Homo sapiens
MPVRPRRPAPWPPGVWPSACSRRPPAPCACSTSQSP

SEQ ID NO: 40647 - protein, 363 aa, Homo sapiens
MAPRALLLLLSGGLALTETWACSHSMRYFDTAVSRPGRGEPRFISVGYVDDTQFVRFDSDAASPRGEPRAPWVEQEGPEYWDRETQKYKRQAQADRVSLRNLRGYYNQSEDGSHTLQRMSGCDLGPDGRLLRGYDQSAYDGKDYIALNEDLRSWTAADTAAQITQRKLEAARAAEQLRAYLEGTCVEWLRRYLENGKETLQRAEPPKTHVTHHPLSDHEATLRCWALGFYPAEITLTWQRDGEDQTQDTELVETRPAGDGTFQKWAAVVVPSGQEQRYTCHMQHEGLQEPLTLSWEPSSQPTIPIMGIVAGLAVLVVLAVLGAVVTAMMCRRKSSGGKGGSCSQAACSNSAQGSDESLITCKA

SEQ ID NO: 40648 - protein, 113 aa, Homo sapiens
MAPRALLLLLSGGLALTETWACSHSMRYFDTAVSRPGRGEPRFISVGYVDDTQFVRFDSDAASPRGEPRAPWVEQEGPEYWDRETQKYKRQAQADRVSLRNLRGYYNQSEDGE

SEQ ID NO: 40649 - protein, 290 aa, Homo sapiens
MAENDVDNELLDYEDDEVETAAGGDGAEAPAKKDVKGSYVSIHSSGFRDFLLKPELLRAIVDCGFEHPSEVQHECIPQAILGMDVLCQAKSGMGKTAVFVLATLQQLEPVTGQVSVLVMCHTRELAFQISKEYERFSKYMPNVKVAVFFGGLSIKKDEEVLKKNCPHIVVGTPGRILALARNKSLNLKHIKHFILDECDKMLEQLDMRRDVQEIFRMTPHEKQVMMFSATLSKEIRPVCRKFMQDVNTLLPSLPPLPARCLLPFLALFLRLPCHSSAKKAACAQLGVMTP

SEQ ID NO: 40650 - protein, 1863 aa, Homo sapiens
MRLVEPVGRPSILKEDNLKEFDQLDQENDDGWAGAHEEVDYTEKLKFSDEEDGRDSDEEGAEGHRDSQSASGEERPPEADGKKGNSPNSEPPTPKTAWAETSRPPETEPGPPAPKPPLPPPHRGPAGNWGPPGDYPDRGGPPCKPPAPEDEDEAWRQRRKQSSSEISLAVERARRRREEEERRMQEERRAACAEKLKRLDEKFGAPDKRLKAEPAAPPAAPSTPAPPPAVPKELPAPPAPPPASAPTPETEPEEPAQAPPAQSTPTPGVAAAPTLVSGGGSTSSTSSGSFEASPVEPQLPSKEGPEPPEEVPPPTTPPVPKVEPKGDGIGPTRQPPSQGLGYPKYQKSLPPRFQRQQQEQLLKQQQQHQWQQHQQGSAPPTPVPPSPPQPVTLGAVPAPQAPPPPPKALYPGALGRPPPMPPMNFDPRWMMIPPYVDPRLLQGRPPLDFYPPGVHPSGLVPRERSDSGGSSSEPFDRHAPAMLRERGTPPVDPKLAWVGDVFTATPAEPRPLTSPLRQAADEDDKGMRSETPPVPPPPPYLASYPGFPENGAPGPPISRFPLEEPGPRPLPWPPGSDEVAKIQTPPPKKEPPKEETAQLTGPEAGRKPARGVGSGGQGPPPPRRESRTETRWGPRPGSSRRGIPPEEPGAPPRRAGPIKKPPPPTKVEELPPKPLEQGDETPKPPKPDPLKITKGKLGGPKETPPNGNLSPAPRLRRDYSYERVGPTSCRGRGRGEYFARGRGFRGTYGGRGRGARSREFRSYREFRGDDGRGGGTGGPNHPPAPRGRTASETRSEGSEYEEIPKRRRQRGSETGSETHESDLAPSDKEAPTPKEGTLTQVPLAPPPPGAPPSPAPARFTARGGRVFTPRGVPSRRGRGGGRPPPQVCPGWSPPAKSLAPKKPPTGPLPPSKEPLKEKLIPGPLSPVARGGSNGGSNVGMEDGERPRRRRHGRAQQQDKPPRFRRLKQERENAARGSEGKPSLTLPASAPGPEEALTTVTVAPAPRRAAAKSPDLSNQNSDQANEEWETASESSDFTSERRGDKEAPPPVLLTPKAVGTPGGGGGGAVPGISAMSRGDLSQRAKDLSKRSFSSQRPGMERQNRRPGPGGKAGSSGSSSGGGGGGPGGRTGPGRGDKRSWPSPKNRSRPPEERPPGLPLPPPPPSSSAVFRLDQVIHSNPAGIQQALAQLSSRQGSVTAPGGHPRHKPGLPQAPQGPSPRPPTRYEPQRVNSGLSSDPHFEEPGPMVRGVGGTPRDSAGVSPFPPKRRERPPRKPELLQEESLPPPHSSGFLGSKPEGPGPQAESRDTGTEALTPHIWNRLHTATSRKSYRPSSMEPWMEPLSPFEDVAGTEMSQSDSGVDLSGDSQVSSGPCSQRSSPDGGLKGAAEGPPKRPGGSSPLNAVPCEGPPGSEPPRRPPPAPHDGDRKELPREQPLPPGPIGTERSQRTDRGTEPGPIRPSHRPGPPVQFGTSDKDSDLRLVVGDSLKAEKELTASVTEAIPVSRDWELLPSAAASAEPQSKNLDSGHCVPEPSSSGQRLYPEVFYGSAGPSSSQISGGAMDSQLHPNSGGFRPGTPSLHPYRSQPLYLPPGPAPPSALLSGLALKGQFLDFSTMQATELGKLPAGGVLYPPPSFLYSPAFCPSPLPDTSLLQVRQDLPSPSDFYSTPLQPGGQSGFLPSGAPAQQMLLPMVDSQLPVVNFGSLPPAPPPAPPPLSLLPVGPALQPPSLAVRPPPAPATRVLPSPARPFPASLGRAELHPVELKPFQDYQKLSSNLGGPGSSRTPPTGRSFSGLNSRLKATPSTYSGVFRTQRVDLYQQASPPDALRWIPKPWERTGPPPREGPSRRAEEPGSRGDKEPGLPPPR

SEQ ID NO: 40651 - protein, 265 aa, Homo sapiens
MQLFPRGLFEDALPPIVLRSQVYSLVPDRTVADRQLVRGVGATAGSPFPNSWNSLSLSHSASRSASIRPFRRGHCARHWGATETLLKVPQKELQEQGEIRIVQLGFDLDAHGIIFTEDYRTRVLKACDGRPYAGAVQKFLASVLPACGDLSFQQDQMTQTFGFRDSEITHLVNAGVLTVRDAGSWWLAVPGAGRFIKYFVKGRQAVLSMVRKAKYRELLLSELLGRRAPVVVRLGLTYHVHDLIGAQLVDCISTTSGTLLRLPET

SEQ ID NO: 40652 - protein, 348 aa, Homo sapiens [sequence omitted]

SEQ ID NO: 40653 - protein, 717 aa, Homo sapiens
MAAAARELVLRAGTSDMEEEEGPLAGGPGLQEPLQLGELDITSDEFILDEVDVHIQANLEDELVKEALKTGVDLRHYSKQVELELQQIEQKSIRDYIQESENIASLHNQITACDAVLERMEQMLGAFQSDLSSISSEIRTLQEQSGAMNIRLRNRQAVRGKLGELVDGLVVPSALVTAILEAPVTEPRFLEQLQELDAKAAAVREQEARGTAACADVRGVLDRLRVKAVTKIREFILQKIYSFRKPMTNYQIPQTALLKYRFFYQFLLGNERATAKEIRDEYVETLSKIYLSYYRSYLGRLMKVQYEEVAEKDDLMGVEDTAKKGFFSKPSLRSRNTIFTLGTRGSVISPTELEAPILVPHTAQRGEQRYPFEALFRSQHYALLDNSCREYLFICEFFVVSGPAAHDLFHAVMGRTLSMTLKHLDSYLADCYDAIAVFLCIHIVLRFRNIAAKRDVPALDRYWEQVLALLWPRFELILEMNVQSVRSTDPQRLGGLDTRPHYITRRYAEFSSALVSINQTIPNERTMQLLGQLQVEVENFVLRVAAEFSSRKEQLVFLINNYDMMLGVLMERAADDSKEVESFQQLLNARTQEFIEELLSPPFGGLVAFVKEAEALIERGQAERLRGEEARVTQLIRGFGSSWKSSVESLSQDVMRSFTNFRNGTSIIQGALTQLIQLYHRFHRVLSQPQLRALPARAELINIHHLMVELKKHKPNF

SEQ ID NO: 40654 - protein, 2668 aa, Homo sapiens
MSSFLHIGDIVSLYAEGSVNGFISTLGLVDDRCVVEPAAGDLDNPPKKFRDCLFKVCPMNRYSAQKQYWKAKQTKQDKEKIADVVLLQKLQHAAQMEQKQNDTENKKVHGDVVKYGSVIQLLHMKSNKYLTVNKRLPALLEKNAMRVTLDATGNEGSWLFIQPFWKLRSNGDNVVVGDKVILNPVNAGQPLHASNYELSDNAGCKEVNSVNCNTSWKINLFMQFRDHLEEVLKGGDVVRLFHAEQEKFLTCDEYKGKLQVFLRTTLRQSATSATSSNALWEVEVVHHDPCRGGAGHWNGLYRFKHLATGNYLAAEENPSYKGDASDPKAAGMGAQGRTGRRNAGEKIKYCLVAVPHGNDIASLFELDPTTLQKTDSFVPRNSYVRLRHLCTNTWIQSTNVPIDIEEERPIRLMLGTCPTKEDKEAFAIVSVPVSEIRDLDFANDASSMLASAVEKLNEGFISQNDRRFVIQLLEDLVFFVSDVPNNGQNVLDIMVTKPNRERQKLMREQNILKQVFGILKAPFREKGGEGPLVRLEELSDQKNAPYQHMFRLCYRVLRHSQEDYRKNQEHIAKQFGMMQSQIGYDILAEDTITALLHNNRKLLEKHITKTEVETFVSLVRKNREPRFLDYLSDLCVSNHIAIPVTQELICKCVLDPKNSDILIRTELRPVKEMAQSHEYLSIEYSEEEVWLTWTDKNNEHHEKSVRQLAQEARAGNAHDENVLSYYRYQLKLFARMCLDRQYLAIDEISQQLGVDLIFLCMADEMLPFDLRASFCHLMLHVHVDRDPQELVTPVKFARLWTEIPTAITIKDYDSNLNASRDDKKNKFANTMEFVEDYLNNVVSEAVPFANEEKNKLTFEVVSLAHNLIYFGFYSFSELLRLTRTLLGIIDCVQGPPAMLQAYEDPGGKNVRRSIQGVGHMMSTMVLSRKQSVFSAPSLSAGASAAEPLDRSKFEENEDIVVMETKLKILEILQFILNVRLDYRISYLLSVFKKEFVEVFPMQDSGADGTAPAFDSTTANMNLDRIGEQAEAMFGVGKTSSMLEVDDEGGRMFLRVLIHLTMHDYAPLVSGALQLLFKHFSQRQEAMHTFKQVQLLISAQDVENYKVIKSELDRLRTMVEKSELWVDKKGSGKGEEVEAGAAKDKKERPTDEEGFLHPPGEKSSENYQIVKGILERLNKMCGVGEQMRKKQQRLLKNMDAHKVMLDLLQIPYDKGDAKMMEILRYTHQFLQKFCAGNPGNQALLHKHLHLFLTPGLLEAETMQHIFLNNYQLCSEISEPVLQHFVHLLATHGRHVQYLDFLHTVIKAEGKYVKKCQDMIMTELTNAGDDVVVFYNDKASLAHLLDMMKAARDGVEDHSPLMYHISLVDLLAACAEGKNVYTEIKCTSLLPLEDVVSVVTHEDCITEVKMAYVNFVNHCYVDTEVEMKEIYTSNHIWTLFENFTLDMARVCSKREKRVADPTLEKYVLSVVLDTINAFFSSPFSENSTSLQTHQTIVVQLLQSTTRLLECPWLQQQHKGSVEACIRTLAMVAKGRAILLPMDLDAHISSMLSSGASCAAAAQRNASSYKATTRAFPRVTPTANQWDYKNIIEKLQDIITALEERLKPLVQAELSVLVDVLHWPELLFLEGSEAYQRCESGGFLSKLIQHTKDLMESEEKLCIKVLRTLQQMLLKKTKYGDRGNQLRKMLLQNYLQNRKSTSRGDLPDPIGTGLDPDWSAIAATQCRLDKEGATKLVCDLITSTKNEKIFQESIGLAIHLLDGGNTEIQKSFHNLMMSDKKSERFFKVLHDRMKRAQQETKSTVAVNMNDLGSQPHEDREPVDPTTKGRVASFSIPGSSSRYSLGPSLRRGHEVSERVQSSEMGTSVLIMQPILRFLQLLCENHNRDLQNFLRCQNNKTNYNLVCETLQFLDIMCGSTTGGLGLLGLYINEDNVGLVIQTLETLTEYCQGPCHENQTCIVTHESNGIDIITALILNDISPLCKYRMDLVLQLKDNASKLLLALMESRHDSENAERILISLRPQELVDVIKKAYLQEEERENSEVSPREVGHNIYILALQLSRHNKQLQHLLKPVKRIQEEEAEGISSMLSLNNKQLSQMLKSSAPAQEEEEDPLAYYENHTSQIEIVRQDRSMEQIVFPVPGICQFLTEETKHRLFTTTEQDEQGSKVSDFFDQSSFLHNEMEWQRKLRSMPLIYWFSRRMTLWGSISFNLAVFINIIIAFFYPYMEGASTGVLDSPLISLLFWILICFSIAALFTKRYSIRPLIVALILRSIYYLGIGPTLNILGALNLTNKIVFVVSFVGNRGTFIRGYKAMVMDMEFLYHVGYILTSVLGLFAHELFYSILLFDLIYREETLFNVIKSVTRNGRSILLTALLALILVYLFSIVGFLFLKDDFILEVDRLPNNHSTASPLGMPHGAAAFVDTCSGDKMDCVSGLSVPEVLEEDRELDSTERACDTLLMCIVTVMNHGLRNGGGVGDILRKPSKDESLFPARVVYDLLFFFIVIIIVLNLIFGVIIDTFADLRSEKQKKEEILKTTCFICGLERDKFDNKTVSFEEHIKLEHNMWNYLYFIVLVRVKNKTDYTGPESYVAQMIKNKNLDWFPRMRAMSLVSNEGEGEQNEIRILQDKLNSTMKLVSHLTAQLNELKEQMTEQRKRRQRLGFVDVQNCISR

SEQ ID NO: 40655 - protein, 295 aa, Homo sapiens [sequence omitted]

SEQ ID NO: 40656 - protein, 41 aa, Homo sapiens
MGAEGPDKPSVVSGLNSGPGHVWGPLLGLLLLPPLVLAGIF

SEQ ID NO: 40657 - protein, 354 aa, Homo sapiens
MAGAGAGAGARGGAAAGVEARARDPPPAHRAHPRHPRPAAQPSARRMDGGSGGLGSGDNAPTTEALFVALGAGVTALSHPLLYVKLLIQVGHEPMPPTLGTNVLGRKVLYLPSFFTYAKYIVQVDGKIGLFRGLSPRLMSNALSTVTRGSMKKVFPPDEIEQVSNKDDMKTSLKKVVKETSYEMMMQCVSRMLAHPLHVISMRCMVQFVGREAKYSGVLSSIGKIFKEEGLLGFFVGLIPHLLGDVVFLWGCNLLAHFINAYLVDDSFSQALAIRSYTKFVMGIAVSMLTYPFLLVGDLMAVNNCGLQAGLPPYSPVFKSWIHCWKYLSVQGQLFRGSSLLFRRVSSGSCFALE

SEQ ID NO: 40658 - protein, 371 aa, Homo sapiens
MAGAGAGAGARGGAAAGVEARARDPPPAHRAHPRHPRPAAQPSARRMDGGSGGLGSGDNAPTTEALFVALGAGVTALSHPLLYVKLLIQVGHEPMPPTLGTNVLGRKVLYLPSFFTYAKYIVQVDGKIGLFRGLSPRLMSNALSTVTRGSMKKVFPPDEIEQVSNKDDMKTSLKKVVKETSYEMMMQCVSRMLAHPLHVISMRCMVQFVGREAKYSGVLSSIGKIFKEEGLLGFFVGLIPHLLGDVVFLWGCNLLAHFINAYLVDDSVSDTPGGLGNDQNPGSQFSQALAIRSYTKFVMGIAVSMLTYPFLLVGDLMAVNNCGLQAGLPPYSPVFKSWIHCWKYLSVQGQLFRGSSLLFRRVSSGSCFALE

SEQ ID NO: 40659 - protein, 246 aa, Homo sapiens
MAEQEQRKIPLVPENLLKKRKAYQALKATQAKQALLAKKEQKKGKGLRFKRLESFLHDSWRQKRDKVRLRRLEVKPHALELPDKHSLAFVVRIERIDGVSLLVQRTIARLRLKKIFSGVFVKVTPQNLKMLRIVEPYVTWGFPNLKSVRELILKRGQAKVKNKTIPLTDNTVIEEHLGKFGVICLEDLIHEIAFPGKHFQEISWFLCPFHLSVARHATKNRVGFLKEMGTPGYRGERINQLIRQLN

SEQ ID NO: 40660 - protein, 733 aa, Homo sapiens
MGAARGSPARPRRLPLLSVLLLPLLGGTQTAIVFIKQPSSQDALQGRRALLRCEVEAPGPVHVYWLLDGAPVQDTERRFAQGSSLSFAAVDRLQDSGTFQCVARDDVTGEEARSANASFNIKWIEAGPVVLKHPASEAEIQPQTQVTLRCHIDGHPRPTYQWFRDGTPLSDGQSNHTVSSKERNLTLRPAGPEHSGLYSCCAHSAFGQACSSQNFTLSIADESFARVVLAPQDVVVARYEEAMFHCQFSAQPPPSLQWLFEDETPITNRSRPPHLRRATVFANGSLLLTQVRPRNAGIYRCIGQGQRGPPIILEATLHLAEIEDMPLFEPRVFTAGSEERVTCLPPKGLPEPSVWWEHAGVRLPTHGRVYQKGHELVLANIAESDAGVYTCHAANLAGQRRQDVNITVATVPSWLKKPQDSQLEEGKPGYLDCLTQATPKPTVVWYRNQMLISEDSRFEVFKNGTLRINSVEVYDGTWYRCMSSTPAGSIEAQARVQVLEKLKFTPPPQPQQCMEFDKEATVPCSATGREKPTIKWERADGSSLPEWVTDNAGTLHFARVTRDDAGNYTCIASNGPQGQIRAHVQLTVAVFITFKVEPERTTVYQGHTALLQCEAQGDPKPLIQWKGKDRILDPTKLGPRMHIFQNGSLVIHDVAPEDSGRYTCIAGNSCNIKHTEAPLYVVGMGWGGLCCTGSGGPRRLSPCTQPLCTEHGTEAIFVAAVGIRPSHHAAAQS

SEQ ID NO: 40661 - protein, 315 aa, Homo sapiens
MENMDDTSGSSFEDMGELHQRLREEEVDADAADAAAAEEEDGEFLGMKGFKGQLSRQVADQMWQAGKRQASRAFSLYANIDILRPYFDVEPAQVRSRLLESMIPIKMVNFPQKIAGELYGPLMLVFTLVAILLHGMKTSDTIIREGTLMGTAIGTCFGYWLGVSSFIYFLAYLCNAQITMLQMLALLGYGLFGHCIVLFITYNIHLHALFYLFWLLVGGLSTLRMVAVLVSRTVGPTQRLLLCGTLAALHMLFLLYLHFAYHKVVEGILDTLEGPNIPPIQRVPRDIPAMLPAARLPTTVLNATAKAVAVTLQSH

SEQ ID NO: 40662 - protein, 23 aa, Homo sapiens
MAAVRRARSYCRCLVRFSDRELC

SEQ ID NO: 40663 - protein, 7412 aa, Homo sapiens
MKVRKHVNDLYEDLRDGHNLISLLEVLSGDTLPREKGRMRFHRLQNVQIALDYLKRRQVKLVNIRNDDITDGNPKLTLGLIWTIILHFQISDIHVTGESEDMSAKERLLLWTQQATEGYAGIRCENFTTCWRDGKLFNAIIHKYRPDLIDMNTVAVQSNLANLEHAFYVAEKIGVIRLLDPEDVDVSSPDEKSVITYVSSLYDAFPKVPEGGEGIGANDVEVKWIEYQNMVNYLIQWIRHHVTTMSERTFPNNPVELKALYNQYLQFKETEIPPKETEKSKIKRLYKLLEIWIEFGRIKLLQGYHPNDIEKEWGKLIIAMLEREKALRPEVERLEMLQQIANRVQRDSVICEDKLILAGNALQSDSKRLESGVQFQNEAEIAGYILECENLLRQHVIDVQILIDGKYYQADQLVQRVAKLRDEIMALRNECSSVYSKGRILTTEQTKLMISGITQSLNSGFAQTLHPSLTSGLTQSLTPSLTSSSMTSGLSSGMTSRLTPSVTPAYTPGFPSGLVPNFSSGVEPNSLQTLKLMQIRKPLLKSSLLDQNLTEEEINMKFVQDLLNWVDEMQVQLDRTEWGSDLPSVESHLENHKNVHRAIEEFESSLKEAKISEIQMTAPLKLTYAEKLHRLESQYAKLLNTSRNQERHLDTLHNFVSRATNELIWLNEKEEEEVAYDWSERNTNIARKKDYHAELMRELDQKEENIKSVQEIAEQLLLENHPARLTIEAYRAAMQTQWSWILQLCQCVEQHIKENTAYFEFFNDAKEATDYLRNLKDAIQRKYSCDRSSSIHKLEDLVQESMEEKEELLQYKSTIANLMGKAKTIIQLKPRNSDCPLKTSIPIKAICDYRQIEITIYKDDECVLANNSHRAKWKVISPTGNEAMVPSVCFTVPPPNKEAVDLANRIEQQYQNVLTLWHESHINMKSVVSWHYLINEIDRIRASNVASIKTMLPGEHQQVLSNLQSRFEDFLEDSQESQVFSGSDITQLEKEVNVCKQYYQELLKSAEREEQEESVYNLYISEVRNIRLRLENCEDRLIRQIRTPLERDDLHESVFRITEQEKLKKELERLKDDLGTITNKCEEFFSQAAASSSVPTLRSELNVVLQNMNQVYSMSSTYIDKLKTVNLVLKNTQAAEALVKLYETKLCEEEAVIADKNNIENLISTLKQWRSEVDEKRQVFHALEDELQKAKAISDEMFKTYKERDLDFDWHKEKADQLVERWQNVHVQIDNRLRDLEGIGKSLKYYRDTYHPLDDWIQQVETTQRKIQENQPENSKTLATQLNQQKMLVSEIEMKQSKMDECQKYAEQYSATVKDYELQTMTYRAMVDSQQKSPVKRRRMQSSADLIIQEFMDLRTRYTALVTLMTQYIKFAGDSLKRLEEEEKSLEEEKKEHVEKAKELQKWVSNISKTLKDAEKAGKPPFSKQKISSEEISTKKEQLSEALQTIQLFLAKHGDKMTDEERNELEKQVKTLQESYNLLFSESLKQLQESQTSGDVKVEEKLDKVIAGTIDQTTGEVLSVFQAVLRGLIDYDTGIRLLETQLMISGLISPELRKCFDLKDAKSHGLIDEQILCQLKELSKAKEIISAASPTTIPVLDALAQSMITESMAIKVLEILLSTGSLVIPATGEQLTLQKAFQQNLVSSALFSKVLERQNMCKDLIDPCTSEKVSLIDMVQRSTLQENTGMWLLPVRPQEGGRITLKCGRNISILRAAHEGLIDRETMFRLLSAQLLSGGLINSNSGQRMTVEEAVREGVIDRDTASSILTYQVQTGGIIQSNPAKRLTVDEAVQCDLITSSSALLVLEAQRGYVGLIWPHSGEIFPTSSSLQQELITNELAYKILNGRQKIAALYIPESSQVIGLDAAKQLGIIDNNTASILKNITLPDKMPDLGDLEACKNARRWLSFCKFQPSTVHDYRQEEDVFDGEEPVTTQTSEETKKLFLSYLMINSYMDANTGQRLLLYDGDLDEAVGMLLEGCHAEFDGNTAIKECLDVLSSSGVFLNNASGREKDECTATPSSFNKCHCGEPEHEETPENRKCAIDEEFNEMRNTVINSEFSQSGKLASTISIDPKVNSSPSVCVPSLISYLTQTELADISMLRSDSENILTNYENQSRVETNERANECSHSKNIQNFPSDLIENPIMKSKMSKFCGVNETENEDNTNRDSPIFDYSPRLSALLSHDKLMHSQGSFNDTHTPESNGNKCEAPALSFSDKTMLSGQRIGEKFQDQFLGIAAINISLPGEQYGQKSLNMISSNPQVQYHNDKYISNTSGEDEKTHPGFQQMPEDKEDESEIEEYSCAVTPGGDTDNAIVSLTCATPLLDETISASDYETSLLNDQQNNTGTDTDSDDDFYDTPLFEDDDHDSLLLDGDDRDCLHPEDYDTLQEENDETASPADVFYDVSKENENSMVPQGAPVGSLSVKNKAHCLQDFLMDVEKDELDSGEKIHLNPVGSDKVNGQSLETGSERECTNILEGDESDSLTDYDIVGGKESFTASLKFDDSGSWRGRKEEYVTGQEFHSDTDHLDSMQSEESYGDYIYDSNDQDDDDDDGIDEEGGGIRDENGKPRCQNVAEDMDIQLCASILNENSDENENINTMILLDKMHSCSSLEKQQRVNVVQLASPSENNLVTEKSNLPEYTTEIAGKSKENLLNHEMVLKDVLPPIIKDTESEKTFGPASISHDNNNISSTSELGTDLANTKVKLIQGSELPELTDSVKGKDEYFKNMTPKVDSSLDHIICTEPDLIGKPAEESHLSLIASVTDKDPQGNGSDLIKGRDGKSDILIEDETSIQKMYLGEGEVLVEGLVEEENRHLKLLPGKNTRDSFKLINSQFPFPQITNNEELNQKGSLKKATVTLKDEPNNLQIIVSKSPVQFENLEEIFDTSVSKEISDDITSDITSWEGNTHFEESFTDGPEKELDLFTYLKHCAKNIKAKDVAKPNEDVPSHVLITAPPMKEHLQLGVNNTKEKSTSTQKDSPLNDMIQSNDLCSKESISGGGTEISQFTPESIEATLSILSRKHVEDVGKNDFLQSERCANGLGNDNSSNTLNTDYSFLEINNKKERIEQQLPKEQALSPRSQEKEVQIPELSQVFVEDVKDILKSRLKEGHMNPQEVEEPSACADTKILIQNLIKRITTSQLVNEASTVPSDSQMSDSSGVSPMTNSSELKPESRDDPFCIGNLKSELLLNILKQDQHSQKITGVFELMRELTHMEYDLEKRGITSKVLPLQLENIFYKLLADGYSEKIEHVGDFNQKACSTSEMMEEKPHILGDIKSKEGNYYSPNLETVKEIGLESSTVWASTLPRDEKLKDLCNDFPSHLECTSGSKEMASGDSSTEQFSSELQQCLQHTEKMHEYLTLLQDMKPPLDNQESLDNNLEALKNQLRQLETFELGLAPIAVILRKDMKLAEEFLKSLPSDFPRGHVEELSISHQSLKTAFSSLSNVSSERTKQIMLAIDSEMSKLAVSHEEFLHKLKSFSDWVSEKSKSVKDIEIVNVQDSEYVKKRLEFLKNVLKDLGHTKMQLETTAFDVQFFISEYAQDLSPNQSKQLLRLLNTTQKCFLDVQESVTTQVERLETQLHLEQDLDDQKIVAERQQEYKEKLQGICDLLTQTENRLIGHQEAFMIGDGTVELKKYQSKQEELQKDMQGSAQALAEVVKNTENFLKENGEKLSQEDKALIEQKLNEAKIKCEQLNLKAEQSKKELDKVVTTAIKEETEKVAAVKQLEESKTKIENLLDWLSNVDKDSERAGTKHKQVIEQNGTHFQEGDGKSAIGEEDEVNGNLLETDVDGQVGTTQENLNQQYQKVKAQHEKIISQHQAVIIATQSAQVLLEKQGQYLSPEEKEKLQKNMKELKVHYETALAESEKKMKLTHSLQEELEKFDADYTEFEHWLQQSEQELENLEAGADDINGLMTKLKRQKSFSEDVISHKGDLRYITISGNRVLEAAKSCSKRDGGKVDTSATHREVQRKLDHATDRFRSLYSKCNVLGNNLKDLVDKYQHYEDASCGLLAGLQACEATASKHLSEPIAVDPKNLQRQLEETKALQGQISSQQVAVEKLKKTAEVLLDARGSLLPAKNDIQKTLDDIVGRYEDLSKSVNERNEKLQITLTRSLSVQDGLDEMLDWMGNVESSLKEQGQVPLNSTALQDIISKNIMLEQDIAGRQSSINAMNEKVKKFMETTDPSTASSLQAKMKDLSARFSEASHKHKETLAKMEELKTKVELFENLSEKLQTFLETKTQALTEVDVPGKDVTELSQYMQESTSEFLEHKKHLEVLHSLLKEISSHGLPSDKALVLEKTNNLSKKFKEMEDTIKEKKEAVTSCQEQLDAFQVLVKSLKSWIKETTKKVPIVQPSFGAEDLGKSLEDTKKLQEKWSLKTPEIQKVNNSGISLCNLISAVTTPAKAIAAVKSGGAVLNGEGTATNTEEFWANKGLTSIKKDMTDISHGYEDLGLLLKDKIAELNTKLSKLQKAQEESSAMMQWLQKMNKTATKWQQTPAPTDTEAVKTQVEQNKSFEAELKQNVNKVQELKDKLTELLEENPDTPEAPRWKQMLTEIDSKWQELNQLTIDRQQKLEESSNNLTQFQTVEAQLKQWLVEKELMVSVLGPLSIDPNMLNTQRQQVQILLQEFATRKPQYEQLTAAGQGILSRPGEDPSLRGIVKEQLAAVTQKWDSLTGQLSDRCDWIDQAIVKSTQYQSLLRSLSDKLSDLDNKLSSSLAVSTHPDAMNQQLETAQKMKQEIQQEKKQIKVAQALCEDLSALVKEEYLKAELSRQLEGILKSFKDVEQKAENHVQHLQSACASSHQFQQMSRDFQAWLDTKKEEQNKSHPISAKLDVLESLIKDHKDFSKTLTAQSHMYEKTIAEGENLLLKTQGSEKAALQLQLNTIKTNWDTFNKQVKERENKLKESLEKALKYKEQVETLWPWIDKCQNNLEEIKFCLDPAEGENSIAKLKSLQKEMDQHFGMVELLNNTANSLLSVCEIDKEVVTDENKSLIQKVDMVTEQLHSKKFCLENMTQKFKEFQEVSKESKRQLQCAKEQLDIHDSLGSQAYSNKYLTMLQTQQKSLQALKHQVDLAKRLAQDLVVEASDSKGTSDVLLQVETIAQEHSTLSQQVDEKCSFLETKLQGIGHFQNTIREMFSQFAEFDDELDSMAPVGRDAETLQKQKETIKAFLKKLEALMASNDNANKTCKMMLATEETSPDLVGIKRDLEALSKQCNKLLDRAQAREEQVEGTIKRLEEFYSKLKEFSILLQKAEEHEESQGPVGMETETINQQLNMFKVFQKEEIEPLQGKQQDVNWLGQGLIQSAAKSTSTQGLEHDLDDVNARWKTLNKKVAQRAAQLQEALLHCGRFQDALESLLSWMVDTEELVANQKPPSAEFKVVKAQIQEQKLLQRLLDDRKSTVEVIKREGEKIATTAEPADKVKILKQLSLLDSRWEALLNKAETRNRQLEGISVVAQQFHETLEPLNEWLTTIEKRLVNCEPIGTQASKLEEQIAQHKVLQEDILLRKQNVDQALLNGLELLKQTTGDEVLIIQDKLEAIKARYKDITKLSTDVAKTLEQALQLARRLHSTHEELCTWLDKVEVELLSYETQVLKGEEASQAQMRPKELKKEAKNNKALLDSLNEVSSALLELVPWRAREGLEKMVAEDNERYRLVSDTITQKVEEIDAAILRSQQFDQAADAELSWITETEKKLMSLGDIRLEQDQTSAQLQVQKTFTMEILRHKDIIDDLVKSGHKIMTACSEEEKQSMKKKLDKVLKNYDTICQINSERYLQLERAQSLVNQFWETYEELWPWLTETQSIISQLPAPALEYETLRQQQEEHRQLRELIAEHKPHIDKMNKTGPQLLELSPGEGFSIQEKYVAADTLYSQIKEDVKKRAVALDEAISQSTQFHDKIDQILESLERIVERLRQPPSISAEVEKIKEQISENKNVSVDMEKLQPLYETLKQRGEEMIARSGGTDKDISAKAVQDKLDQMVFIWENIHTLVEEREAKLLDVMELAEKFWCDHMSLIVTIKDTQDFIRDLEDPGIDPSVVKQQQEAAETIREEIDGLQEELDIVINLGSELIAACGEPDKPIVKKSIDELNSAWDSLNKAWKDRIDKLEEAMQAAVQYQDGLQAVFDWVDIAGGKLASMSPIGTDLETVKQQIEELKQFKSEAYQQQIEMERLNHQAELLLKKVTEESDKHTVQDPLMELKLIWDSLEERIINRQHKLEGALLALGQFQHALDELLAWLTHTEGLLSEQKPVGGDPKAIEIELAKHHVLQNDVLAHQSTVEAVNKAGNDLIESSAGEEASNLQNKLEVLNQRWQNVLEKTEQRKQQLDGALRQAKGFHGEIEDLQQWLTDTERHLLASKPLGGLPETAKEQLNVHMEVCAAFEAKEETYKSLMQKGQQMLARCPKSAETNIDQDINNLKEKWESVETKLNERKTKLEEALNLAMEFHNSLQDFINWLTQAEQTLNVASRPSLILDTVLFQIDEHKVFANEVNSHREQIIELDKTGTHLKYFSQKQDVVLIKNLLISVQSRWEKVVQRLVERGRSLDDARKRAKQFHEAWSKLMEWLEESEKSLDSELEIANDPDKIKTQLAQHKEFQKSLGAKHSVYDTTNRTGRSLKEKTSLADDNLKLDDMLSELRDKWDTICGKSVERQNKLEEALLFSGQFTDALQALIDWLYRVEPQLAEDQPVHGDIDLVMNLIDNHKAFQKELGKRTSSVQALKRSARELIEGSRDDSSWVKVQMQELSTRWETVCALSISKQTRLEAALRQAEEFHSVVHALLEWLAEAEQTLRFHGVLPDDEDALRTLIDQHKEFMKKLEEKRAELNKATTMGDTVLAICHPDSITTIKHWITIIRARFEEVLAWAKQHQQRLASALAGLIAKQELLEALLAWLQWAETTLTDKDKEVIPQEIEEVKALIAEHQTFMEEMTRKQPDVDKVTKTYKRRAADPSSLQSHIPVLDKGRAGRKRFPASSLYPSGSQTQIETKNPRVNLLVSKWQQVWLLALERRRKLNDALDRLEELREFANFDFDIWRKKYMRWMNHKKSRVMDFFRRIDKDQDGKITRQEFIDGILSSKFPTSRLEMSAVADIFDRDGDGYIDYYEFVAALHPNKDAYKPITDADKIEDEVTRQVAKCKCAKRFQVEQIGDNKYRFFLGNQFGDSQQLRLVRILRSTVMVRVGGGWMALDEFLVKNDPCRVHHHGSKMLRSESNSSITTTQPTIAKGRTNMELREKFILADGASQGMAAFRPRGRRSRPSSRGASPNRSTSVSSQAAQAASPQVPATTTPKGTPIQGSKLRLPGYLSGKGFHSGEDSGLITTAAARVRTQFADSKKTPSRPGSRAGSKAGSRASSRRGSDASDFDISEIQSVCSDVETVPQTHRPTPRAGSRPSTAKPSKIPTPQRKSPASKLDKSSKR

SEQ ID NO: 40664 - protein, 720 aa, Homo sapiens
MPKRQGDFLHFLNVKKVKTDTENNEVSKNHCRLSKAKEPHFEYIEQPIIEEKPSLSSKKEIDNLVLPDCWNEKQAFMFTEQYKWLEIKEGKLGCKDCSAVRHLGSKAEKHVHVSKEWIAYLVTPNGSNKTTRQASLRKKIREHDVSKAHGKIQDLLKESTNDSICNLVHKQNNKNIDATVKVFNTVYSLVKHNRPLSDIEGARELQEKNGEVNCLNTRYSATRIAEHIAKEMKMKIFKNIIEENAKICIIIDEASTVSKKTTLVIYLQCTIQSAPAPVMLFVALKELVSTIAECIVNTLLTTLNDCGFTNEYLKANLIAFCSDGANTILGRKSGVATKLLENFPEIIIWNCLNHRLQLSLDDSISEIKQINHLKIFIDKIYSIYHQPNKNQTKLLGTVAKELETEIIKIGRVMGPRWAACSLQAATAVWHAYPILYMHFSHSYSGLAKRLANINFLQDLALMIDILEEFSVLSTALQSRSTNIKKAQKLIKRTIRALENLKIGTGKYESQIEDLIKSDKFKDIPFNKNNKFNALPRSILLDNIIQHMNLRLLSDRNHEDIFNYFDLLEPSTWPYEEITSPWIAGEKTLFHLCKILKYEVDLNDFREFVNNNIKSNNVSIPTTIYKAKKIVSTIAINSAEAERGFNLMNIICTRVRNSLTIDHVSDLMTINLLGKELADWDATPFVKSWSNCNHRLATDTRVRQKSTKVFHENQLAIWNLK

SEQ ID NO: 40665 - protein, 191 aa, Homo sapiens [sequence omitted]

SEQ ID NO: 40666 - protein, 83 aa, Homo sapiens
MLRNLLALRQIGQRTISTASRRHFKNKVPEKQKLFQEDDEIPLYLKGGVADALLYRATMILTVGGTAYAIYELAVASFPKKQE

SEQ ID NO: 40667 - protein, 359 aa, Homo sapiens [sequence omitted]

SEQ ID NO: 40668 - protein, 996 aa, Homo sapiens
MLSNNKKLSENTQNTSLCSGTVVHGRRFHHAHAQIPVVKTAAQRKEYPPHVQKVEINPVRLSRLQGVERIMKKTEESESQVEPEIKRKVQQKRHCSTYQPTPPLSPASKKCLTHLEDLQRNCRQAITLNESTGPLLRTSIHQNSGGQKSQNTGLTTKKFYGNNVEKVPIDIIVNCDDSKHTYLQTNGKVILPGAKIPKITNLKERKTSLSDLNDPIILSSDDDDDNDRTNRRESISPQPADSACSSPAPSTGKVEAALNENTCRAERELRSIPEDSELNTVTLPRKARMKDQFGNSIINTPLKRRKVFSQEPPDALALSCQSSFDSVILNCRSIRVGTLFRLLIEPVIFCLDFIKIQLDEPDHDPVEIILNTSDLTKCEWCNVRKLPVVFLQAIPAVYQKLSIQLQMNKEDKVWNDCKGVNKLTNLEEQYIILIFQNGLDPPANMVFESIINEIGIKNNISNFFAKIPFEEANGRLVACTRTYEESIKGSCGQKENKIKTVSFESKIQLRSKQEFQFFDEEEETGENHTIFIGPVEKLIVYPPPPAKGGISVTNEDLHCLNEGEFLNDVIIDFYLKYLVLEKLKKEDADRIHIFSSFFYKRLNQRERRNHETTNLSIQQKRHGRVKTWTRHVDIFEKDFIFVPLNEAAHWFLAVVCFPGLEKPKYEPNPHYHENAVIQKCSTVEDSCISSSASEMESCSQNSSAKPVIKKMLNKKHCIAVIDSNPGQEESDPRYKRNICSVKYSVKKINHTASENEEFNKGESTSQKVADRTKSENGLQNESLSSTHHTDGLSKIRLNYSDESPEAGKMLEDELVDFSEDQDNQDDSSDDGFLADDNCSSEIGQWHLKPTICKQPCILLMDSLRGPSRSNVVKILREYLEVEWEVKKGSKRSFSKDVMKGSNPKVPQQNNFSDCGVYVLQYVESFFENPILSFELPMNLANWFPPPRMRTKREEIRNIILKLQEDQSKEKRKHKDTYSTEAPLGEGTEQYVNSISD

SEQ ID NO: 40669 - protein, 1003 aa, Homo sapiens
MLSNNKKLSENTQNTSLCSGTVVHGRRFHHAHAQIPVVKTAAQSSLDRKERKEYPPHVQKVEINPVRLSRLQGVERIMKKTEESESQVEPEIKRKVQQKRHCSTYQPTPPLSPASKKCLTHLEDLQRNCRQAITLNESTGPLLRTSIHQNSGGQKSQNTGLTTKKFYGNNVEKVPIDIIVNCDDSKHTYLQTNGKVILPGAKIPKITNLKERKTSLSDLNDPIILSSDDDDDNDRTNRRESISPQPADSACSSPAPSTGKVEAALNENTCRAERELRSIPEDSELNTVTLPRKARMKDQFGNSIINTPLKRRKVFSQEPPDALALSCQSSFDSVILNCRSIRVGTLFRLLIEPVIFCLDFIKIQLDEPDHDPVEIILNTSDLTKCEWCNVRKLPVVFLQAIPAVYQKLSIQLQMNKEDKVWNDCKGVNKLTNLEEQYIILIFQNGLDPPANMVFESIINEIGIKNNISNFFAKIPFEEANGRLVACTRTYEESIKGSCGQKENKIKTVSFESKIQLRSKQEFQFFDEEEETGENHTIFIGPVEKLIVYPPPPAKGGISVTNEDLHCLNEGEFLNDVIIDFYLKYLVLEKLKKEDADRIHIFSSFFYKRLNQRERRNHETTNLSIQQKRHGRVKTWTRHVDIFEKDFIFVPLNEAAHWFLAVVCFPGLEKPKYEPNPHYHENAVIQKCSTVEDSCISSSASEMESCSQNSSAKPVIKKMLNKKHCIAVIDSNPGQEESDPRYKRNICSVKYSVKKINHTASENEEFNKGESTSQKVADRTKSENGLQNESLSSTHHTDGLSKIRLNYSDESPEAGKMLEDELVDFSEDQDNQDDSSDDGFLADDNCSSEIGQWHLKPTICKQPCILLMDSLRGPSRSNVVKILREYLEVEWEVKKGSKRSFSKDVMKGSNPKVPQQNNFSDCGVYVLQYVESFFENPILSFELPMNLANWFPPPRMRTKREEIRNIILKLQEDQSKEKRKHKDTYSTEAPLGEGTEQYVNSISD

SEQ ID NO: 40670 - protein, 433 aa, Homo sapiens
MSEDELACSPYIPLGGDFGGGDFGGGDFGGGDFGGGGSFGGHCLDYCESPTAHCNVLNWEQVQRLDGILSETIPIHGRGNFPTLELQPSLIVKVVRRRLAEKRIGVRDVRLNGSAASHVLHQDSGLGYKDLDLIFCADLRGEGEFQTVKDVVLDCLLDFLPEGVNKEKITPLTLKEAYVQKMVKVCNDSDRWSLISLSNNSGKNVELKFVDSLRRQFEFSVDSFQIKLDSLLLFYECSENPMTETFHPTIIGESVYGDFQEAFDHLCNKIIATRNPEEIRGGGLLKYCNLLVRGFRPASDEIKTLQRYMCSRFFIDFSDIGEQQRKLESYLQNHFVGLEDRKYEYLMTLHGVVNESTVCLMGHERRQTLNLITMLAIRVLADQNVIPNVANVTCYYQPAPYVADANFSNYYIAQVQPVFTCQQQTYSTWLPCN

SEQ ID NO: 40671 - protein, 2347 aa, Homo sapiens
MSVKPTLLSLYEIYYLPLGKTLKPGLQGLLTGILPGLEEGSEYYERTNMLLEKVAAAVDQSAFYSALWGSLLTSPAVRLPGITYVLAHLNRKLSMEDQLYIIGSDIELMVEAVSTSVQDSSVLVQRSTLDLILFCFPFHMSQATRPDMIRILSAALHVVLRRDMSLNRRLYAWLLGFDNNGAIIGPRSTRHSNPEEHATYYFTTFSKELLVQAMVGILQVNGFGEENTLMQDLKPFRILISLLDKPELGPVILEDVLIEVFRTLYSQCKAELDLQTEPPFSKDHAQLSSKLRENKKTAELIKTANLLFNSFEPYYMWDYVARWFEECCRRTLHVRLQIGPGDSNDSSELQLTNFCLLVDFLLDIVSLPTRSMRVLCQETYIEIQTEHLPQLLLRMISALTSHLQTLHLSELTDSLRLCSKILSKVQPPLLSASTGGVLQFPSGQNNSVKEWEDKKVSSVSHENPTEVFEDGENPPSSRSSESGFTEFIQYQADRTDDIDRELSEGQGAAAIPIGSTSSETETASTVGSEETIIQTPSVVTQGTATRSRKTAQKTAMQCCLEYVQQFLTRLINLYIIQNNSFSQSLATEHQGDLGREQGETSKWDRNSQGDVKEKNISKQKTSKEYLSAFLAACQLFLECSSFPVYIAEGNHTSELRSEKLETDCEHVQPPQWLQTLMNACSQASDFSVQSVAISLVMDLVGLTQSVAMVTGENINSVEPAQPLSPNQGRVAVVIRPPLTQGNLRYIAEKTEFFKHVALTLWDQLGDGTPQHHQKSVELFYQLHNLVPSSSICEDVISQQLTHKDKKIRMEAHAKFAVLWHLTRDLHINKSSSFVRSFDRSLFIMLDSLNSLDGSTSSVGQAWLNQVLQRHDIARVLEPLLLLLLHPKTQRVSVQRVQAERYWNKSPCYPGEESDKHFMQNFACSNVSQVQLITSKGNGEKPLTMDEIENFSLTVNPLSDRLSLLSTSSETIPMVVSDFDLPDQQIEILQSSDSGCSQSSAGDNLSYEVDPETVNAQEDSQMPKESSPDDDVQQVVFDLICKVVSGLEVESASVTSQLEIEAMPPKCSDIDPDEETIKIEDDSIQQSQNALLSNESSQFLSVSAEGGHECVANGISRNSSSPCISGTTHTLHDSSVASIETKSRQRSHSSIQFSFKEKLSEKVSEKETIVKESGKQPGAKPKVKLARKKDDDKKKSSNEKLKQTSVFFSDGLDLENWYSCGEGDISEIESDMGSPGSRKSPNFNIHPLYQHVLLYLQLYDSSRTLYAFSAIKAILKTNPIAFVNAISTTSVNNAYTPQLSLLQNLLARHRISVMGKDFYSHIPVDSNHNFRSSMYIEILISLCLYYMRSHYPTHVKVTAQDLIGNRNMQMMSIEILTLLFTELAKVIESSAKGFPSFISDMLSKCKVQKVILHCLLSSIFSAQKWHSEKMAGKNLVAVEEGFSEDSLINFSEDEFDNGSTLQSQLLKVLQRLIVLEHRVMTIPEENETGFDFVVSDLEHISPHQPMTSLQYLHAQPITCQGMFLCAVIRALHQHCACKMHPQWIGLITSTLPYMGKVLQRVVVSVTLQLCRNLDNLIQQYKYETGLSDSRPLWMASIIPPDMILTLLEGITAIIHYCLLDPTTQYHQLLVSVDQKHLFEARSGILSILHMIMSSVTLLWSILHQADSSEKMTIAASASLTTINLGATKNLRQQILELLGPISMNHGVHFMAAIAFVWNERRQNKTTTRTKVIPAASEEQLLLVELVRSISVMRAETVIQTVKEVLKQPPAIAKDKKHLSLEVCMLQFFYAYIQRIPVPNLVDSWASLLILLKDSIQLSLPAPGQFLILGVLNEFIMKNPSLENKKDQRDLQDVTHKIVDAIGAIAGSSLEQTTWLRRNLEVKPSPKIMVDGTNLESDVEDMLSPAMETANITPSVYSVHALTLLSEVLAHLLDMVFYSDEKERVIPLLVNIMHYVVPYLRNHSAHNAPSYRACVQLLSSLSGYQYTRRAWKKEAFDLFMDPSFFQMDASCVNHWRAIMDNLMTHDKTTFRDLMTRVAVAQSSSLNLFANRDVELEQRAMLLKRLAFAIFSSEIDQYQKYLPDIQERLVESLRLPQVPTLHSQVFLFFRVLLLRMSPQHLTSLWPTMITELVQVFLLMEQELTADEDISRTSGPSVAGLETTYTGGNGFSTSYNSQRWLNLYLSACKFLDLALALPSENLPQFQMYRWAFIPEASDDSGLEVRRQGIHQREFKPYVVRLAKLLRKRAKKNPEEDNSGRTLGWEPGHLLLTICTVRSMEQLLPFFNVLSQVFNSKVTSRCGGHSGSPILYSNAFPNKDMKLENHKPCSSKARQKIEEMVEKDFLEGMIKT

SEQ ID NO: 40672 - protein, 609 aa, Homo sapiens
MFYYICLRRRARTATRGEMMNTHRAIESNSQTSPLNAEVVQYAKEVVDFSSHYGSENSMSYTMWNLAGVPNVFPSSGDFTQTAVFRTYGTWWDQCPSASLPFKRTPPNFQSQDYVELTFEQQVYPTAVHVLETYHPGAVIRILACSANPYSPNPPAEVRWEILWSERPTKVNASQARQFKPCIKQINFPTNLIRLEVNSSLLEYYTELDAVVLHGVKDKPVLSLKTSLIDMNDIEDDAYAEKDGCGMDSLNKKFSSAVLGEGPNNGYFDKLPYELIQLILNHLTLPDLCRLAQTCKLLSQHCCDPLQYIHLNLQPYWAKLDDTSLEFLQSRCTLVQWLNLSWTGNRGFISVAGFSRFLKVCGSELVRLELSCSHFLNETCLEVISEMCPNLQALNLSSCDKLPPQAFNHIAKLCSLKRLVLYRTKVEQTALLSILNFCSELQHLSLGSCVMIEDYDVIASMIGAKCKKLRTLDLWRCKNITENGIAELASGCPLLEELDLGWCPTLQSSTGCFTRLAHQLPNLQKLFLTANRSVCDTDIDELACNCTRLQQLDILGTRMVSPASLRKLLESCKDLSLLDVSFCSQIDNRAVLELNASFPKVFIKKSFTQ

SEQ ID NO: 40673 - protein, 905 aa, Homo sapiens [sequence omitted]

SEQ ID NO: 40674 - protein, 455 aa, Homo sapiens [sequence omitted]

SEQ ID NO: 40675 - protein, 400 aa, Homo sapiens
MEEGVVNEILQGPLRDVFDTKQLITDISGSGNNWAVGHKVFGSLYQDQILEKFRKSAEHCDCLQCFFIIHSMGGGTGSGLGTFLLKVLEDEFPEVYRFVTSIYPSGEDDVITSPYNSILAMKELNEHADCVLPIDNQSLFDIISKIDLMVNSGKLGTTVKPKSLVTSSSGALKKQHKKPFDAMNNIVANLLLNLTSSARFEGSLNMDLNEISMNLVPFPQLHYLVSSLTPLYTLTDVNIPPRRLDQMFSDAFSKDHQLLRADPKHSLYLACALMVRGNVQISDLRRNIERLKPSLQFVSWNQEGWKTSLCSVPPVGHSHSLLALANNTCVKPTFMELKERFMRLYKKKAHLHHYLQVEGMEESCFTEAVSSLSALIQEYDQLDATKNMPVQDLPRLSIAM

SEQ ID NO: 40676 - protein, 88 aa, Homo sapiens
MEEGVVNEILQGPLRDVFDTKQLITDISGSGNNWAVGHKVFGSLYQDQILEKFRKSAEHCDCLQCFFIIHSMGGGKIFHSFACNSVKG

SEQ ID NO: 40677 - protein, 663 aa, Homo sapiens
MTSKNYPGTYPNHTVCEKTITVPKGKRLILRLGDLDIESQTCASDYLLFTSSSDQYGPYCGSMTVPKELLLNTSEVTVRFESGSHISGRGFLLTYASSDHPDLITCLERASHYLKTEYSKFCPAGCRDVAGDISGNMVDGYRDTSLLCKAAIHAGIIADELGGQISVLQRKGISRYEGILANGVLSRDGSLSDKRFLFTSNGCSRSLSFEPDGQIRASSSWQSVNESGDQVHWSPGQARLQDQGPSWASGDSSNNHKPREWLEIDLGEKKKITGIRTTGSTQSNFNFYVKSFVMNFKNNNSKWKTYKGIVNNEEKVFQGNSNFRDPVQNNFIPPIVARYVRVVPQTWHQRIALKVELIGCQITQGNDSLVWRKTSQSTSVSTKKEDETITRPIPSEETSTGINITTVAIPLVLLVVLVFAGMGIFAAFRKKKKKGSPYGSAEAQKTDCWKQIKYPFARHQSAEFTISYDNEKEMTQKLDLITSDMADYQQPLMIGTGTVTRKGSTFRPMDTDAEEAGVSTDAGGHYDCPQRAGRHEYALPLAPPEPEYATPIVERHVLRAHTFSAQSGYRVPGPQPGHKHSLSSGGFSPVAGVGAQDGDYQRPHSAQPADRGYDRPKAVSALATESGHPDSQKPPTHPGTSDSYSAPRDCLTPLNQTAMTALL

SEQ ID NO: 40678 - protein, 703 aa, Homo sapiens
MPSNSSASISKLRESLTPDGSKWSTSLMQTLGNHSRGEQDSSLDMKDFRPLRKWSSLSKLTAPDNCGQGGTVCREESRNGLEKIGKAKALTSQLRTIGPSCLHDSMEMLRLEDKEINKKRSSTLDCKYKFESCSKEDFRASSSTLRRQPVDMTYSALPESKPIMTSSEAFEPPKYLMLGQQAVGGVPIQPSVRTQMWLTEQLRTNPLEGRNTEDSYSLAPWQQQQIEDFRQGSETPMQVLTGSSRQSYSPGYQDFSKWESMLKIKEGLLRQKEIVIDRQKQQITHLHERIRDNELRAQHAMLGHYVNCEDSYVASLQPQYENTSLQTPFSEESVSHSQQGEFEQKLASTEKEVLQLNEFLKQRLSLFSEEKKKLEEKLKTRDRYISSLKKKCQKESEQNKEKQRRIETLEKYLADLPTLDDVQSQSLQLQILEEKNKNLQEALIDTEKKLEEIKKQCQDKETQLICQKKKEKELVTTVQSLQQKVERCLEDGIRLPMLDAKQLQNENDNLRQQNETASKIIDSQQDEIDRMILEIQSMQGKLSKEKLTTQKMMEELEKKERNVQRLTKALLENQRQTDETCSLLDQGQEPDQSRQQTVLSKRPLFDLTVIDQLFKEMSCCLFDLKALCSILNQRAQGKEPNLSLLLGIRSMNCSAEETENDHSTETLTKKLSDVCQLRRDIDELRTTISDRYAQDMGDNCITQ

SEQ ID NO: 40679 - protein, 479 aa, Homo sapiens
MASFVRQLNMYGFRKVVHIDSGIVKQERDGPVEFQHPYFKQGQDDLLENIKRKVSSSKPEENKIRQEDLTKIISSAQKVQIKQETIESRLSELKSENESLWKEVSELRAKHAQQQQVIRKIVQFIVTLVQNNQLVSLKRKRPLLLNTNGAQKKNLFQHIVKEPTDNHHHKVPHSRTEGLKPRERISDDIIIYDVTDDNADEENIPVIPETNEDVISDPSNCSQYPDIVIVEDDNEDEYAPVIQSGEQNEPARESLSSGSDGSSPLMSSAVQLNGSSSLTSEDPVTMMDSILNDNINLLGKVELLDYLDSIDCSLEDFQAMLSGRQFSIDPDLLVDLFTSSVQMNPTDYINNTKSENKGLETTKNNVVQPVSEEGRKSKSKPDKQLIQYTAFPLLAFLDGNPASSVEQASTTASSEVLSSVDKPIEVDELLDSSLDPEPTQSKLVRLEPLTEAEASEATLFYLCELAPAPLDSDMPLLDS

SEQ ID NO: 40680 - protein, 461 aa, Homo sapiens
MASFVRQLNMYGFRKVVHIDSGIVKQERDGPVEFQHPYFKQGQDDLLENIKRKVSSSKPEENKIRQEDLTKIISSAQKVQIKQETIESRLSELKSENESLWKEVSELRAKHAQQQQVIRKIVQFIVTLVQNNQLVSLKRKRPLLLNTNGAQKKNLFQHIVKEPTDNHHHKVPHSRTEGLKPRERISDDIIIYDVTDDNADEENIPVIPETNEDVISDPSNCSQYPDIVIVEDDNEDEYAPVIQSGEQNEPARESLSSGSDGSSPLMSSAVQLNGSSSLTSEDPVTMMDSILNDNINLLGKVELLDYLDSIDCSLEDFQAMLSGRQFSIDPDLLVDSENKGLETTKNNVVQPVSEEGRKSKSKPDKQLIQYTAFPLLAFLDGNPASSVEQASTTASSEVLSSVDKPIEVDELLDSSLDPEPTQSKLVRLEPLTEAEASEATLFYLCELAPAPLDSDMPLLDS

SEQ ID NO: 40681 - protein, 450 aa, Homo sapiens [sequence omitted]

SEQ ID NO: 40682 - protein, 127 aa, Homo sapiens
MHLRDRAFLKRKLVHAIIGSLKDNRPQGWCLSDTYLKCAMNAREENPWVPDDTYYCRLIGRLVDTMAGKSPGPFPNCDWRFNEFPNPAAHALHVTCVELMALAVSGKEVGNALLNVVLKRYVFWFMQ

SEQ ID NO: 40683 - protein, 580 aa, Homo sapiens [sequence omitted]

SEQ ID NO: 40684 - protein, 313 aa, Homo sapiens [sequence omitted]

SEQ ID NO: 40685 - protein, 2411 aa, Homo sapiens
MSTFGSHEGQRQPQIEPEQIGNTASAQLFGSGKLASPSEVVQQVAEKQYPPHRPSPYSCQHSLSFPQHSLPQGVMHSTKPHQSLEGPPWLFPGPLPSVASEDLFPFPIHGHSGGYPRKKISSLNPAYSQYSQKSIEQAEEAHKKEHKPKKPGKYICPYCSRACAKPSVLKKHIRSHTGERPYPCIPCGFSFKTKSNLYKHRKSHAHAIKAGLVPFTESAVSKLDLEAGFIDVEAEIHSDGEQSTDTDEESSLFAEASDKMSPGPPIPLDIASRGGYHGSLEESLGGPMKVPILIIPKSGIPLPNESSQYIGPDMLPNPSLNTKADDSHTVKQKLALRLSEKKGQDSEPSLNLLSPHSKGSTDSGYFSRSESAEQQISPPNTNAKSYEEIIFGKYCRLSPRNALSVTTTSQERAAMGRKGIMEPLPHVNTRLDVKMFEDPVSQLIPSKGDVDPSQTSMLKSTKFNSESRQPQIIPSSIRNEGKLYPANFQGSNPVLLEAPVDSSPLIRSNSVPTSSATNLTIPPSLRGSHSFDERMTGSDDVFYPGTVGIPPQRMLRRQAAFELPSVQEGHVEVEHHGRMLKGISSSSLKEKKLSPGDRVGYDYDVCRKPYKKWEDSETPKQNYRDISCLSSLKHGGEYFMDPVVPLQGVPSMFGTTCENRKRRKEKSVGDEEDTPMICSSIVSTPVGIMASDYDPKLQMQEGVRSGFAMAGHENLSHGHTERFDPCRPQLQPGSPSLVSEESPSAIDSDKMSDLGGRKPPGNVISVIQHTNSLSRPNSFERSESAELVACTQDKAPSPSETCDSEISEAPVSPEWAPPGDGAESGGKPSPSQQVQQQSYHTQPRLVRQHNIQVPEIRVTEEPDKPEKEKEAQSKEPEKPVEEFQWPQRSETLSQLPAEKLPPKKKRLRLADMEHSSGESSFESTGTGLSRSPSQESNLSHSSSFSMSFEREETSKLSALPKQDEFGKHSEFLTVPAGSYSLSVPGHHHQKEMRRCSSEQMPCPHPAEVPEVRSKSFDYGNLSHAPVSGAAASTVSPSRERKKCFLVRQASFSGSPEISQGEVGMDQSVKQEQLEHLHAGLRSGWHHGPPAVLPPLQQEDPGKQVAGPCPPLSSGPLHLAQPQIMHMDSQESLRNPLIQPTSYMTSKHLPEQPHLFPHQETIPFSPIQNALFQFQYPTVCMVHLPAQQPPWWQAHFPHPFAQHPQKSYGKPSFQTEIHSSYPLEHVAEHTGKKPAEYAHTKEQTYPCYSGASGLHPKNLLPKFPSDQSSKSTETPSEQVLQEDFASANAGSLQSLPGTVVPVRIQTHVPSYGSVMYTSISQILGQNSPAIVICKVDENMTQRTLVTNAAMQGIGFNIAQVLGQHAGLEKYPIWKAPQTLPLGLESSIPLCLPSTSDSVATLGGSKRMLSPASSLELFMETKQQKRVKEEKMYGQIVEELSAVELTNSDIKKDLSRPQKPQLVRQGCASEPKDGLQSGSSSFSSLSPSSSQDYPSVSPSSREPFLPSKEMLSGSRAPLPGQKSSGPSESKESSDELDIDETASDMSMSPQSSSLPAGDGQLEEEGKGHKRPVGMLVRMASAPSGNVADSTLLLTDMADFQQILQFPSLRTTTTVSWCFLNYTKPNYVQQATFKSSVYASWCISSCNPNPSGLNTKTTLALLRSKQKITAEIYTLAAMHRPGTGKLTSSSAWKQFTQMKPDASFLFGSKLERKLVGNILKERGKGDIHGDKDIGSKQTEPIRIKIFEGGYKSNEDYVYVRGRGRGKYICEECGIRCKKPSMLKKHIRTHTDVRPYVCKLCNFAFKTKGNLTKHMKSKAHMKKCLELGVSMTSVDDTETEEAENLEDLHKAAEKHSMSSISTDHQFSDAEESDGEDGDDNDDDDEDEDDFDDQGDLTPKTRSRSTSPQPPRFSSLPVNVGAVPHGVPSDSSLGHSSLISYLVTLPSIRVTQLMTPSDSCEDTQMTEYQRLFQSKSTDSEPDKDRLDIPSCMDEECMLPSEPSSSPRDFSPSSHHSSPGYDSSPCRDNSPKRYLIPKGDLSPRRHLSPRRDLSPMRHLSPRKEAALRREMSQRDVSPRRHLSPRRPVSPGKDITARRDLSPRRERRYMTTIRAPSPRRALYHNPPLSMGQYLQAEPIVLGPPNLRRGLPQVPYFSLYGDQEGAYEHPGSSLFPEGPNDYVFSHLPLHSQQQVRAPIPMVPVGGIQMVHSMPPALSSLHPSPTLPLPMEGFEEKKGASGESFSKDPYVLSKQHEKRGPHALQSSGPPSTPSSPRLLMKQSTSEDSLNATEREQEENIQTCTKAIASLRIATEEAALLGPDQPARVQEPHQNPLGSAHVSIRHFSRPEPGQPCTSATHPDLHDGEKDNFGTSQTPLAHSTFYSKSCVDDKQLDFHSSKELSSSTEESKDPSSEKSQLH

SEQ ID NO: 40686 - protein, 3378 aa, Homo sapiens
MFTDLKDGRKLLDLLEGLTGTSLPKERGSTRVHALNNVNRVLQVLHQNNVELVNIGGTDIVDGNHKLTLGLLWSIILHWQVKDVMKDVMSDLQQTNSEKILLSWVRQTTRPYSQVNVLNFTTSWTDGLAFNAVLHRHKPDLFSWDKVVKMSPIERLEHAFSKAQTYLGIEKLLDPEDVAVQLPDKKSIIMYLTSLFEVLPQQVTIDAIREVETLPRKYKKECEEEAINIQSTAPEEEHESPRAETPSTVTEVDMDLDSYQIALEEVLTWLLSAEDTFQEQDDISDDVEEVKDQFATHEAFMMELTAHQSSVGSVLQAGNQLITQGTLSDEEEFEIQEQMTLLNARWEALRVESMDRQSRLHDVLMELQKKQLQQLSAWLTLTEERIQKMETCPLDDDVKSLQKLLEEHKSLQSDLEAEQVKVNSLTHMVVIVDENSGESATAILEDQLQKLGERWTAVCRWTEERWNRLQEINILWQELLEEQCLLKAWLTEKEEALNKVQTSNFKDQKELSVSVRRLAILKEDMEMKRQTLDQLSEIGQDVGQLLDNSKASKKINSDSEELTQRWDSLVQRLEDSSNQVTQAVAKLGMSQIPQKDLLETVRVREQAITKKSKQELPPPPPPKKRQIHVDIEAKKKFDAISAELLNWILKWKTAIQTTEIKEYMKMQDTSEMKKKLKALEKEQRERIPRADELNQTGQILVEQMGKEGLPTEEIKNVLEKVSSEWKNVSQHLEDLERKIQLQEDINAYFKQLDELEKVIKTKEEWVKHTSISESSRQSLPSLKDSCQRELTNLLGLHPKIEMARASCSALMSQPSAPDFVQRGFDSFLGRYQAVQEAVEDRQQHLENELKGQPGHAYLETLKTLKDVLNDSENKAQVSLNVLNDLAKVEKALQEKKTLDEILENQKPALHKLAEETKALEKNVHPDVEKLYKQEFDDVQGKWNKLKVLVSKDLHLLEEIALTLRAFEADSTVIEKWMDGVKDFLMKQQAAQGDDAGLQRQLDQCSAFVNEIETIESSLKNMKEIETNLRSGPVAGIKTWVQTRLGDYQTQLEKLSKEIATQKSRLSESQEKAANLKKDLAEMQEWMTQAEEEYLERDFEYKSPEELESAVEEMKRAKEDVLQKEVRVKILKDNIKLLAAKVPSGGQELTSELNVVLENYQLLCNRIRGKCHTLEEVWSCWIELLHYLDLETTWLNTLEERMKSTEVLPEKTDAVNEALESLESVLRHPADNRTQIRELGQTLIDGGILDDIISEKLEAFNSRYEDLSHLAESKQISLEKQLQVLRETDQMLQVLQESLGELDKQLTTYLTDRIDAFQVPQEAQKIQAEISAHELTLEELRRNMRSQPLTSPESRTARGGSQMDVLQRKLREVSTKFQLFQKPANFEQRMLDCKRVLDGVKAELHVLDVKDVDPDVIQTHLDKCMKLYKTLSEVKLEVETVIKTGRHIVQKQQTDNPKGMDEQLTSLKVLYNDLGAQVTEGKQDLERASQLARKMKKEAASLSEWLSATETELVQKSTSEGLLGDLDTEISWAKNVLKDLEKRKADLNTITESSAALQNLIEGSEPILEERLCVLNAGWSRVRTWTEDWCNTLMNHQNQLEIFDGNVAHISTWLYQAEALLDEIEKKPTSKQEEIVKRLVSELDDANLQVENVRDQALILMNARGSSSRELVEPKLAELNRNFEKVSQHIKSAKLLIAQEPLYQCLVTTETFETGVPFSDLEKLENDIENMLKFVEKHLESSDEDEKMDEESAQIEEVLQRGEEMLHQPMEDNKKEKIRLQLLLLHTRYNKIKAIPIQQRKMGQLASGIRSSLLPTDYLVEINKILLCMDDVELSLNVPELNTAIYEDFSFQEDSLKNIKDQLDKLGEQIAVIHEKQPDVILEASGPEAIQIRDTLTQLNAKWDRINRMYSDRKGCFDRAMEEWRQFHCDLNDLTQWITEAEELLVDTCAPGGSLDLEKARIHQQELEVGISSHQPSFAALNRTGDGIVQKLSQADGSFLKEKLAGLNQRWDAIVAEVKDRQPRLKGESKQVMKYRHQLDEIICWLTKAEHAMQKRSTTELGENLQELRDLTQEMEVHAEKLKWLNRTELEMLSDKSLSLPERDKISESLRTVNMTWNKICREVPTTLKECIQEPSSVSQTRIAAHPNVQKVVLVSSASDIPVQSHRTSEISIPADLDKTITELADWLVLIDQMLKSNIVTVGDVEEINKTVSRMKITKADLEQRHPQLDYVFTLAQNLKNKASSSDMRTAITEKLERVKNQWDGTQHGVELRQQQLEDMIIDSLQWDDHREETEELMRKYEARLYILQQARRDPLTKQISDNQILLQELGPGDGIVMAFDNVLQKLLEEYGSDDTRNVKETTEYLKTSWINLKQSIADRQNALEAEWRTVQASRRDLENFLKWIQEAETTVNVLVDASHRENALQDSILARELKQQMQDIQAEIDAHNDIFKSIDGNRQKMVKALGNSEEATMLQHRLDDMNQRWNDLKAKSASIRAHLEASAEKWNRLLMSLEELIKWLNMKDEELKKQMPIGGDVPALQLQYDHCKALRRELKEKEYSVLNAVDQARVFLADQPIEAPEEPRRNLQSKTELTPEERAQKIAKAMRKQSSEVKEKWESLNAVTSNWQKQVDKALEKLRDLQGAMDDLDADMKEAESVRNGWKPVGDLLIDSLQDHIEKIMAFREEIAPINFKVKTVNDLSSQLSPLDLHPSLKMSRQLDDLNMRWKLLQVSVDDRLKQLQEAHRDFGPSSQHFLSTSVQLPWQRSISHNKVPYYINHQTQTTCWDHPKMTELFQSLADLNNVRFSAYRTAIKIRRLQKALCLDLLELSTTNEIFKQHKLNQNDQLLSVPDVINCLTTTYDGLEQMHKDLVNVPLCVDMCLNWLLNVYDTGRTGKIRVQSLKIGLMSLSKGLLEEKYRYLFKEVAGPTEMCDQRQLGLLLHDAIQIPRQLGEVAAFGGSNIEPSVRSCFQQNNNKPEISVKEFIDWMHLEPQSMVWLPVLHRVAAAETAKHQAKCNICKECPIVGFRYRSLKHFNYDVCQSCFFSGRTAKGHKLHYPMVEYCIPTTSGEDVRDFTKVLKNKFRSKKYFAKHPRLGYLPVQTVLEGDNLETPITLISMWPEHYDPSQSPQLFHDDTHSRIEQYATRLAQMERTNGSFLTDSSSTTGSVEDEHALIQQYCQTLGGESPVSQPQSPAQILKSVEREERGELERIIADLEEEQRNLQVEYEQLKDQHLRRGLPVGSPPESIISPHHTSEDSELIAEAKLLRQHKGRLEARMQILEDHNKQLESQLHRLRQLLEQPESDSRINGVSPWASPQHSALSYSLDPDASGPQFHQAAGEDLLAPPHDTSTDLTEVMEQIHSTFPSCCPNVPSRPQAM

SEQ ID NO: 40687 - protein, 1118 aa, Homo sapiens [sequence omitted]

SEQ ID NO: 40688 - protein, 469 aa, Homo sapiens
MRLYTLSKRHFVLVFVVFFICFGLTIFVGIRGPKVIQTSAANFSLNNSKKLKPIQILSNPLSTYNQQLWLTCVVELDQSKETSIKTSFPMTVKVDGVAQDGTTMYIHNKVHNRTRTLTCAGKCAEIIVAHLGYLNYTQYTVIVGFEHLKLPIKGMNFTWKTYNPAFSRLEIWFRFFFVVLTFIVTCLFAHSLRKFSMRDWGIEQKWMSVLLPLLLLYNDPFFPLSFLVNSWLPGMLDDLFQSMFLCALLLFWLCVYHGIRVQGERKCLTFYLPKFFIVGLLWLASVTLGIWQTVNELHDPMYQYRVDTGNFQGMKVFFMVVAAVYILYLLFLIVRACSELRHMPYVDLRLKFLTALTFVVLVISIAILYLRFGAQVLQDNFVAELSTHYQNSAEFLSFYGLLNFYLYTLAFVYSPSKNALYESQLKDNPAFSMLNDSDDDVIYGSDYEEMPLQNGQAIRAKYKEESDSD

SEQ ID NO: 40689 - protein, 97 aa, Homo sapiens
MALPREPIQARGTECAHRERRGWGCSTRSGNAGAAGFQGSRGSSRLGLTGFLHIRPSPTQVRPSALLPKQQAPRTLRGSRRPLTYDGPRRRDDDHRI

SEQ ID NO: 40690 - protein, 329 aa, Homo sapiens
METKEKPKPTPDYLMQLMNDKKLMSSLPNFCGIFNHLERLLDEEISRVRKDMYNDTLNGSTEKRSAELPDAVGPIVQLQEKLYVPVKEYPDFNFVGRILGPRGLTAKQLEAETGCKIMVRGKGSMRDKKKEEQNRGKPNWEHLNEDLHVLITVEDAQNRAEIKLKRAVEEVKKLLVPAAEGEDSLKKMQLMELAILNGTYRDANIKSPTAQAAPRIITGPAPVLPPAALRTPTPAGPTIMPLIRQIQTAVMPNGTPHPTAAIVPPGPEAGLIYTPYEYPYTLAPATSILEYPIEPSGVLGAVATKVRRHDMRVHPYQRIVTADRAATGN

SEQ ID NO: 40691 - protein, 337 aa, Homo sapiens
METKEKPKPTPDYLMQLMNDKKLMSSLPNFCGIFNHLERLLDEEISRVRKDMYNDTLNGSTEKRSAELPDAVGPIVQLQEKLYVPVKEYPDFNFVGRILGPRGLTAKQLEAETGCKIMVRGKGSMRDKKKEEQNRGKPNWEHLNEDLHVLITVEDAQNRAEIKLKRAVEEVKKLLVPAAEGEDSLKKMQLMELAILNGTYRDANIKSPALAFSLAATAQAAPRIITGPAPVLPPAALRTPTPAGPTIMPLIRQIQTAVMPNGTPHPTAAIVPPGPEAGLIYTPYEYPYTLAPATSILEYPIEPSGVLGAVATKVRRHDMRVHPYQRIVTADRAATGN

SEQ ID NO: 40692 - protein, 315 aa, Homo sapiens
METKEKPKPTPDYLMQLMNDKKLMSSLPNFCGIFNHLERLLDEEISRVRKDMYNDTLNGSTEKRSAELPDAVGPIVQLQEKLYVPVKEYPDFNFVGRILGPRGLTAKQLEAETGCKIMVRGKGSMRDKKKEEQNRGKPNWEHLNEDLHVLITVEDAQNRAEIKLKRAVEEVKKLLVPAAEGEDSLKKMQLMELAILNGTYRDANIKSPALAFSLAATAQAAPRIITGPAPVLPPAALRTPTPAGPTIMPLIRQIQTAVMPNGTPHPTAAIVPPGPEAGLIYTPYEYPYTLAPATSILEYPIEPSGVLGMAFPTKG

SEQ ID NO: 40693 - protein, 315 aa, Homo sapiens
METKEKPKPTPDYLMQLMNDKKLMSSLPNFCGIFNHLERLLDEEISRVRKDMYNDTLNGSTEKRSAELPDAVGPIVQLQEKLYVPVKEYPDFNFVGRILGPRGLTAKQLEAETGCKIMVRGKGSMRDKKKEEQNRGKPNWEHLNEDLHVLITVEDAQNRAEIKLKRAVEEVKKLLVPAAEGEDSLKKMQLMELAILNGTYRDANIKSPALAFSLAATAQAAPRIITGPAPVLPPAALRTPTPAGPTIMPLIRQIQTAVMPNGTPHPTAAIVPPGPEAGLIYTPYEYPYTLAPATSILEYPIEPSGVLGKFFSPWG

SEQ ID NO: 40694 - protein, 193 aa, Homo sapiens
MDYGKPDKSEGCNRSWPFNLEEIKDLLPEMRAYWPDVIHSFPNRSRFWKHEWEKHGTCAAQVDALNSQKKYFGRSLELYRELDLNSVLLKLGIKPSINYYQVADFKDALARVYGVIPKIQCLPPSQDEEVQTIGQIELCLTKQDQQLQNCTEPGEQPSPKQEVWLANGAAESRGLRVCEDGPVFYPPPKKTKH

SEQ ID NO: 40695 - protein, 321 aa, Homo sapiens [sequence omitted]

SEQ ID NO: 40696 - protein, 654 aa, Homo sapiens
MTLIEPGGDDHKLTPAFLLCLCIQHSATHFQPGTFGQLLLKIARLIRETVWEKTKELAEKQAQLQEPISLASCAMADLVPDLQPILFWMSNSIELLYFIQQKCPLYMQSMEEQLDITGSKESLFSCTLTASEEAMAVLEEVVLYAFQQCVYYVSKSLYICLPALLECPPFQTERRESWSSAPELPEELRRVVSVYQAALDLLRQLQVHPEVASQMLAYLFFFSGTLLLNQLLDRGPSLSCFHWPRGVQACARLQQLLEWMRSAGFGAAGEHFFQKLSCTLNLLATPRAQLIQMSWTALRAAFPALSPAQLHRLLTHYQLASAMGPMSTWEPGAQDSPEAFRSEDVLESYENPPPIVLPSDGFQVDLEANCLDDSIYQHLLYVRHFLWGLRSRASPGSPGRPGSGASQPVCPEGMHHVVLDGHLEAPSCPLAPRDPGPAAREVAPERTLPLRGAPWAQAPPGRQPSRGGSQAGPPHTDSSCLLTPPSTPLGPEPGDPDWPESGGPCGKALPERQRNGLSGLRGAAPEGDSAALAEESPPAPSSRSSSTEDFCYVFTVELERGPSGLGMGLIDGMHTHLGAPGLYIQTLLPGSPAAADGRLSLGDRILEVNGSSLLGLGYLRAVDLIRHGGKKMRFLVAKSDVETAKKIHFRTPPL

SEQ ID NO: 40697 - protein, 679 aa, Homo sapiens [sequence omitted]

SEQ ID NO: 40698 - protein, 669 aa, Homo sapiens
MVLFGRRWAIASDDLVFPGFFELVVRVLWWIGILTLYLMHRGKLDCAGGALLSSYLIVLMILLAVVICTVSAIMCVSMRGTICNPGPRKSMSKLLYIRLALFFPEMVWASLGAAWVADGVQCDRTVVNGIIATVVVSWIIIAATVVSIIIVFDPLGGKMAPYSSAGPSHLDSHDSSQLLNGLKTAATSVWETRIKLLCCCIGKDDHTRVAFSSTAELFSTYFSDTDLVPSDIAAGLALLHQQQDNIRNNQEPAQVVCHAPGSSQEADLDAELENCHHYMQFAAAAYGWPLYIYRNPLTGLCRIGGDCCRSRTTDYDLVGGDQLNCHFGSILHTTGLQYRDFIHVSFHDKVYELPFLVALDHRKESVVVAVRGTMSLQDVLTDLSAESEVLDVECEVQDRLAHKGISQAARYVYQRLINDGILSQAFSIAPEYRLVIVGHSLGGGAAALLATMLRAAYPQVRCYAFSPPRGLWSKALQEYSQSFIVSLVLGKDVIPRLSVTNLEDLKRRILRVVAHCNKPKYKILLHGLWYELFGGNPNNLPTELDGGDQEVLTQPLLGEQSLLTRWSPAYSFSSDSPLDSSPKYPPLYPPGRIIHLQEEGASGRFGCCSAAHYSAKWSHEAEFSKILIGPKMLTDHMPDILMRALDSVVSDRAACVSCPAQGVSSVDVA

SEQ ID NO: 40699 - protein, 133 aa, Homo sapiens
MDRDSHLLYSKLHLSVLQVLMTLQLHLTEKNLYGRLGLILFDHMVPLVEEINRLADELNPLNASQEIELSLDRLAQALQVAMASGALLCTRDDLRTLCSRLPHNKTLNFGVVCKASFLGLLLGIQVGRGHSRL

SEQ ID NO: 40700 - protein, 89 aa, Homo sapiens
MSQKTNKENSSSVTVSDPEMENKAGQTLENSSLMAELLSDVPFTLAPHVLAVQGTITDLPDHLLSYDGSENLSRFWYDFTLENSVLCDS

SEQ ID NO: 40701 - protein, 351 aa, Homo sapiens
MLTAQNRFEVLTFLLLCYNAALTYMPSVSLQSLCQICSRICVCGYPRQHVRKYKGISSRIPVSSGFMVQMLTGIYFAFYNGEWDLAQKALDDIIYRAQLELYPEPLLVANAIKASLPHGPMKSNKEGTRCIQVEITPTSSRISRNAVTSMSIRGHRWKRHGNTELTGQEELMEISEVDEGFYSRAASSTSQSGLSNSSHNCSNKPSIGKNHRRSGGSKTGGKEKETTGESCKDHFARKQTQRAQSENLELLSLKRLTLTTSQSLPKPSSHGLAKTAATVFSKSFEQVSGVTVPHNPSSAVGCGAGTDANRFSACSLQEEKLIYVSERTELPMKHQSGQQRPPSISITLSTD

SEQ ID NO: 40702 - protein, 300 aa, Homo sapiens
MEVWESSGQWMFSVYSPVKKKPNISGFTDISPEELRLEYHNFLTSNNLQSYLNSVQRLINQWRNRVNELKSLNISTKVALLSDVKDGVNQAAPAFGFGSSQAATFMSPGFPVNNSSSDNAQNFSFKTNSGFAAASSGSPAGFGSSPAFGAAASTSSGISTSAPAFGFGKPEVTSAASFSFKSPAASSFGSPGFSGLPASLATGPVRAPVAPAFGGGSSVAGFGSPGSHSHTAFSKPSSDTFGNSSISTSLSASSSIIATDNVLFTPRDKLTVEELEQFQSKKFTLGKIPLKPPPLELLNV

SEQ ID NO: 40703 - protein, 886 aa, Homo sapiens
MSDEKNLGVSQKLVSPSRSTSSCSSKQGSRQDSWEVVEGLRGEMNYTQEPPVQKGFLLKKRKWPLKGWHKRFFYLDKGILKYAKSQTDIEREKLHGCIDVGLSVMSVKKSSKCIDLDTEEHIYHLKVKSEEVFDEWVSKLRHHRMYRQNEIAMFPHEVNHFFSGSTITDSSSGVFDSISSRKRSSISKQNLFQTGSNVSFSCGGETRVPLWLQSSEDMEKCSKDLAHCHAYLVEMSQLLQSMDVLHRTYSAPAINAIQGGSFESPKKEKRSHRRWRSRAIGKDAKGTLQVPKPFSGPVRLHSSNPNLSTLDFGEEKNYSDGSETSSEFSKMQEDLCHIAHKVYFTLRSAFNIMSAEREKLKQLMEQDASSSPSAQVIGLKNALSSALAQNTDLKERLRRIHAESLLLDSPAVAKSGDNLAEENSRDENRALVHQLSNESRLSITDSLSEFFDAQEVLLSPSSSENEISDDDSYVSDISDNLSLDNLSNDLDNERQTLGPVLDSGREAKSRRRTCLPAPCPSSSNISLWNILRNNIGKDLSKVAMPVELNEPLNTLQRLCEELEYSELLDKAAQIPSPLERMVYVAAFAISAYASSYYRAGSKPFNPVLGETYECIREDKGFQFFSEQVSHHPPISACHAESRNFVFWQDVRWKNKFWGKSMEIVPIGTTHVTLPVFGDHFEWNKVTSCIHNILSGQRWIEHYGEIVIKNLHDDSCYCKVNFIKAKYWSTNAHEIEGTVFDRSGKAVHRLFGKWHESIYCGGGSSSACVWRANPMPKGYEQYYSFTQFALELNEMDPSSKSLLPPTDTRFRPDQRFLEEGNLEEAEIQKQRIEQLQRERRRVLEENHVEHQPRFFRKSDDDSWVSNGTYLELRKDLGFSKLDHPVLW

SEQ ID NO: 40704 - protein, 855 aa, Homo sapiens
MSDEKNLGVSQKLVSPSRSTSSCSSKQGSRQDSWEVVEGLRGEMNYTQEPPVQKGFLLKKRKWPLKGWHKRFFYLDKGILKYAKSQTDIEREKLHGCIDVGLSVMSVKKSSKCIDLDTEEHIYHLKVKSEEVFDEWVSKLRHHRMYRQNEIAMFPHEVNHFFSGSTITDSSSGVFDSISSRKRSSISKQNLFQTGSNVSFSCGGETRVPLWLQSSEDMEKCSKDLAHCHAYLVEMSQLLQSMDVLHRTYSAPAINAIQVPKPFSGPVRLHSSNPNLSTLDFGEEKNYSDGSETSSEFSKMQEDLCHIAHKVYFTLRSAFNIMSAEREKLKQLMEQDASSSPSAQVIGLKNALSSALAQNTDLKERLRRIHAESLLLDSPAVAKSGDNLAEENSRDENRALVHQLSNESRLSITDSLSEFFDAQEVLLSPSSSENEISDDDSYVSDISDNLSLDNLSNDLDNERQTLGPVLDSGREAKSRRRTCLPAPCPSSSNISLWNILRNNIGKDLSKVAMPVELNEPLNTLQRLCEELEYSELLDKAAQIPSPLERMVYVAAFAISAYASSYYRAGSKPFNPVLGETYECIREDKGFQFFSEQVSHHPPISACHAESRNFVFWQDVRWKNKFWGKSMEIVPIGTTHVTLPVFGDHFEWNKVTSCIHNILSGQRWIEHYGEIVIKNLHDDSCYCKVNFIKAKYWSTNAHEIEGTVFDRSGKAVHRLFGKWHESIYCGGGSSSACVWRANPMPKGYEQYYSFTQFALELNEMDPSSKSLLPPTDTRFRPDQRFLEEGNLEEAEIQKQRIEQLQRERRRVLEENHVEHQPRFFRKSDDDSWVSNGTYLELRKDLGFSKLDHPVLW

SEQ ID NO: 40705 - protein, 246 aa, Homo sapiens [sequence omitted]

SEQ ID NO: 40706 - protein, 227 aa, Homo sapiens
MENALTGSQSSHASLRNIHSINPTQLMARIESYEGREKKGISDVRRTFCLFVTFDLLFVTLLWIIELNVNGGIENTLEKEVMQYDYYSSYFDIFLLAVFRFKVLILAYAVCRLRHWWAIALTTAVTSAFLLAKVILSKLFSQGAFGYVLPIISFILAWIETWFLDFKVLPQEAEEENRLLIVQDASERAALIPGGLSDGQFYSPPESEAGSEEAEEKQDSEKPLLEL

SEQ ID NO: 40707 - protein, 416 aa, Homo sapiens [sequence omitted]

SEQ ID NO: 40708 - protein, 33 aa, Homo sapiens
MKGLHSAWIAASRSIVYMQKCTVPGVKLLVFDF

SEQ ID NO: 40709 - protein, 42 aa, Homo sapiens
MEKRRGFILRTVTRTLRIAASRSIVYMQKCTVPGVKLLVFDF

SEQ ID NO: 40710 - protein, 446 aa, Homo sapiens [sequence omitted]

SEQ ID NO: 40711 - protein, 471 aa, Homo sapiens [sequence omitted]

SEQ ID NO: 40712 - protein, 72 aa, Homo sapiens
MHERPAYLYSLEIRGKGFDWPLLVKDFNLLRWLGANAFRTSHYPYAEEVMQMCDRYGIVVIDECPGVGLALP

SEQ ID NO: 40713 - protein, 156 aa, Homo sapiens
MTRLYKYVFCPETTDDEKKDLAIQKRIRALRWVTPQMLCVPVNEDIPEVSDMVVKAITDIIEMDSKRVPRDKLACITKCSKHIFNAIKITKNEPASADDFLPTLIYIVLKGNPPRLQSNIQYITRFCNPSRLMTGEDGYYFTNLRWFLPRLFPRLV

SEQ ID NO: 40714 - protein, 231 aa, Homo sapiens
MKRAGKRFEIACYKNKVVGWRSGVEKDLDEVLQTHSVFVNVSKGQVAKKEDLISAFGTDDQTEICKQILTKGEVQVSDKERHTQLEQMFRDIATIVADKCVNPETKRPYTVILIERAMKDIHYSVKTNKSTKQQALEVIKQLKEKMKIERAHMRLRFILPVNEGKKLKEKLKPLIKVIESEDYGQQLEIVCLIDPGCFREIDELIKKETKGKGSLEVLNLKDVEEGDEKFE

SEQ ID NO: 40715 - protein, 324 aa, Homo sapiens
MLRAFLFLSLFPHSQVLVYELLLGKGFRGGGGRWKALLGRHQARLKAELARLKVHRGVSRNEDLLEVGSRPGPASQLPRFVRVNTLKTCSDDVVDYFKRQGFSYQGRASSLDDLRALKGKHFLLDPLMPELLVFPAQTDLHEHPLYRAGHLILQDRASCLPAMLLDPPPGSHVIDACAAPGNKTSHLAALLKNQGSLPLTWMPSGWHPWPRCWPGLASLAVNWLRRTSWRSPPRIHATMRSTTSCWILPAVARVCRADSWRSPGQAHLARCVCMPWQGSSSEPCATHSLSLPCSGSSTPRAPSARRRMKTWCEMRCSRTRAPSG

SEQ ID NO: 40716 - protein, 306 aa, Homo sapiens
MLRWTRAWRLPREGLGPHGPSFARVPVAPSSSSGGRGGAEPRPLPLSYRLLDGEAALPAVVFLHGLFGSKTNFNSIAKILAQQTGRRVLTVDARNHGDSPHSPDMSYEIMSQDLQDLLPQLGLVPCVVVGHSMGGKTAMLLALQRPELVERLIAVDISPVESTGVSHFATYVAAMRAINIADELPRSRARKLADEQLSSVIQDMAVRQHLLTNLVEVDGRFVWRVNLDALTQHLDKILAFPQRQESYLGPTLFLLGGNSQFVHPSHHPEIMRLFPRAQMQTVPNAGHWIHADRPQDFIAAIRGFLV

SEQ ID NO: 40717 - protein, 247 aa, Homo sapiens [sequence omitted]

SEQ ID NO: 40718 - protein, 620 aa, Homo sapiens [sequence omitted]

SEQ ID NO: 40719 - protein, 837 aa, Homo sapiens
MTESREVIDLDPPAETSQEQEDLFIVKVEEEDCTWMQEYNPPTFETFYQRFRHFQYHEASGPREALSQLRVLCCEWLRPELHTKEQILELLVLEQFLTILPEEFQPWVREHHPESGEEAVAVIENIQRELEERRQQIVACPDVLPRKMATPGAVQESCSPHPLTVDTQPEQAPQKPRLLEENALPVLQVPSLPLKDSQELTASLLSTGSQKLVKIEEVADVAVSFILEEWGHLDQSQKSLYRDDRKENYGSITSMGYESRDNMELIVKQISDDSESHWVAPEHTERSVPQDPDFAEVSDLKGMVQRWQVNPTVGKSRQNPSQKRDLDAITDISPKQSTHGERGHRCSDCGKFFLQASNFIQHRRIHTGEKPFKCGECGKSYNQRVHLTQHQRVHTGEKPYKCQVCGKAFRVSSHLVQHHSVHSGERPYGCNECGKNFGRHSHLIEHLKRHFREKSQRCSDKRSKNTKLSVKKKISEYSEADMELSGKTQRNVSQVQDFGEGCEFQGKLDRKQGIPMKEILGQPSSKRMNYSEVPYVHKKSSTGERPHKCNECGKSFIQSAHLIQHQRIHTGEKPFRCEECGKSYNQRVHLTQHQRVHTGEKPYTCPLCGKAFRVRSHLVQHQSVHSGERPFKCNECGKGFGRRSHLAGHLRLHSREKSHQCRECGEIFFQYVSLIEHQVLHMGQKNEKNGICEEAYSWNLTVIEDKKIELQEQPYQCDICGKAFGYSSDLIQHYRTHTAEKPYQCDICRENVGQCSHTKQHQKIYSSTKSHQCHECGRGFTLKSHLNQHQRIHTGEKPFQCKECGMNFSWSCSLFKHLRSHERTDPINTLSVEGSLL

SEQ ID NO: 40720 - protein, 562 aa, Homo sapiens [sequence omitted]

SEQ ID NO: 40721 - protein, 472 aa, Homo sapiens [sequence omitted]

SEQ ID NO: 40722 - protein, 149 aa, Homo sapiens
MMMGCGESELKSADGEEAAAVPGPPPEPQVPQLRAPVPEPGLDLSLSPRPDSPQPRHGSPGRRKGRAERRGAARQRRQVSGGGWPPARDGLAPTWSLPCPLLPGPLPPDAALPGAVRAAACGAAGAGDARAEEQPGLGPGAAGRSREPL

SEQ ID NO: 40723 - protein, 479 aa, Homo sapiens
MAAKKGPGPGGGVSGGKAEAEAASEVWCRRVRELGGCSQAGNRHCFECAQRGVTYVDITVGSFVCTTCSGLLRGLNPPHRVKSISMTTFTEPEVVFLQSRGNEVCRKIWLGLFDARTSLVPDSRDPQKVKEFLQEKYEKKRWYVPPDQVKGPTYTKGSASTPVQGSIPEGKPLRTLLGDPAPSLSVAASTSSQPVSQSHARTSQARSTQPPPHSSVKKASTDLLADIGGDPFAAPQMAPAFAAFPAFGGQTPSQGGFANFDAFSSGPSSSVFGSLPPAGQASFQAQPTPAGSSQGTPFGATPLAPASQPNSLADVGSFLGPGVPAAGVPSSLFGMAGQVPPLQSVTMGGGGGSSTGLAFGAFTNPFTAPAAQSPLPSTNPFQPNGLAPGPGFGMSSAGPGFPQAVPPTGAFASSFPAPLFPPQTPLVQQQNGSSFGDLGSAKLGQRPLSQPAGISTNPFMTGPSSSPFASKPPTTNPFL

SEQ ID NO: 40724 - protein, 651 aa, Homo sapiens
MDDLGTMISQIEEIERHLAYLKWISQIEELSDNIQQYLMTNNVPEAASTLVSMAELDIKLQESSCTHLLGFMRATVKFWHKILKDKLTSDFEEILAQLHWPFIAPPQSQTVGLSRPASAPEIYSYLETLFCQLLKLQTSDELLTEPKQLPEKYSLPASPSVILPIQVMLTPLQKRFRYHFRGNRQTNVLSKPEWYLAQVLMWIGNHTEFLDEKIQPILDKVGSLVNARLEFSRGLMMLVLEKLATDIPCLLYDDNLFCHLVDEVLLFERELHSVHGYPGTFASCMHILSEETCFQRWLTVERKFALQKMDSMLSSEAAWVSQYKDITDVDEMKVPDCAETFMTLLLVITDRYKNLPTASRKLQFLELQKDLVDDFRIRLTQVMKEETRASLGFRYCAILNAVNYISTVLADWADNVFFLQLQQAALEVFAENNTLSKLQLGQLASMESSVFDDMINLLERLKHDMLTRQVDHVFREVKDAAKLYKKERWLSLPSQSEQAVMSLSSSACPLLLTLRDHLLQLEQQLCFSLFKIFWQMLVEKLDVYIYQEIILANHFNEGGAAQLQFDMTRNLFPLFSHYCKRPENYFKHIKEACIVLNLNVGSALLLKDVLQSASGQLPATAALNEVGIYKLAQQDVEILLNLRTNWPNTGK

SEQ ID NO: 40725 - protein, 231 aa, Homo sapiens
MKRRRRRRPVAPATAARGGDFRAEDGAGLEAREEKVVYSRSQLSLADSTKALGDAFKLFMPRSTEFMSSDAELWSFLCSLKHQFSPHILRSKDVYGYSSCRALVPDPPGPPTARGQARRPVPRAAARRRRRGARAAAARRRKPRPPPPPPPPPEESCPAKPVAPGPCFGGRTLEEIWRAATPTLTTFPTIRVGSDVWGERSLAAARRRARQVLRVNLEPMVRLRRFPVPRA

SEQ ID NO: 40726 - protein, 829 aa, Homo sapiens
MEGGGGSVAVAGLGARGSGAAAATVRELLQDGCYSDFLNEDFDVKTYTSQSIHQAVIAEQLAKLAQGISQLDRELHLQVVARHEDLLAQATGIESLEGVLQMMQTRIGALQGAVDRIKAKIVEPYNKIVARTAQLARLQVACDLLRRIIRILNLSKRLQGQLQGGSREITKAAQSLNELDYLSQGIDLSGIEVIENDLLFIARARLEVENQAKRLLEQGLETQNPTQVGTALQVFYNLGTLKDTITSVVDGYCATLEENINSALDIKVLTQPSQSAVRGGPGRSTMPTPGNTAALRASFWTNMEKLMDHIYAVCGQVQHLQKVLAKKRDPVSHICFIEEIVKDGQPEIFYTFWNSVTQALSSQFHMATNSSMFLKQAFEGEYPKLLRLYNDLWKRLQQYSQHIQGNFNASGTTDLYVDLQHMEDDAQDIFIPKKPDYDPEKALKDSLQPYEAAYLSKSLSRLFDPINLVFPPGGRNPPSSDELDGIIKTIASELNVAAVDTNLTLAVSKNVAKTIQLYSVKSEQLLSTQGDASQVIGPLTEGQRRNVAVVNSLYKLHQSVTKVVSSQSSFPLAAEQTIISALKAIHALMENAVQPLLTSVGDAIEAIIITMHQEDFSGSLSSSGKPDVPCSLYMKELQGFIARVMSDYFKHFECLDFVFDNTEAIAQRAVELFIRHASLIRPLGEGGKMRLAADFAQMELAVGPFCRRVSDLGKSYRMLRSFRPLLFQASEHVASSPALGDVIPFSIIIQFLFTRAPAELKSPFQRAEWSHTRFSQWLDDHPSEKDRLLLIRGALEAYVQSVRSREGKEFAPVYPIMVQLLQKAMSALQ

SEQ ID NO: 40727 - protein, 178 aa, Homo sapiens
MVKQVRNQVETPGFSVSIKIRIHDDLKRTVDLCQKAEATGVSWITVHGRTAEERHQPVHYDSIKIIKENMSIPVIANGDIRSLKEAENVWRITGTDGVMVARGLLANPAMFAGYEETPLKCIWDWVDIALELGTPYMCFHQHLMYMMEKITSRQEKRVFNALSSTSAIIDYLTDHYGI

SEQ ID NO: 40728 - protein, 348 aa, Homo sapiens
MCPGCSDPVQRIEQCTRGSLFMCSIVQGCKRTYLSQRDLQAHINHRHMRAGKPVTRASLENVHPPIAPPPTEIPERFIMPPDKHHMSHIPPKQHIMMPPPPLQHVPHEHYNQPHEDIRAPPAELSMAPPPPRSVSQETFRISTRKHSNLITVPIQDDSNSGAREPPPPAPAPAHHHPEYQGQPVVSHPHHIMPPQQHYAPPPPPPPPISHPMPHPPQAAGTPHLVYSQAPPPPMTSAPPPITPPPGHIIAQMPPYMNHPPPGPPPPQHGGPPVTAPPPHHYNPNSLPQFTEDQGTLSPPFTQPGGMSPGIWPAPRGPPPPPRLQGPPSQTPLPGPHHPDQTRYRPYYQ

SEQ ID NO: 40729 - protein, 271 aa, Homo sapiens [sequence omitted]

SEQ ID NO: 40730 - protein, 368 aa, Homo sapiens
MTPRIELVVAPAGVTLKEANEILQRSKKGKLPIVNDCDELVAIIARTDLKKNRDYPLASKDSQKQLLCGAAVGTREDDKYRLDLLTQAGVDVIVLDSSQGNSVYQIAMVHYIKQKYPHLQVIGGNVVTAAQAKNLIDAGVDGLRVGMGCGSICITQEVMACGRPQGTAVYKVAEYARRFGVPIIADGGIQTVGHVVKALALGASTVMMGSLLAATTEAPGEYFFSDGVRLKKYRGMGSLDAMEKSSSSQKRYFSEGDKVKIAQGVSGSIQDKGSIQKFVPYLIAGIQHGCQDIGARSLSVLRSMMYSGELKFEKRTMSAQIEGGVHGLHSYTFLPFTKSGCTEDSGGGRGGGGDAPQCPLLGTASLHN

SEQ ID NO: 40731 - protein, 87 aa, Homo sapiens
MGASAWHVYTLTVSLGSQVLIRFPMQRNLVVIPKSVTPERIAENFKVFDFELSSQDMTTLLSYNRNWRVCALLSCTSHKDYPFHEEF

SEQ ID NO: 40732 - protein, 33 aa, Homo sapiens [sequence omitted]

SEQ ID NO: 40733 - protein, 1922 aa, Homo sapiens
MEGKPRAGVALAPGPSGRRPSARCARRRRPGLLLPGLWLLLLARPASCAPDELSPEQHNLSLYSMELVLKKSTGHSAAQVALTETAPGSQHSSPLHVTAPPSATTFDTAFFNQGKQTKSTADPSIFVATYVSVTSKEVAVNDDEMDNFLPDTHWTTPRMVSPIQYITVSPPGLPREALEPMLTPSLPMVSLQDEEVTSGWQNTTRQPAAYAESASHFHTFRSAFRTSEGIVPTPGRNLVLYPTDAYSHLSSRTLPEIVASLTEGVETTLFLSSRSLMPQPLGDGITIPLPSLGEVSQPPEEVWATSADRYTDVTTVLSQSLEETISPRTYPTVTASHAALAFSRTHSPLLSTPLAFASSASPTDVSSNPFLPSDSSKTSELHSNSALPGPVDNTHILSPVSSFRPYTWCAACTVPSPQQVLATSLMEKDVGSGDGAETLCMTVLEESSISLMSSVVADFSEFEEDPQVFNTLFPSRPIVPLSSRSMEISETSVGISAEVDMSSVTTTQVPPAHGRLSVPASLDPTAGSLSVAETQVTPSSVTTAFFSVITSILLDSSFSVIANKNTPSLAVRDPSVFTPYSLVPSVESSLFSDQERSSFSEHKPRGALDFASSFFSTPPLELSGSISSPSEAPASLSLMPSDLSPFTSQSFSPLVETFTLFDSSDLQSSQLSLPSSTNLEFSQLQPSSELPLNTIMLLPSRSEVSPWSSFPSDSLEFVEASTVSLTDSEAHFTSAFIETTSYLESSLISHESAVTALVPPGSESFDILTAGIQATSPLTTVHTTPILTESSLFSTLTPPDDQISALDGHVSVLASFSKAIPTGTVLITDAYLPSGSSFVSEATPFPLPTELTVVGPSLTPTEVPLNTSTEVSTTSTGAATGGPLDSTLMGDAASQSPPESSAAPPLPSLRPVTAFTLEATVDTPTLATAKPPYVCDITVPDAYLITTVLARRAVQEYIITAIKEVLRIHFNRAVELKVYELFTDFTFLVTSGPFVYTAISVINVLINSKLVRDQTPLILSVKPSFLVPESRFQVQTVLQFVPPSVDTGFCNFTQRIEKGLMTALFEVRKHHQGTYNLTVQILNITISSSRVTPRRGPVNIIFAVKSTQGFLNGSEVSELLRNLSVVEFSFYLGYPVLQIAEPFQYPQLNLSQLLKSSWVRTVLLGVMEKQLQNEVFQAEMERKLAQLLSEVSTRRRMWRRATVAAGNSVVQVVNVSRLEGDDNPVQLIYFVEDQDGERLSAVKSSDLINKMDLQRAAIILGYRIQGVIAQPVDRVKRPSPESQSNNLWVIVGVVIPVLVVMVIVVILYWKLCRTDKLDFQPDTVANIQQRQKLQIPSVKGFDFAKQHLGQHNKDDILIIHEPAPLPGPLKDHTTPSENGDVPSPKSKIPSKNVRHRGRVSPSDADSTVSEESSERDAGDKTPGAVNDGRSHRAPQSGPPLPSSGNEQHSSASIFEHVDRISRPPEASRRVPSKIQLIAMQPIPAPPVQRPSPADRVAESNKINKEIQTALRHKSEIEHHRNKIRLRAKRRGHYEFPVVDDLSSGDTKERHRVYRRAQMQIDKILDPTASVPSVFIEPRKSSRIKRSPKPRRKHQVNGCPADAEKDRLITTDSDGTYRRPPGVHNSAYIGCPSDPDLPADVQTPSSVELGRYPALPFPASQYIPPQPSIEEARQTMHSLLDDAFALVAPSSQPASTAGVGPGVPPGLPANSTPSQEERRATQWGSFYSPAQTANNPCSRYEDYGMTPPTGPLPRPGFGPGLLQSTELVPPDPQQPQASAEAPFAARGIYSEEMPSVARPRPVGGTTGSQIQHLTQVGIASRIGAQPVEIPPSRGSQYGGPGWPSYGEDEAGRREAVPRTSGREPSAPSGNLPHRGLQGPGLGYPTSSTEDLQPGHSSASLIKAIREELLRLSQKQSTVQNFHS

SEQ ID NO: 40734 - protein, 670 aa, Homo sapiens
MGLSADALERLLRQRGRFVVAVRAGGAAAAPERVVLAASPLRLCRAHQGSKPGCVGLCAQLHLCRFMVYGACKFLRAGKNCRNSHSLTTEHNLSVLRTHGVDHLSYNELCQLLFQNDPWLLPEICQHYNKGDGPHGSCAFQKQCIKLHICQYFLQGECKFGTSCKRSHDFSNSENLEKLEKLGMSSDLVSRLPTIYRNAHDIKNKSSAPSRVPPLFVPQGTSERKDSSGSVSPNTLSQEEGDQICLYHIRKSCSFQDKCHRVHFHLPYRWQFLDRGKWEDLDNMELIEEAYCNPKIERILCSESASTFHSHCLNFNAMTYGATQARRLSTASSVTKPPHFILTTDWIWYWSDEFGSWQEYGRQGTVHPVTTVSSSDVEKAYLAYCTPGSDGQAATLKFQAGKHNYELDFKAFVQKNLVYGTTKKVCRRPKYVSPQDVTTMQTCNTKFPGPKSIPDYWDSSALPDPGFQKITLSSSSEEYQKVWNLFNRTLPFYFVQKIERVQNLALWEVYQWQKGQMQKQNGGKAVDERQLFHGTSAIFVDAICQQNFDWRVCGVHGTSYGKGSYFARDAAYSHHYSKSDTQTHTMFLARVLVGEFVRGNASFVRPPAKEGWSNAFYDSCVNSVSDPSIFVIFEKHQVYPEYVIQYTTSSKPSVTPSILLALGSLFSSRQ

SEQ ID NO: 40735 - protein, 248 aa, Homo sapiens
MVAVGGCRCQPGYQPARGDKACQACPRGLYKASAGNAPCSPCPARSHAPNPAAPVCPCLEGFYRASSDPPEAPCTGPPSAPQELWFEVQGSALMLHWRLPRELGGRGDLLFNVVCKECEGRQEPASGGGGTCHRCRDEVHFDPRQRGLTESRVLVGGLRAHVPYILEVQAVNGVSELSPDPPQAAAINVSTSHEGELFSLAFRIPCLRSFEPPSLLLISSLVHPCRPPLKADPAPRDSYPHNNFPFAL

SEQ ID NO: 40736 - protein, 687 aa, Homo sapiens
MLLISEQGCLDKTRRTTSPPTDEQLNMKNTGKLLCFDDEGTPRTKEEDCRLNGPQKQDLCAALRGKERKILLAQTATFQSPSLRETEILNKKVSITAYDPDKKDLRHKPRETPGRLEIPTGPRCYSCYVCRKVFQVRRDLLKHKRSHSKSQLCRYPKYKNSSRGKSELRRTQRLLCQKKRFQCSECEKSYFLKGSLVTHQVVHTGQRPYPCPECDKTFRYRANLKKHLCLHRGERPFCCGECGRAFVQQCELTEHLRLHSGEKPFQCPQCDRCFRLKRGMKVHLTQHSGKRPFHCPECGRSFSRKAALKTHQRTHSEEKPFSCGECGRKFIYKIKLDEHIRVHTGEKPFSCPECNKSFRLKRSLKAHGLQHIGKRPFQCPECSRGFFWRNAMRAHQRLHSEQKPFPCAECGKRFTRPSKLACHTRVHDRQKEFPCGECKKTFSQQSRLTQHLKVHTTEKPFSCAECGRSFRRRAHLTEHTRLHSGEEPFQCPECDKSFSWKASMKFHQRMHRDEKPFACGECDKTYTHQSQLTEHLRLHSGEKPYQCPECEKTFRLKGNLKSHLLQHSGQKPFSCVMCGKSFTQQYRLTEHIRVHSGEKPFQCPECDKSYCIRGSLKVHLYKHSGERPFQCPECGKGFLQKRSLKAHLCLHSGERPFSCDECGRSFTYVGALKTHIAVHAKEKPSSL

SEQ ID NO: 40737 - protein, 998 aa, Homo sapiens [sequence omitted]

SEQ ID NO: 40738 - protein, 166 aa, Homo sapiens
MRCIAVFVGINHASAKLDFANNVQLSLTLAALSLGLWWTFDRSRSGLGLGITIAFLATLITQFLVYNGVYQYTSPDFLYIRSWLPCIFFSGGVTVGNIGRQLAMLIPFCEELNLKTTWLFHKTRSNYRVFLKSPIVIESSKPPILRARKILEENLTVDYDKDYLFS

SEQ ID NO: 40739 - protein, 1393 aa, Homo sapiens
MSACSDFVEHIWKPGSCKNCFCLRSDHQLVAGPPQPRAGSLPPPPRLPPRPENCRLEDEGVNSSPYSKPTIAVKPTMMSSEASDVWTEANLSAEVSQVIWRRAPGKLPLPKQEDAPVVYLGSFRGVQKPAGPSTSPDGNSRCPPAYTMVGLHNLEPRGERNIAFHPVSFPEEKAVHKEKPSFPYQDRPSTQESFRQKLAAFAGTTSGCHQGPGPLRESLPSEDDSDQRCSPSGDSEGGEYCSILDCCPGSPVAKAASQTAGSRGRHGGRDCSPTCWEQGKCSGPAEQEKRGPSFPKECCSQGPTAHPSCLGPKKLSLTSEAAISSDGLSCGSGSGSGSGASSPFVPHLESDYCSLMKEPAPEKQQDPGCPGVTPSRCLGLTGEPQPPAHPREATQPEPIYAESTKRKKAAPVPSKSQAKIEHAAAAQGQGQVCTGNAWAQKAASGWGRDSPDPTPQVSATITVMAAHPEEDHRTIYLSSPDSAVGVQWPRGPVSQNSEVGEEETSAGQGLSSRESHAHSASESKPKERPAIPPKLSKSSPVGSPVSPSAGGPPVSPLADLSDGSSGGSSIGPQPPSQGPADPAPSCRTNGVAISDPSRCPQPAASSASEQRRPRFQAGTWSRQCRIEEEEEVEQELLSHSWGRETKNGPTDHSNSTTWHRLHPTDGSSGQNSKVGTGMSKSASFAFEFPKDRSGIETFSPPPPPPKSRHLLKMNKSSSDLEKVSQGSAESLSPSFRGVHVSFTTGSTDSLASDSRTCSDGGPSSELAHSPTNSGKKLFAPVPFPSGSTEDVSPSGPQQPPPLPQKKIVSRAASSPDGFFWTQGSPKPGTASPKLNLSHSETNVHDESHFSYSLSPGNRHHPVFSSSDPLEKAFKGSGHWLPAAGLAGNRGGCGSPGLQCKGAPSASSSQLSVSSQASTGSTQLQLHGLLSNISSKEGTYAKLGGLYTQSLARLVAKCEDLFMGGQKKELHFNENNWSLFKLTCNKPCCDSGDAIYYCATCSEDPGSTYAVKICKAPEPKTVSYCSPSVPVHFNIQQDCGHFVASVPSSMLSSPDAPKDPVPALPTHPPAQEQDCVVVITREVPHQTASDFVRDSAASHQAEPEAYERRVCFLLLQLCNGLEHLKEHGIIHRDLCLENLLLVHCTLQAGPGPAPAPAPAPAPAAAAPPCSSAAPPAGGTLSPAAGPASPEGPREKQLPRLIISNFLKAKQKPGGTPNLQQKKSQARLAPEIVSASQYRKFDEFQTGILIYELLHQPNPFEVRAQLRERDYRQEDLPPLPALSLYSPGLQQLAHLLLEADPIKRIRIGEAKRVLQCLLWGPRRELVQQPGTSEEALCGTLHNWIDMKRALMMMKFAEKAVDRRRGVELEDWLCCQYLASAEPGALLQSLKLLQLL

SEQ ID NO: 40740 - protein, 284 aa, Homo sapiens [sequence omitted]

SEQ ID NO: 40741 - protein, 757 aa, Homo sapiens [sequence omitted]

SEQ ID NO: 40742 - protein, 281 aa, Homo sapiens
MVLYINTKFSFLIGEIISFNIFYELFTICTSIVAEDKKGHLIHGRNMDFGVFLGWNINNDTWVITEQLKPLTVNLDFQRNNKTVFKASSFAGYVGMLTGFKPGLFSLTLNERFSINGGYLGILEWILGKKDVMWIGFLTRTVLENSTSYEEAKNLLTKTKILAPAYFILGGNQSGEGCVITRDRKESLDVYELDAKQGRWYVVQTNYDRWKHPFFLDDRRTPAKMCLNRTSQENISFETMYDVLSTKPVLNKLTVYTTLIDVTKGQFETYLRDCPDPCIGW

SEQ ID NO: 40743 - protein, 375 aa, Homo sapiens [sequence omitted]

SEQ ID NO: 40744 - protein, 723 aa, Homo sapiens
MDYERPNVETIKCVVVGDNAVGKTRLICARACNATLTQYQLLATHVPTVWAIDQYRVCQEVLERSRDVVDDVSVSLRLWDTFGDHHKDRRFAYGRSDVVVLCFSIANPNSLHHVKTMWYPEIKHFCPRAPVILVGCQLDLRYADLEAVNRARRPLARPIKPNEILPPEKGREVAKELGIPYYETSVVAQFGIKDVFDNAIRAALISRRHLQFWKSHLRNVQRPLLQAPFLPPKPPPPIIVVPDPPSSSEECPAHLLEDPLCADVILVLQERVRIFAHKIYLSTSSSKFYDLFLMDLSEGELGGPSEPGGTHPEDHQGHSDQHHHHHHHHHGRDFLLRAASFDVCESVDEAGGSGPAGLRASTSDGILRGNGTGYLPGRGRVLSSWSRAFVSIQEEMAEDPLTYKSRLMVVVKMDSSIQPGPFRAVLKYLYTGELDENERDLMHIAHIAELLEVFDLRMMVANILNNEAFMNQEITKAFHVRRTNRVKECLAKGTFSDVTFILDDGTISAHKPLLISSCDWMAAMFGGPFVESSTREVVFPYTSKSCMRAVLEYLYTGMFTSSPDLDDMKLIILANRLCLPHLVALTEQYTVTGLMEATQMMVDIDGDVLVFLELAQFHCAYQLADWCLHHICTNYNNVCRKFPRDMKAMSPENQEYFEKHRWPPVWYLKEEDHYQRARKEREKEDYLHLKRQPKRRWLFWNSPSSPSSSAASSSSPSSSSAVV

SEQ ID NO: 40745 - protein, 423 aa, Homo sapiens [sequence omitted]

SEQ ID NO: 40746 - protein, 211 aa, Homo sapiens
MATRFGSTLQLDLEKGKESLLEKRLVAEEEEDEEEVEEDGPSSCSEDDYSELLQEITDNLTKKEIQIEKIHLDTSSFVEELPGEKDLAHVVEIYDFEPALKTEDLLATFSEFQEKGFRIQWVDDTHALGIFPCLASAAEALTREFSVLKIRPLTQGTKQSKLKALQRPKLLRLVKERPQTNATVARRLVARALGLQHKKKERPAVRGPLPP

SEQ ID NO: 40747 - protein, 1831 aa, Homo sapiens
MYEGWYRGYTLQNKSKKGIFPETYIHLKEATVEDLGQHETVIPGELPLVQELTSTLREWAVIWRKLYVNNKLTLFRQLQQMTYSLIEWRSQILSGTLPKDELAELKKKVTAKIDHGNRMLGLDLVVRDDNGNILDPDETSTIALFKAHEVASKRIEEKIQEEKSILQNLDLRGQSIFSTIHTYGLYVNFKNFVCNIGEDAELFMALYDPDQSTFISENYLIRWGSNGMPKEIEKLNNLQAVFTDLSSMDLIRPRVSLVCQIVRVGHMELKEGKKHTCGLRRPFGVAVMDITDIIHGKVDDEEKQHFIPFQQIAMETYIRQRQLIMSPLITSHVIGENEPLTSVLNKVIAAKEVNHKGQGLWVSLKLLPGDLTQVQKNFSHLVDRSTAIARKMGFPEIILPGDVRNDIYVTLIHGEFDKGKKKTPKNVEVTMSVHDEEGKLLEKAIHPGAGYEGISEYKSVVYYQVKQPCWYETVKVSIAIEEVTRCHIRFTFRHRSSQETRDKSERAFGVAFVKLMNPDGTTLQDGRHDLVVYKGDNKKMEDAKFYLTLPGTKMEMEEKELQASKNLVTFTPSKDSTKDSFQIATLICSTKLTQNVDLLGLLNWRSNSQNIKHNLKKLMEVDGGEIVKFLQDTLDALFNIMMEMSDSETYDFLVFDALVFIISLIGDIKFQHFNPVLETYIYKHFSATLAYVKLSKVLNFYVANADDSSKTELLFAALKALKYLFRFIIQSRVLYLRFYGQSKDGDEFNNSIRQLFLAFNMLMDRPLEEAVKIKGAALKYLPSIINDVKLVFDPVELSVLFCKFIQSIPDNQLVRQKLNCMTKIVESTLFRQSECREVLLPLLTDQLSGQLDDNSNKPDHEASSQLLSNILEVLDRKDVGATAVHIQLIMERLLRRINRTVIGMNRQSPHIGSFVACMIALLQQMDDSHYSHYISTFKTRQDIIDFLMETFIMFKDLIGKNVYAKDWMVMNMTQNRVFLRAINQFAEVLTRFFMDQASFELQLWNNYFHLAVAFLTHESLQLETFSQAKRNKIVKKYGDMRKEIGFRIRDMWYNLGPHKIKFIPSMVGPILEVTLTPEVELRKATIPIFFDMMQCEFNFSGNGNFHMFENELITKLDQEVEGGRGDEQYKVLLEKLLLEHCRKHKYLSSSGEVFALLVSSLLENLLDYRTIIMQDESKENRMSCTVNVLNFYKEKKREDIYIRYLYKLRDLHRDCENYTEAAYTLLLHAELLQWSDKPCVPHLLQKDSYYVYTQQELKEKLYQEIISYFDKGKMWEKAIKLSKELAETYESKVFDYEGLGNLLKKRASFYENIIKAMRPQPEYFAVGYYGQGFPSFLRNKIFIYRGKEYERREDFSLRLLTQFPNAEKMTSTTPPGEDIKSSPKQYMQCFTVKPVMSLPPSYKDKPVPEQILNYYRANEVQQFRYSRPFRKGEKDPDNEFATMWIERTTYTTAYTFPGILKWFEVKQISTEEISPLENAIETMELTNERISNCVQQHAWDRSLSVHPLSMLLSGIVDPAVMGGFSNYEKAFFTEKYLQEHPEDQEKVELLKRLIALQMPLLTEGIRIHGEKLTEQLKPLHERLSSCFRELKEKVEKHYGVITLPPNLTERKQSRTGSIVLPYIMSSTLRRLSITSVTSSVVSTSSNSSDNAPSRPGSDGSILEPLLERRASSGARVEDLSLREENSENRISKFKRKDWSLSKSQVIAEKAPEPDLMSPTRKAQRPKSLQLMDNRLSPFHGSSPPQSTPLSPPPLTPKATRTLSSPSLQTDGIAATPVPPPPPPKSKPYEGSQRNSTELAPPLPVRREAKAPPPPPPKARKSGIPTSEPGSQ

SEQ ID NO: 40748 - protein, 448 aa, Homo sapiens
MKTLLLFVGLLLTWESGQVLGDQTVSDNELQEMSNQGSKYVNKEIQNAVNGVKQIKTLIEKTNEERKTLLSNLEEAKKKKEDALNETRESETKLKELPGVCNETMMALWEECKPCLKQTCMKFYARVCRSGSGLVGRQLEEFLNQSSPFYFWMNGDRIDSLLENDRQQTHMLDVMQDHFSRASSIIDELFQDRFFTREPQDTYHYLPFSLPHRRPHFFFPKSRIVRSLMPFSPYEPLNFHAMFQPFLEMIHEAQQAMDIHFHSPAFQHPPTEFIREGDDDRTVCREIRHNSTGCLRMKDQCDKCREILSVDCSTNNPSQAKLRRELDESLQVAERLTRKYNELLKSYQWKMLNTSSLLEQLNEQFNWVSRLANLTQGEDQYYLRVTTVASHTSDSDVPSGVTEVVVKLFDSDPITVTVPVEVSRKNPKFMETVAEKALQEYRKKHREE

SEQ ID NO: 40749 - protein, 376 aa, Homo sapiens
MNRDENGGGAGGSGSHGTLGLPSGGKCLLLDCRPFLAHSAGYILGSVNVRCNTIVRRRAKGSVSLEQILPAEEEVRARLRSGLYSAVIVYDERSPRAESLREDSTVSLVVQALRRNAERTDICLLKGGYERFSSEYPEFCSKTKALAAIPPPVPPSATEPLDLGCSSCGTPLHDQGGPVEILPFLYLGSAYHAARRDMLDALGITALLNVSSDCPNHFEGHYQYKCIPVEDNHKADISSWFMEAIEYIDAVKDCRGRVLVHCQAGISRSATICLAYLMMKKRVRLEEAFEFVKQRRSIISPNFSFMGQLLQFESQVLATSCAAEAASPSGPLRERGKTPATPTSQFVFSFPVSVGVHSAPSSLPYLHSPITTSPSC

SEQ ID NO: 40750 - protein, 311 aa, Homo sapiens
MLLRDVKALTLHYDRYTTSRRLDPIPQLKCVGGTAGCDSYTPKVIQCQNKGWDGYDVQWECKTDLDIAYKFGKTVVSCEGYESSEDQYVLRGSCGLEYNLDYTELGLQKLKESGKQHGFASFSDYYYKWSSADSCNMSGLITIVVLLGIAFVVYKLFLSDGQYSPPPYSEYPPFSHRYQRFTNSAGPPPPGFKSEFTGPQNTGHGATSGFGSAFTGQQGYENSGPGFWTGLGTGGILGYLFGSNRAATPFSDSWYYPSYPPSYPGTWNRAYSPLHGGSGSYSDMVVPGDDKVESWSQTLDAEILDFSSLSL

SEQ ID NO: 40751 - protein, 135 aa, Homo sapiens
MLPFITSYKSVQTTLQTDEVKNVPCGTSGGVMIYFDRIEVVNFLVPNAVYDIVKNYTADYDKALIFNKIHHELNQFCSVHTLQEVYIELFDQIDENLKLALQQDLTSMAPGLVIQAVRVTKPNIPEAIRRNYELM

SEQ ID NO: 40752 - protein, 1331 aa, Homo sapiens
MRGAPARLLLPLLPWLLLLLAPEARGAPGCPLSIRSCKCSGERPKGLSGGVPGPARRRVVCSGGDLPEPPEPGLLPNGTVTLLLSNNKITGLRNGSFLGLSLLEKLDLRNNIISTVQPGAFLGLGELKRLDLSNNRIGCLTSETFQGLPRLLRLNISGNIFSSLQPGVFDELPALKVVDLGTEFLTCDCHLRWLLPWAQNRSLQLSEHTLCAYPSALHAQALGSLQEAQLCCEGALELHTHHLIPSLRQVVFQGDRLPFQCSASYLGNDTRIRWYHNRAPVEGDEQAGILLAESLIHDCTFITSELTLSHIGVWASGEWECTVSMAQGNASKKVEIVVLETSASYCPAERVANNRGDFRWPRTLAGITAYQSCLQYPFTSVPLGGGAPGTRASRRCDRAGRWEPGDYSHCLYTNDITRVLYTFVLMPINASNALTLAHQLRVYTAEAASFSDMMDVVYVAQMIQKFLGYVDQIKELVEVMVDMASNLMLVDEHLLWLAQREDKACSRIVGALERIGGAALSPHAQHISVNARNVALEAYLIKPHSYVGLTCTAFQRREGGVPGTRPGSPGQNPPPEPEPPADQQLRFRCTTGRPNVSLSSFHIKNSVALASIQLPPSLFSSLPAALAPPVPPDCTLQLLVFRNGRLFHSHSNTSRPGAAGPGKRRGVATPVIFAGTSGCGVGNLTEPVAVSLRHWAEGAEPVAAWWSQEGPGEAGGWTSEGCQLRSSQPNVSALHCQHLGNVAVLMELSAFPREVGGAGAGLHPVVYPCTALLLLCLFATIITYILNHSSIRVSRKGWHMLLNLCFHIAMTSAVFAGGITLTNYQMVCQAVGITLHYSSLSTLLWMGVKARVLHKELTWRAPPPQEGDPALPTPSPMLRFYLIAGGIPLIICGITAAVNIHNYRDHSPYCWLVWRPSLGAFYIPVALILLITWIYFLCAGLRLRGPLAQNPKAGNSRASLEAGEELRGSTRLRGSGPLLSDSGSLLATGSARVGTPGPPEDGDSLYSPGVQLGALVTTHFLYLAMWACGALAVSQRWLPRVVCSCLYGVAASALGLFVFTHHCARRRDVRASWRACCPPASPAAPHAPPRALPAAAEDGSPVFGEGPPSLKSSPSGSSGHPLALGPCKLTNLQLAQSQVCEAGAAAGGEGEPEPAGTRGNLAHRHPNNVHHGRRAHKSRAKGHRAGEACGKNRLKALRGGAAGALELLSSESGSLHNSPTDSYLGSSRNSPGAGLQLEGEPMLTPSEGSDTSAAPLSEAGRAGQRRSASRDSLKGGGALEKESHRRSYPLNAASLNGAPKGGKYDDVTLMGAEVASGGCMKTGLWKSETTV

SEQ ID NO: 40753 - protein, 576 aa, Homo sapiens
MGVTLEASAEADLKAGNSCPELVPSRRSKLRKPKPVPLRKKAIGGEFSDTNAAVEGTPLPKASYHFSPEELDENTSPLLGDARFQKSPPDLKETPGTLSSDTNDSGVELGEESRSSPLKLEFDFTEDTGNIEARKALPRKLGRKLGSTLTPKIQKDGISKSAGLEQPTDPVARDGPLSQTSSKPDPSQWESPSFNPFGSHSVLQNSPPLSSEGSYHFDPDNFDESMDPFKPTTTLTSSDFCSPTGNHVNEILESPKKAKSRLITSGCKVKKHETQSLALDACSRDEGAVISQISDISNRDGHATDEEKLASTSCGQKSAGAEVKGIEKETCQKMEEDGSTVLGLLESSAEKAPVSVSCGGESPLDGICLSESDKTAVLTLIREEIITKEIEANEWKKKYEETRQEVLEMRKIVAEYEKTIAQMIEDEQRTSMTSQKSFQQLTMEKEQALADLNSVERSLSDLFRRYENLKGVLEGFKKNEEALKKCAQDYLARVKQEEQRYQALKIHAEEKLDKANEEIAQVRTKAKAESAALHAGLRKEQMKVESLERALQQKNQEIEELTKICDELIAKLGKTD

SEQ ID NO: 40754 - protein, 146 aa, Homo sapiens
MILLVNYRPDEFIECEDPVDHVGNATASQELGYGCLKFGGQAYSDVEHTSVQCHALDGIECASPRTFLRENKPCIKYTGHYFITTLLYSFFLGCFGVDRFCLGHTGTAVGKLLTLGGLGIWWFVDLILLITGGLMPSDGSNWCTVY

SEQ ID NO: 40755 - protein, 94 aa, Homo sapiens
MPPLQTPVNLSVFCDHNYTVEDTMHQRKRIHQLEQQVEKLRKKLKTAQQRCRRQERQLEKLKEVVHFQKEKDDVSERGYVILPNDYFEIVEVPA

SEQ ID NO: 40756 - protein, 273 aa, Homo sapiens
MITAILQSRLARTSFDKNRFQNISEKLHMECKAEMVTPLVTNPGHVCITDTNLYFQPLNGYPKPVVQITLQDVRRIYKRRHGLMPLGLEVFCTEDDLCSDIYLKFYEPQDRDDLYFYIATYLEHHVAEHTAESYMLQWQRGHLSNYQYLLHLNNLADRSCNDLSQYPVFPWIIHDYSSSELDLSNPGTFRDLSKPVGALNKERLERLLTRYQEMPEPKFMYGSHYSSPGYVLFYLVRIAPEYMLCLQNGRFDNADRMFNRFDTNALLIIFNTF

SEQ ID NO: 40757 - protein, 263 aa, Homo sapiens [sequence omitted]

SEQ ID NO: 40758 - protein, 158 aa, Homo sapiens
MQKRLQKELLALQNDPPPGMTLNEKSVQNSITQWIVDMEGAPGTLYEGEKFQLLFKFSSRYPFDSPQVMFTGENIPVHPHVYSNGHICLSILTEDWSPALSVQSVCLSIISMLSSCKEKRRPPDNSFYVRTCNKNPKKTKWWYHEAAYHKDFSLLFKD

SEQ ID NO: 40759 - protein, 148 aa, Homo sapiens
MQKRLQKELLALQNDPPPGMTLNEKSVQNSITQWIVDMEGAPGTLYEGEKFQLLFKFSSRYPFDSPQVMFTGENIPVHPHVYSNGHICLSILTEDWSPALSVQSVCLSIISMLSSCKEKRRPPDNSFYVRTCNKNPKKTKWWYHDDTC

SEQ ID NO: 40760 - protein, 182 aa, Homo sapiens [sequence omitted]

SEQ ID NO: 40761 - protein, 287 aa, Homo sapiens
MKIFVKYFQKMADPWQECMDYAVTLARQAGEVVCEAIKNEMNVMLKSSPVDLVTATDQKVEKMLISSIKEKYPSHSFIGEESVAAGEKSILTDNPTWIIDPIDGTTNFVHRFPFVAVSIGFAVNKKIEFGVVYSCVEGKMYTARKGKGAFCNGQKLQVSQQEDITKSLLVTELGSSRTPETVRMVLSNMEKLFCIPVHGIRSVGTAAVNMCLVATGGADAYYEMGIHCWDVAGAGIIVTEAGGVLMDVTGGPFDLMSRRVIAANNRILAERIAKEIQVIPLQRDDED

SEQ ID NO: 40762 - protein, 573 aa, Homo sapiens
MLSAPCCDDRRMCVCPGPRRIGIPVRSSSLPLFSDAMPAPTQLFFPLIRNCELSRIYGTACYCHHKHLCCSSSYIPQSRLRYTPHPAYATFCRPKENWWQYTQGRRYASTPQKFYLTPPQVNSILKANEYSFKVPEFDGKNVSSILGFDSNQLPANAPIEDRRSAATCLQTRGMLLGVFDGHAGCACSQAVSERLFYYIAVSLLPHETLLEIENAVESGRALLPILQWHKHPNDYFSKEASKLYFNSLRTYWQELIDLNTGESTDIDVKEALINAFKRLDNDISLEAQVGDPNSFLNYLVLRVAFSGATACVAHVDGVDLHVANTGDSRAMLGVQEEDGSWSAVTLSNDHNAQNERELERLKLEHPKSEAKSVVKQDRLLGLLMPFRAFGDVKFKWSIDLQKRVIESGPDQLNDNEYTKFIPPNYHTPPYLTAEPEVTYHRLRPQDKFLVLATDGLWETMHRQDVVRIVGEYLTGMHHQQPIAVGGYKVTLGQMHGLLTERRTKMSSVFEDQNAATHLIRHAVGNNEFGTVDHERLSKMLSLPEELARMYRDDITIIVVQFNSHVVGAYQNQE

SEQ ID NO: 40763 - protein, 181 aa, Homo sapiens
MKIVDEREKNLDDKAYRNIKELENYAENTQSSLLYLTLEILGIKDLHADHAASHIGKAQGIVTCLRATPYHGSRRKVFLPMDICMLHGVSQEDFLRRNQDKNVRDVIYDIASQAHLHLKHARSFHKTVPVKAFPAFLQTVSLEDFLKKIQRVDFDIFHPSLQQKNTLLPLYLYIQSWRKTY

SEQ ID NO: 40764 - protein, 704 aa, Homo sapiens
MFTFLLTCIFLPLLRGHSLFTCEPITVPRCMKMAYNMTFFPNLMGHYDQSIAAVEMEHFLPLANLECSPNIETFLCKAFVPTCIEQIHVVPPCRKLCEKVYSDCKKLIDTFGIRWPEELECDRLQYCDETVPVTFDPHTEFLGPQKKTEQVQRDIGFWCPRHLKTSGGQGYKFLGIDQCAPPCPNMYFKSDELEFAKSFIGTVSIFCLCATLFTFLTFLIDVRRFRYPERPIIYYSVCYSIVSLMYFIGFLLGDSTACNKADEKLELGDTVVLGSQNKACTVLFMLLYFFTMAGTVWWVILTITWFLAAGRKWSCEAIEQKAVWFHAVAWGTPGFLTVMLLAMNKVEGDNISGVCFVGLYDLDASRYFVLLPLCLCVFVGLSLLLAGIISLNHVRQVIQHDGRNQEKLKKFMIRIGVFSGLYLVPLVTLLGCYVYEQVNRITWEITWVSDHCRQYHIPCPYQAKAKARPELALFMIKYLMTLIVGISAVFWVGSKKTCTEWAGFFKRNRKRDPISESRRVLQESCEFFLKHNSKVKHKKKHYKPSSHKLKVISKSMGTSTGATANHGTSAVAITSHDYLGQETLTEIQTSPETSMREVKADGASTPRLREQDCGEPASPAASISRLSGEQVDGKGQAGSVSESARSEGRISPKSDITDTGLAQSNNLQVPSSSEPSSLKGSTSLLVHPVSGVRKEQGGGCHSDT

SEQ ID NO: 40765 - protein, 123 aa, Homo sapiens
MVDFAMDVYKNLYSDDIPHALREKRTTVVAQLKQLQAETEPIVKMFEDPETTRQMQSTRDGRMLFDYLADKHGFRQEYLDTLYRYAKFQYECGNYSGAAEYLYFFRVLMESCYVAQADLKLLA

SEQ ID NO: 40766 - protein, 1189 aa, Homo sapiens
MNRKKGDKGFESPRPYKLTHQVVCINNINFQRKSVVGFVELTIFPTVANLNRIKLNSKQCRIYRVRINDLEAAFIYNDPTLEVCHSESKQRNLNYFSNAYAAAVSAVDPDAGNGELCIKVPSELWKHVDELKVLKIHINFSLDQPKGGLHFVVPSVEGSMAERGAHVFSCGYQNSTRFWFPCVDSYSELCTWKLEFTVDAAMVAVSNGDLVETVYTHDMRKKTFHYMLTIPTAASNISLAIGPFEILVDPYMHEVTHFCLPQLLPLLKHTTSYLHEVFEFYEEILTCRYPYSCFKTVFIDEAYVEVAAYASMSIFSTNLLHSAMIIDETPLTRRCLAQSLAQQFFGCFISRMSWSDEWVLKGISGYIYGLWMKKTFGVNEYRHWIKEELDKIVAYELKTGGVLLHPIFGGGKEKDNPASHLHFSIKHPHTLSWEYYSMFQCKAHLVMRLIENRISMEFMLQVFNKLLSLASTASSQKFQSHMWSQMLVSTSGFLKSISNVSGKDIQPLIKQWVDQSGVVKFYGSFAFNRKRNVLELEIKQDYTSPGTQKYVGPLKVTVQELDGSFNHTLQIEENSLKHDIPCHSKSRRNKKKKIPLMNGEEVDMDLSAMDADSPLLWIRIDPDMSVLRKVEFEQADFMWQYQLRYERDVVAQQESILALEKFPTPASRLALTDILEQEQCFYRVRMSACFCLAKIANSMVSTWTGPPAMKSLFTRMFCCKSCPNIVKTNNFMSFQSYFLQKTMPVAMALLRDVHNLCPKEVLTFILDLIKYNDNRKNKFSDNYYRAEMIDALANSVTPAVSVNNEVRTLDNLNPDVRLILEEITRFLNMEKLLPSYRHTITVSCLRAIRVLQKNGHVPSDPALFKSYAEYGHFVDIRIAALEAVVDYTKVDRSYEELQWLLNMIQNDPVPYVRHKILNMLTKNPPFTKNMESPLCNEALVDQLWKLMNSGTSHDWRLRCGAVDLYFTLFGLSRPSCLPLPELGLVLNLKEKKAVLNPTIIPESVAGNQEAANNPSSHPQLVGFQNPFSSSQDEEEIDMDTVHDSQAFISHHLNMLERPSTPGLSKYRPASSRSALIPQHSAGCDSTPTTKPQWSLELARKGTGKEQAPLEMSMHPAASAPLSVFTKESTASKHSDHHHHHHHEHKKKKKKHKHKHKHKHKHDSKEKDKEPFTFSSPASGRSIRSPSLSD

SEQ ID NO: 40767 - protein, 339 aa, Homo sapiens
MIQNDPVPYVRHKILNMLTKNPPFTKNMESPLCNEALVDQLWKLMNSGTSHDWRLRCGAVDLYFTLFGLSRPSCLPLPELGLVLNLKEKKAVLNPTIIPESVAGNQEAANNPSSHPQLVGFQNPEDDHLAKEASCNISAHQQGVKRKSDTPLGSPLEPGQILEKNEDSSKVKLKIRFSSSQDEEEIDMDTVHDSQAFISHHLNMLERPSTPGLSKYRPASSRSALIPQHSAGCDSTPTTKPQWSLELARKGTGKEQAPLEMSMHPAASAPLSVFTKESTASKHSDHHHHHHHEHKKKKKKHKHKHKHKHKHDSKEKDKEPFTFSSPASGRSIRSPSLSD

SEQ ID NO: 40768 - protein, 439 aa, Homo sapiens
MERESGKPVAVVAVVTEPWFTQRYREYLQRQKLFDTQHRVEKMPDGSVALPVLGETLPEQHLQELRNRVAPGSPCMLTQLPDPVPSKRAQGCSPAQKLCLEVSRWVEGRGVKWSAELEADLPRSWQRHGNLLLLSEDCFQAKQWKNLGPELWETVALALGVQRLAKRGRVSPDGTRTPAVTLLLGDHGWVEHVDNGIRYKFDVTQCMFSFGNITEKLRVASLSCAGEVLVDLYAGIGYFTLPFLVHAGAAFVHACEWNPHAVVALRNNLEINGVADRCQIHFGDNRKLKLSNIADRVILGLIPSSEEGWPIACQVLRQDAGGILHIHQNVESFPGKNLQALGVSKVEKEHWLYPQQITTNQWKNGATRDSRGKMLSPATKPEWQRWAESAETRIATLLQQVHGKPWKTQILHIQPVKSYAPHVDHIVLDLECCPCPSVG

SEQ ID NO: 40769 - protein, 363 aa, Homo sapiens
MSGASQPRGPALLFPATRGVPAKRLLDADDAAAVAAKCPRLSECSSPPDYLSPPGSPCSPQPPPAAPGAGGGSGSAPGPSRIADYLLLPLAEREHVSRALCIHTGRELRCKVFPIKHYQDKIRPYIQLPSHSNITGIVEVILGETKAYVFFEKDFGDMHSYVRSRKRLREEEAARLFKQIVSAVAHCHQSAIVLGDLKLRKFVFSTEERTQLRLESLEDTHIMKGEDDALSDKHGCPAYVSPEILNTTGTYSGKAADVWSLGVMLYTLLVGRYPFHDSDPSALFSKIRRGQFCIPEHISPKARCLIRSLLRREPSERLTAPEILLHPWFESVLEPGYIDSEIGTSDQIVPEYQEDSDISSFFC

SEQ ID NO: 40770 - protein, 1109 aa, Homo sapiens [sequence omitted]

SEQ ID NO: 40771 - protein, 390 aa, Homo sapiens [sequence omitted]

SEQ ID NO: 40772 - protein, 520 aa, Homo sapiens [sequence omitted]

SEQ ID NO: 40773 - protein, 599 aa, Homo sapiens
MNGPGQDDPEDADEAEAPDGGSRRDPRKSQDSRKPLQKKRKRSPKSGLGPADLALLGLSAERVWLDKSLFDQAESSYRQKLADVAAQAAWPPALAPWGLCTHGNQVACHHVTWGIWVNKSSFDQAERAFVEWSQALLLAPDGSRRQGTPNTGQQVAVPDLAHQPSPPVNGQPPLGSLQALVREVWLEKPRYDAAERGFYEALFDGHPPGKVRLQERAGLAEGARRGRRDRRGRNILGNKRAGLRRADGEAPSALPYCYFLQKDAEAPWLSKPAYDSAECRHHAAEALRVAWCLEAASLSHRPGPRSGLSVSSLRPNRKMATNFLAHEKIWFDKFKYDDAERRFYEQMNGPVAGASRQENGASVILRDIARARENIQKSLAGSSGPGASSGTSGDHGELVVRIASLEVENQSLRGVVQELQQAISKLEARLNVLEKSSPGHRATAPQTQHVSPMRQVEPPAKKPATPAEDDEDDDIDLFGSDNEEEDKEAAQLREERLRQYAEKKAKKPALVAKSSILLDVKPWDDETDMAQLEACVRSIQLDGLVWGASKLVPVGYGIRKLQIQCVVEDDKVGTDLLEEEITKFEEHVQSVDIAAFNKI

SEQ ID NO: 40774 - protein, 370 aa, Homo sapiens
MEHQRIHTGERLYVCNVCGKDFIHYSGLIEHQRVHSGEKPFKCAQCGKAFCHSSDLIRHQRVHTRERPFECKECGKGFSQSSLLIRHQRIHTGERPYECNECGKSFIRSSSLIRHYQIHTEVKQYECKECGKAFRHRSDLIEHQRIHTGERPFECNECGKAFIRSSKLIQHQRIHTGERPYVCNECGKRFSQTSNFTQHQRIHTGEKLYECNECGKAFFLSSYLIRHQKIHTGERVYECKECGKAFLQKAHLTEHQKIHSGDRPFECKDCGKAFIQSSKLLLHQIIHTGEKPYVCSYCGKGFIQRSNFLQHQKIHTEEKLYECSQYGRDFNSTTNVKNNQRVHQEGLSLSKAPIHLGERSVDKGEHTGNL

SEQ ID NO: 40775 - protein, 217 aa, Homo sapiens
MGVFAQADGSAYIEQGNTKALAVVYGPHEIRGSRARALPDRALVNCQYSSATFSTGERKRRPHGDRKSCEMGLQLRQTFEAAILTQLHPRSQIDIYVQVLQADGGTYAACVNAATLAVLDAGIPMRDFVCACSAGFVDGTALADLSHVEEAAGGPQLALALLPASGQIALLEMDARLHEDHLERVLEAAAQAARDVHTLLDRVVRQHVREASILLGD

SEQ ID NO: 40776 - protein, 64 aa, Homo sapiens
MPAVGFLLLVLGLKALELWMQLHEAGMGLEEPGGAPGPSVPLPPSQVMAPPSVVGMGFWGLTGV

SEQ ID NO: 40777 - protein, 242 aa, Homo sapiens
MLAGLYAFFLFENLFNLLLPRDPEDLEDGPCGHSSHSHGGHSHGVSLQLAPSELRQPKPPHEGSRADLVAEESPELLNPEPRRLSPELRLLPYMITLGDAVHNFADGLAVGAAFASSWKTGLATSLAVFCHELPHELGDFAALLHAGLSVRQALLLNLASALTAFAGLYVALAVGVSEESEAWILAVATGLFLYVALCDMLPAMLKVRDPRPWLLFLLHNVGLLGGWTVLLLLSLYEDDITF

SEQ ID NO: 40778 - protein, 129 aa, Homo sapiens [sequence omitted]

SEQ ID NO: 40779 - protein, 1073 aa, Homo sapiens
MYANLVTGECVWDPPAGVRIKRTSENQWWELFDPNTSRFYYYNASTQRTVWHRPQGCDIIPLAKLQTLKQNTESPRASAESSPGRGSSVSREGSTSSSLEPEPDTEKAQELPARAGRPAAFGTVKEDSGSSSPPGVFLEKDYEIYRDYSADGQLLHYRTSSLRWNSGAKERMLIKVADREPSFLAAQGNGYAPDGPPGVRSRRPSGSQHSPSLQTFAPEADGTIFFPERRPSPFLKRAELPGSSSPLLAQPRKPSGDSQPSSPRYGYEPPLYEEPPVEYQAPIYDEPPMDVQFEAGGGYQAGSPQRSPGRKPRPFLQPNKQGPPSPCQQLVLTKQKCPERFLSLEYSPAGKEYVRQLVYVEQAGSSPKLRAGPRHKYAPNPGGGSYSLQPSPCLLRDQRLGVKSGDYSTMEGPELRHSQPPTPLPQAQEDAMSWSSQQDTLSSTGYSPGTRKRKSRKPSLCQATSATPTEGPGDLLVEQPLAEEQPPCGTSLAPVKRAEGEAEGARGAAEPFLAQARLAWEAQQAHFHMKQRSSWDSQQDGSGYESDGALPLPMPGPVVRAFSEDEALAQQENRHWRRGTFEKLGFPQILLEKSVSVQTNLASPEPYLHPSQSEDLAACAQFESSRQSRSGVPSSSCVFPTFTLRKPSSETDIENWASKHFNKHTQGLFRRKVSIANMLAWSSESIKKPMIVTSDRHVKKEACELFKLIQMYMGDRRAKADPLHVALEVATKGWSVQGLRDELYIQLCRQTTENFRLESLARGWELMAICLAFFPPTPKFHSYLEGYIYRHMDPVNDTKVTQHIKELLERNTKKKSKLRKKPKPYVEEPDGVAISTYAKYCYHKLQKAALTGAKKGLKKPNVEEIRHAKNAVFSPSMFGSALQEVMGMQRERYPERQLPWVQTRLSEEVLALNGDQTEGIFRVPGDIDEVNALKLQVDQWKVPTGLEDPHVPASLLKLWYRELEEPLIPHEFYEQCIAHYDSPEAAVAVVHALPRINRMVLCYLIRFLQVFVQPANVAVTKMDVSNLAMVMAPNCLRCQSDDPRVIFENTRKEMSFLRVLIQHLDTSFMEGVL

SEQ ID NO: 40780 - protein, 666 aa, Homo sapiens
MYSQNTGGNYFDTQGSSAQVTTVVSSHSMVGTGGIQMGVTGGQLISSSGGTYLIGNSMENSGHSVTHTTRASPATIEMAIETLQKSDGLSTHRSSLLNSHLQWLLDNYETAEGVSLPRSTLYNHYLRHCQEHKLDPVNAASFGKLIRSIFMGLRTRRLGTRGNSKYHYYGIRVKPDSPLNRLQEDMQYMAMRQQPMQQKQRYKPMQKVDGVADGFTGSGQQTGTSVEQTVIAQSQHHQQFLDASRALPEFGEVEISSLPDGTTFEDIKSLQSLYREHCEAILDVVVNLQFSLIEKLWQTFWRYSPSTPTDGTTITESSNLSEIESRLPKAKLITLCKHESILKWMCNCDHGMYQALVEILIPDVLRPIPSALTQAIRNFAKSLEGWLSNAMNNIPQRMIQTKVAAVSAFAQTLRRYTSLNHLAQAARAVLQNTSQINQMLSDLNRVDFANVQEQASWVCQCDDNMVQRLETDFKMTLQQQSTLEQWAAWLDNVMMQALKPYEGRPSFPKAARQFLLKWSFYSSMVIRDLTLRSAASFGSFHLIRLLYDEYMFYLVEHRVAQATGETPIAVMGEFGDLNAVSPGNLDKDEGSEVESEMDEELDDSSEPQAKREKTELSQAFPVGCMQPVLETGVQPSLLNPIHSEHIVTSTQTIRQCSATGNTYTAV

SEQ ID NO: 40781 - protein, 1130 aa, Homo sapiens [sequence omitted]

SEQ ID NO: 40782 - protein, 1040 aa, Homo sapiens
MTFRPSMEEFREFNKYLAYMESKGAHRAGLAKVIPPKEWKPRQCYDDIDNLLIPAPIQQMVTGQSGLFTQYNIQKKAMTVKEFRQLANSGKYCTPRYLDYEDLERKYWKNLTFVAPIYGADINGSIYDEGVDEWNIARLNTVLDVVEEECGISIEGVNTPYLYFGMWKTTFAWHTEDMDLYSINYLHFGEPKSWYAIPPEHGKRLERLAQGFFPSSSQGCDAFLRHKMTLISPSVLKKYGIPFDKITQEAGEFMITFPYGYHAGFNHGFNCAESTNFATVRWIDYGKVAKLCTCRKDMVKISMDIFVRKFQPDRYQLWKQGKDIYTIDHTKPTPASTPEVKAWLQRRRKVRKASRSFQCARSTSKRPKADEEEEVSDEVDGAEVPNPDSVTDDLKVSEKSEAAVKLRNTEASSEEESSASRMQVEQNLSDHIKLSGNSCLSTSVTEDIKTEDDKAYAYRSVPSISSEADDSIPLSSGYEKPEKSDPSELSWPKSPESCSSVAESNGVLTEGEESDVESHGNGLEPGEIPAVPSGERNSFKVPSIAEGENKTSKSWRHPLSRPPARSPMTLVKQQAPSDEELPEVLSIEEEVEETESWAKPLIHLWQTKSPNFAAEQEYNATVARMKPHCAICTLLMPYHKPDSSNEENDARWETKLDEVVTSEGKTKPLIPEMCFIYSEENIEYSPPNAFLEEDGTSLLISCAKCCVRVHASCYGIPSHEICDGWLCARCKRNAWTAECCLCNLRGGALKQTKNNKWAHVMCAVAVPEVRFTNVPERTQIDVGRIPLQRLKLKCIFCRHRVKRVSGACIQCSYGRCPASFHVTCAHAAGVLMEPDDWPYVVNITCFRHKVNPNVKSKACEKVISVGQTVITKHRNTRYYSCRVMAVTSQTFYEVMFDDGSFSRDTFPEDIVSRDCLKLGPPAEGEVVQVKWPDGKLYGAKYFGSNIAHMYQVEFEDGSQIAMKREDIYTLDEELPKRVKARFSTASDMRFEDTFYGADIIQGERKRQRVLSSRFKNEYVADPVYRTFLKSSFQKKCQKRQ

SEQ ID NO: 40783 - protein, 150 aa, Homo sapiens
MDHHCPWINNCVGEDNHWLFLQLCFYTELLTCYALMFSFCHYYYFLPLKKRNLDLFVFRHELAIMRLAAFMGITMLVGITGLFYTQLIGIITDTTSIEKMSNCCEDISRPRKPWQQTFSEVFGTRWKILWFIPFRQRQPLRVPYHFANHV

SEQ ID NO: 40784 - protein, 585 aa, Homo sapiens
MATSSLHFASCDTQQAPRQRGASTVSSSSSTKVDLKSGLEECAVALNLFLSNKFTDALELLRPWAKESMYHALGYSTIVVLQAVLTFEQQDIQNGISAMKDALQTCQKYRKKYTVVESFSSLLSRGSLEQLSEEEMHAEICYAECLLQKAALTFVQDENMINFIKGGLKIRTSYQIYKECLSILHEIQKNKLQQEFFYEFEGGVKLGSGAFNLMLSLLPARIIRLLEFIGFSGNRELGLLQLREGASGRSMRSALCCLTILAFHTYISLILGTGEVNVAEAERLLAPFLQQFPNGSLVLFYHARIELLKGNLEEAQEVFQKCISVQEEWKQFHHLCYWELMWINVFQQNWMQAYYYSDLLCKESKWSKATYVFLKAAILSMLPEEDVVATNENVVTLFRQVDSLKQRIAGKSIPTEKFAVRKARRYSASLPAPVKLILPALEMMYVWNGFSIVSKRKDLSENLLVTVEKAEAALQSQNFNSFSVDDECLVKLLKGCCLKNLQRPLQAELCYNHVVESEKLLKYDHYLVPFTLFELASLYKSQGEIDKAIKFLETARNNYKDYSLESRLHFRIQAALHLWRKPSSD

SEQ ID NO: 40785 - protein, 940 aa, Homo sapiens
MYLQALGFEPGPATIACGKIVSHTHLGVNMFDKLNRDAFHIISYFLFQVLDQSLTKEVFKFCWPPFDQKSDTEFRKHCCEWIKRISGECGSSFPQVVGSLFLSPGGPKFIHLMYHFARFVAMKYIKSNSKNSSHHFVETFNIKPQDLHKCIARCHFARSRFLQILQRQDCVTQKYQENAQLSVKQVRNLRSECIGLENQIKKMEPYDDHSNMEEKIQKVRSLWASVNETLMFLEKEREVVSSVLSLVNQYALDGTNVAINIPRLLLDKIEKQMFQLHIGNVYEAGKLNLLTVIQLLNEVLKVMKYERCQADQARLTVDLHYLEKETKFQKERLSDLKHMRYRIKDDLTTIRHSVVEKQGEWHKKWKEFLGLSPFSLIKGWTPSVDLLPPMSPLSFDPASEEVYAKSILCQYPASLPDAHKQHNQENGCRGDSDTLGALHDLANSPASFLSQSVSSSDRNSVTVLEKDTKMGTPKEKNEAISKKIPEFEVENSPLSDVAKNTESSAFGGSLPAKKSDPFQKEQDHLVEEVARAVLSDSPQLSEGKEIKLEELIDSLGSNPFLTRNQIPRTPENLITEIRSSWRKAIEMEENRTKEPIQMDAEHREVLPESLPVLHNQREFSMADFLLETTVSDFGQSHLTEEKVISDCECVPQKHVLTSHIDEPPTQNQSDLLNKKVICKQDLECLAFTKLSETSRMETFSPAVGNRIDVMGGSEEEFMKILDHLEVSCNKPSTNKTMLWNSFQISSGISSKSFKDNDFGILHETLPEEVGHLSFNSSSSSEANFKLEPNSPMHGGTLLEDVVGGRQTTPESDFNLQALRSRYEALKKSLSKKREESYLSNSQTPERHKPELSPTPQNVQTDDTLNFLDTCDLHTEHIKPSLRTSIGERKRSLSPLIKFSPVEQRLRTTIACSLGELPNLKEEDILNKSLDAKEPPSDLTR

SEQ ID NO: 40786 - protein, 19 aa, Homo sapiens
MSAIYPPLLGALSFIAASS

SEQ ID NO: 40787 - protein, 356 aa, Homo sapiens
MSNVNLSVSDFWRVMMRVCWLVRQDSRHQRIRLPHLEAVVIGRGPETKITDKKCSRQQVQLKAECNKGYVKVKQVGVNPTSIDSVVIGKDQEVKLQPGQVLHMVNELYPYIVEFEEEAKNPGLETHRKRKRSGNSDSIERDAAQEAEAGTGLEPGSNSGQCSVPLKKGKDAPIKKESLGHWSQGLKISMQDPKMQVYKDEQVVVIKDKYPKARYHWLVLPWTSISSLKAVAREHLELLKHMHTVGEKVIVDFAGSSKLRFRLGYHAIPSMSHVHLHVISQDFDSPCLKNKKHWNSFNTEYFLESQAVIEMVQEAGRVTVRDGMPELLKLPLRCHECQQLLPSIPQLKEHLRKHWTQ

SEQ ID NO: 40788 - protein, 274 aa, Homo sapiens
MKKKTRRRSTRSEELTRSEELTLSEEATWSEEATQSEEATQGEEMNRSQEVTRDEESTRSEEVTREEMAAAGLTVTVTHSNEKHDLHVTSQQGSSEPVVQDLAQVVEEVIGVPQSFQKLIFKGKSLKEMETPLSALGIQDGCRVMLIGKKNSPQEEVELKKLKHLEKSVEKIADQLEELNKELTGIQQGFLPKDLQAEALCKLDRRVKATIEQFMKILEEIDTLILPENFKDSRLKRKGLVKKVQAFLAECDTVEQNICQETERLQSTNFALAE

SEQ ID NO: 40789 - protein, 233 aa, Homo sapiens
MTSSQKALMLELKSLQEEPVEGFRITLVDESDLYNWEVAIFGPPNTLYEGGYFKAHIKFPIDYPYSPPTFRFLTKMWHPNIYENGDVCISILHPPVDDPQSGELPSERWNPTQNVRTILLSVISLLNEPNTFSPANVDASVMFRKWRDSKGKDKEYAEIIRKQVSATKAEAEKDGVKVPTTLAEYCIKTKVPSNDNSSDLLYDDLYDDDIDDEDEEEEDADCYDDDDSGNEES

SEQ ID NO: 40790 - protein, 540 aa, Homo sapiens [sequence omitted]

SEQ ID NO: 40791 - protein, 282 aa, Homo sapiens
MDLESESCRKEGTQMTPQHMEELAEQEIARLVLTDEEKSLLEKEGLILPETLPLTKTEEQILKRVRRKIRNKRSAQESRRKKKVYVGGLESRVLKYTAQNMELQNKVQLLEEQNLSLLDQLRKLQAMVIEISNKTSSSSTCILVLLVSFCLLLVPAMYSSDTRGSLPAEHGVLSRQLRALPSEDPYQLELPALQSEVPKDSTHQWLDGSDCVLQAPGNTSCLLHYMPQAPSAEPPLEWPFPDLFSEPLCRGPILPLQANLTRKGGWLPTGSPSVILQDRYSG

SEQ ID NO: 40792 - protein, 135 aa, Homo sapiens
MAAAVVLAAGLRAARRAVAATGVRGGQVRGAAGVTDGNEVAKAQQATPGGAAPTIFSRILDKSLPADILYEDQQCLVFRDVAPQAPVHFLVIPKKPIPRISQAEEEDQQLLGHLLLVAKQTAKAEGLGDGYRLGE

SEQ ID NO: 40793 - protein, 91 aa, Homo sapiens
MRIPGATGGRTQKATPRAVLSRKCLLSSRVCADAASLPHLSSPLPVPLRVLVPVWCFLFAATAVSMYVTDPESPAAWDPCLPSVSPAELWN

SEQ ID NO: 40794 - protein, 35 aa, Homo sapiens
MRPVRLMKVFVTRRIPAEAVRWSSGTRMSPSLPRS

SEQ ID NO: 40795 - protein, 69 aa, Homo sapiens
MCRLLAPDCEIIQEVGKLYPLEIVFGMNGRIWVKAKTIQQTLILANILEACEHMTSDQRKQIFSRLAES

SEQ ID NO: 40796 - protein, 245 aa, Homo sapiens
MQRQLLSNPEMMVQIMENPFVQSMLSNPDLMRQLIMANPQMQQLIQRNPEISHMLNNPDIMRQTLELARNPAMMQEMMRNQDRALSNLESIPGGYNALRRMYTDIQEPMLSAAQEQFGGNPFASLVSNTSSGEGSQPSRTENRDPLPNPWAPQTSQSSSASSGTASTVGGTTGSTASGTSGQSTTAPNLVPGVGASMFNTPGMQSLLQQITENPQLMQNMLSAPYMRSMMQSLSQNPDLAAQVSL

SEQ ID NO: 40797 - protein, 860 aa, Homo sapiens
MCTPIRGLLMALAVMFGTAMAFAPIPRITWEHREVHLVQFHEPDIYNYSALLLSEDKDTLYIGAREAVFAVNALNISEKQHEVYWKVSEDKKAKCAEKGKSKQTECLNYIRVLQPLSATSLYVCGTNAFQPACDHLNLTSFKFLGKNEDGKGRCPFDPAHSYTSVMVDGELYSGTSYNFLGSEPIISRNSSHSPLRTEYAIPWLNEPSFVFADVIRKSPDSPDGEDDRVYFFFTEVSVEYEFVFRVLIPRIARVCKGDQGGLRTLQKKWTSFLKARLICSRPDSGLVFNVLRDVFVLRSPGLKVPVFYALFTPQLNNVGLSAVCAYNLSTAEEVFSHGKYMQSTTVEQSHTKWVRYNGPVPKPRPGACIDSEARAANYTSSLNLPDKTLQFVKDHPLMDDSVTPIDNRPRLIKKDVNYTQIVVDRTQALDGTVYDVMFVSTDRGALHKAISLEHAVHIIEETQLFQDFEPVQTLLLSSKKGNRFVYAGSNSGVVQAPLAFCGKHGTCEDCVLARDPYCAWSPPTATCVALHQTESPSRGLIQEMSGDASVCPDKSKGSYRQHFFKHGGTAELKCSQKSNLARVFWKFQNGVLKAESPKYGLMGRKNLLIFNLSEGDSGVYQCLSEERVKNKTVFQVVAKHVLEVKVVPKPVVAPTLSVVQTEGSRIATKVLVASTQGSSPPTPAVQATSSGAITLPPKPAPTGTSCEPKIVINTVPQLHSEKTMYLKSSDNRLLMSLFLFFFVLFLCLFFYNCYKGYLPRQCLKFRSALLIGKKKPKSDFCDREQSLKETLVEPGSFSQQNGEHPKPALDTGYETEQDTITSKVPTDREDSQRIDDLSARDKPFDVKCELKFADSDADGD

SEQ ID NO: 40798 - protein, 189 aa, Homo sapiens [sequence omitted]

SEQ ID NO: 40799 - protein, 60 aa, Homo sapiens [sequence omitted]

SEQ ID NO: 40800 - protein, 1372 aa, Homo sapiens
MPEFLLRSMKKEPLSSTAKKMFLIVAPLSVLYNWKDELDTWGYFRVTVLHGNRKDNELIRVKQRKCEIALTTYETLRLCLDELNSLEWSAVIVDEAHRIKNPKARVTEVMKALKCNVRIGLTGTILQNNMKELWCVMDWAVPGLLGSGTYFKKQFSDPVEHGQRHTATKRELATGRKAMQRLAKKMSGWFLRRTKTLIKDQLPKKEDRMVYCSLTDFQKAVYQTVLETEDVTLILQSSEPCTCRSGQKRRNCCYKTNSHGETVKTLYLSYLTVLQKVANHVALLQAASTSKQQETLIKRICDQVFSRFPDFVQKSKDAAFETLSDPKYSGKMKVLQQLLNHCRKNRDKVLLFSFSTKLLDVLQQYCMASGLDYRRLDGSTKSEERLKIVKEFNSTQDVNICLVSTMAGGLGLNFVGANVVVLFDPTWNPANDLQAIDRAYRIGQCRDVKVLRLISLGTVEEIMYLRQIYKQQLHCVVVGSENAKRYFEAVQGSKEHQGELFGIHNLFKFRSQGSCLTKDILEREGQVEAGIMTATTWLKEGPPAHKLEMPRQPDCQECRGTEQAAEPLAKEACDLCSDFSDEEPVGATGIKTAKNKAPDSSKASSSPGQLTLLQCGFSKLLETKCKAVEDSDGNTASDDESSDEQPTCLSTEAKDAGCEKNQDSLGTSKHQKLDNILNPKEKHIFYKSEKILEQNISSKSDEKKIKNTDKHCILQNVTESEDSDVICPTQYTTERFPDNSIRFKPPLEGSEDSETEHTVKTRNNDNSRNTDDKRNGIISKKLSPENTTLKSILKRKGTSDISDESDDIEISSKSRVRKRASSLRFKRIKETKKELHNSPKTMNKTNQVYAANEDHNSQFIDDYSSSDESLSVSHFSFSKQSHRPRTIRDRTSFSSKLPSHNKKNSTFIPRKPMKCSNEKVVNQEQSYESMDKFLDGVQEVAYIHSNQNVIGSSKAENHMSRWAAHDVFELKQFSQLPANIAVCSSKTYKEKVDADTLPHTKKGQQPSEGSISLPLYISNPVNQKKKKVYHTNQTTFIIGETPKGIRRKQFEEMASYFNSSSVNEFAKHITNATSEERQKMLRDFYASQYPEVKEFFVDSVSQFNNSSFEKGEQRTRKKSDKRESLIKPRLSDSETLSFKDSTNKISQVCSLKTYKRKSVKFQNHISYREEVFFNDAETKKSPVSSTQEIDSGKNSQASEDTVTSRSLNSESETRERRLENTMKDQQDLTRTGISRKEPLLKLENKKIENPVLENTSVISLLGDTSILDDLFKSHGNSPTQLPKKVLSGPMEKAKQRPKDFWDILNEQNDESLSKLTDLAVIETLCEKAPLAAPFKRREEPATSLWKSNEKFLWKKFSPSDTDENATNTQSTT

SEQ ID NO: 40801 - protein, 7 aa, Homo sapiens
MAATILW

SEQ ID NO: 40802 - protein, 1218 aa, Homo sapiens
MSWSPDQELVLLATGQQTLIMMTKDFEPILEQQIHQDDFGESKFITVGWGRKETQFHGSEGRQAAFQMQMHESALPWDDHRPQVTWRGDGQFFAVSVVCPETGARKVRVWNREFALQSTSEPVAGLGPALAWKPSGSLIASTQDKPNQQDIVFFEKNGLLHGHFTLPFLKDEVKVNDLLWNADSSVLAVWLEDLQREESSIPKTCVQLWTVGNYHWYLKQSLSFSTCGKSKIVSLMWDPVTPYRLHVLCQGWHYLAYDWHWTTDRSVGDNSSDLSNVAVIDGNRVLVTVFRQTVVPPPMCTYQLLFPHPVNQVTFLAHPQKSNDLAVLDASNQISVYKCGDCPSADPTVKLGAVGGSGFKVCLRTPHLEKRYKIQFENNEDQDVNPLKLGLLTWIEEDVFLAVSHSEFSPRSVIHHLTAASSEMDEEHGQLNVSSSAAVDGVIISLCCNSKTKSVVLQLADGQIFKYLWESPSLAIKPWKNSGGFPVRFPYPCTQTELAMIGEEECVLGLTDRCRFFINDIEVASNITSFAVYDEFLLLTTHSHTCQCFCLRDASFKTLQAGLSSNHVSHGEVLRKVERGSRIVTVVPQDTKLVLQMPRGNLEVVHHRALVLAQIRKWLDKLMFKEAFECMRKLRINLNLIYDHNPKVFLGNVETFIKQIDSVNHINLFFTELKEEDVTKTMYPAPVTSSVYLSRDPDGNKIDLVCDAMRAVMESINPHKYCLSILTSHVKKTTPELEIVLQKVHELQGNAPSDPDAVSAEEALKYLLHLVDVNELYDHSLGTYDFDLVLMVAEKSQKDPKEYLPFLNTLKKMETNYQRFTIDKYLKRYEKAIGHLSKCGPEYFPECLNLIKDKNLYNEALKLYSPSSQQYQDISIAYGEHLMQEHMYEPAGLMFARCGAHEKALSAFLTCGNWKQALCVAAQLNFTKDQLVGLGRTLAGKLVEQRKHIDAAMVLEECAQDYEEAVLLLLEGAAWEEALRLVYKYNRLDIIETNVKPSILEAQKNYMAFLDSQTATFSRHKKRLLVVRELKEQAQQAGLDDEVPHGQESDLFSETSSVVSGSEMSGKYSHSNSRISARSSKNRRKAERKKHSLKEGSPLEDLALLEALSEVVQNTENLKDEVYHILKVLFLFEFDEQGRELQKAFEDTLQLMERSLPEIWTLTYQQNSATPVLGPNSTANSIMASYQQQKTSVPVLDAELFIPPKINRRTQWKLSLLD

SEQ ID NO: 40803 - protein, 227 aa, Homo sapiens
MAASTLANLAISITGYESSSEDQPSTQPAEAVDRGESAPTLSTSPSPSSPSPTSPSPTLGRRRPEIGTFLRKKKTSDIYFVSLVWAIVVMQIWLNLWIVQLLPVPIAVWILKKLVIHFGVVDFLEKRYHVWWGIIESFLKERQGALAPWPIVGLGKFLLKVDSKMIIWLEKMLDKIISIFIIFLLVIGTLLLALLLTAKVHQESVHMIEVTSNLINETLANHPEWAK

SEQ ID NO: 40804 - protein, 692 aa, Homo sapiens [sequence omitted]

SEQ ID NO: 40805 - protein, 698 aa, Homo sapiens
MWGCSAGHAYHWPLTATCRAGSQERVCFQDNRSFNSDSPSIIGVPSETQTSPVERYPGRPVKAKLDCNRTRDSCDFSYCSEPSELDETVEEYEDENTLFDMVCESSVTDEDSDFEPQTQRPQSIARKRPGVVPSSLHSSSQTQMVDECSNDVIIKKIKQEIPEDYYIVANAELTGGVDGPALSLTQMAKPKPQTHAGPSCVGSAKLIPHVTSAISTELDPHGMSASPSVISRPIVQKTARVSLASPNRGPPGTHGTNQQVAMQMPVSTSHPNKQISIPLSALQLPGQDEQVASEEFLSHLPSQVSSCEVALSPSVNTEPEVSSSQQQPPVAPAITTEATAQCIPDQDERAAELSREQNEKTIRSTQTALRNFPYSTKLNKFPVFNINDDLNDLCTSAVSPNTTKATRYALNVWRYWCMTNGLKDHTDITKIPAVKLNELLENFYVTVKKSDGSDFLATSLHAIRRGLDRILKNAGVGFSITSSTFSSSTKKLKEKLWVLSKAGMSGARSRNIVYFSLSDEEEMWQAGCLGDDSPITLLSTVVKYNSQYLNMRTLQEHADLMYGDIELLKDPQNQPYFARTDSVKRESRSGSTRVCHGKIYHEHSRGHKQCPYCLLYKYMYIHRPPTQMEAKSPFYLTARKEATDMGSVWYEEQRMGLRSLRGIVPNLAKKVKLENCENFTFVSFTQVSRRLGSHSCCQ

SEQ ID NO: 40806 - protein, 339 aa, Homo sapiens
MPLCPLAHAMQPQSVLHSGYFHPLLRAWQTATTTLNASNLIYPIFVTDVPDDIQPITSLPGVARYGVKRLEEMLRPLVEEGLRCVLIFGVPSRVPKDERGSAADSEESPAIEAIHLLRKTFPNLLVACDVCLCPYTSHGHCGLLSENGAFRAEESRQRLAEVALAYAKAGCQVVAPSDMMDGRVEAIKEALMAHGLGNRVSVMSYSAKFASCFYGPFRDAAKSSPAFGDRRCYQLPPGARGLALRAVDRDVREGADMLMVKPGMPYLDIVREVKDKHPDLPLAVYHVSGEFAMLWHGAQAGAFDLKAAVLEAMTAFRRAGADIIITYYTPQLLQWLKEE

SEQ ID NO: 40807 - protein, 83 aa, Homo sapiens
MVGLGSSEGSGPKGACGCQQKDHNGVRGLVGMQRLAAESPKRRGLRGFFLPRRRRRRTFHIWASSGGSRTCLGGSRRGWERSP

SEQ ID NO: 40808 - protein, 815 aa, Homo sapiens
MLRLVIPRSDQLLFDQYTAEGLYLPATTPYRQPAWGGPDSAGPGEVRLVSLRRAKAHEGLGFSIRGGSEHGVGIYVSLVEPGSLAEKEGLRVGDQILRVNDKSLARVTHAEAVKALKGSKKLVLSVYSAGRIPGGYVTNHIYTWVDPQGRSISPPSGLPQPHGGALRQQEGDRRSTLHLLQGGDEKKVNLVLGDGRSLGLTIRGGAEYGLGIYITGVDPGSEAEGSGLKVGDQILEVNGRSFLNILHDEAVRLLKSSRHLILTVKDVGRLPHARTTVDETKWIASSRIRETMANSAGFLGDLTTEGINKPGFYKGPAGSQVTLSSLGNQTRVLLEEQARHLLNEQEHATMAYYLDEYRGGSVSVEALVMALFKLLNTHAKFSLLSEVRGTISPQDLERFDHLVLRREIESMKARQPPGPGAGDTYSMVSYSDTGSSTGSHGTSTTVSSARNTLDLEETGEAVQGNINALPDVSVDDVRSTSQGLSSFKPLPRPPPLAQGNDLPLGQPRKLGREDLQPPSSMPSCSGTVFSAPQNRSPPAGTAPTPGTSSAQDLPSSPIYASVSPANPSSKRPLDAHLALVNQHPIGPFPRVQSPPHLKSPSAEATVAGGCLLPPSPSGHPDQTGTNQHFVMVEVHRPDSEPDVNEVRALPQTRTASTLSQLSDSGQTLSEDSGVDAGEAEASAPGRGRQSVSTKSRSSKELPRNERPTDGANKPPGLLEPTSTLVRVKKSAATLGIAIEGGANTRQPLPRIVTIQRGGSAHNCGQLKVGHVILEVNGLTLRGKEHREAARIIAEAFKTKDRDYIDFLVTEFNVML

SEQ ID NO: 40809 - protein, 594 aa, Homo sapiens [sequence omitted]

SEQ ID NO: 40810 - protein, 167 aa, Homo sapiens
MSRCVLEPRPPGKRWMVAGLGNPGLPGTRHSVGMAVLGQLARRLGVAESWTRDRHCAADLALAPLGDAQLVLLRPRRLMNANGRSVARAAELFGLTAEEVYLVHDELDKPLGRLALKLGGSARGHNGVRSCISCLNSNELLPLLLDRATDLILDHIRERSQGPSLGP

SEQ ID NO: 40811 - protein, 380 aa, Homo sapiens [sequence omitted]

SEQ ID NO: 40812 - protein, 924 aa, Homo sapiens
MFSQQQQQQLQQQQQQLQQLQQQQLQQQQLQQQQLLQLQQLLQQSPPQAPLPMAVSRGLPPQQPQQPLLNLQGTNSASLLNGSMLQRALLLQQLQGLDQFAMPPATYDTAGLTMPTATLGNLRGYGMASPGLAAPSLTPPQLATPNLQQFFPQATRQSLLGPPPVGVPMNPSQFNLSGRNPQKQARTSSSTTPNRKDSSSQTMPVEDKSDPPEGSEEAAEPRMDTPEDQDLPPCPEDIAKEKRTPAPEPEPCEASELPAKRLRSSEEPTEKEPPGQLQVKAQPQARMTVPKQTQTPDLLPEALEAQVLPRFQPRVLQVQAQVQSQTQPRIPSTDTQVQPKLQKQAQTQTSPEHLVLQQKQVQPQLQQEAEPQKQVQPQVQPQAHSQGPRQVQLQQEAEPLKQVQPQVQPQAHSQPPRQVQLQLQKQVQTQTYPQVHTQAQPSVQPQEHPPAQVSVQPPEQTHEQPHTQPQVSLLAPEQTPVVVHVCGLEMPPDAVEAGGGMEKTLPEPVGTQVSMEEIQNESACGLDVGECENRAREMPGVWGAGGSLKVTILQSSDSRAFSTVPLTPVPRPSDSVSSTPAATSTPSKQALQFFCYICKASCSSQQEFQDHMSEPQHQQRLGEIQHMSQACLLSLLPVPRDVLETEDEEPPPRRWCNTCQLYYMGDLIQHRRTQDHKPPTPRRDVFAHVPVQGWSTARLVTDMIAKQSLRPFCTVCNRYFKTPRKFVEHVKSQGHKDKAKELKSLEKEIAGQDEDHFITVDAVGCFEGDEEEEEDDEDEEEIEVEEELCKQVRSRDISREEWKGSETYSPNTAYGVDFLVPVMGYICRICHKFYHSNSGAQLSHCKSLGHFENLQKYKAAKNPSPTTRPVSRRCAINARNALTALFTSSGRPPSQPNTQDKTPSKVTARPSQPPLPRRSTRLKT

SEQ ID NO: 40813 - protein, 64 aa, Homo sapiens [sequence omitted]

SEQ ID NO: 40814 - protein, 44 aa, Homo sapiens
MSDKPDMAEIEKFDKSKLKKTEMQEKNPLPSKETIEQEKQASES

SEQ ID NO: 40815 - protein, 313 aa, Homo sapiens
MGVSREDVTFEDHPLNPNPDSRWNTYFKDNEVLLQIDKDVRRLCPDISFFQRATDYPCLLILDPQNEFETLRKRVEQTTLKSQTVARNRSGVTNMSSPHKNSVPSSLNEYEVLPNGCEAHWEVVERILFIYAKLNPGIAYVQGMNEIVGPLYYTFATDPNSEWKEHAEADTFFCFTNLMAEIRDNFIKSLDDSQCGITYKMEKVYSTLKDKDVELYLKLQEQNIKPQFFAFRWLTLLLSQEFLLPDVIRIWDSLFADDNRFDFLLLVCCAMLMLIREQLLEGDFTVNMRLLQDYPITDVCQILQKAKELQDSK

SEQ ID NO: 40816 - protein, 391 aa, Homo sapiens
MKKLASDAGIFFTRAVQFTEEKFGQAEKTELDAHFENLLARADSTKNWTEKILRQTEVLLQPNPSARVEEFLYEKLDRKVPSRVTNGELLAQYMADAASELGPTTPYGKTLIKVAEAEKQLGAAERDFIHTASISFLTPLRNFLEGDWKTISKERRLLQNRRLDLDACKARLKKAKAAEAKATTVPDFQETRPRNYILSASASALWNDEVDKAEQELRVAQTEFDRQAEVTRLLLEGISSTHVNHLRCLHEFVKSQTTYYAQCYRHMLDLQKQLGRFPGTFVGTTEPASPPLSSTSPTTAAATMPVVPSVASLAPPGEASLCLEEVAPPASGTRKARVLYDYEAADSSELALLADELITVYSLPGMDPDWLIGERGNKKGKVPVTYLELLS

SEQ ID NO: 40817 - protein, 605 aa, Homo sapiens
MKASSRFKAHQDALPRLPVPPLQQSLDHYLKALQPIVSEEEWAHTKQLVDEFQASGGVGERLQKGLERRARKTENWLSEWWLKTAYLQYRQPVVIYSSPGVMLPKQDFVDLQGQLRFAAKLIEGVLDFKVMIDNETLPVEYLGGKPLCMNQYYQILSSCRVPGPKQDTVSNFSKTKKPPTHITVVHNYQFFELDVYHSDGTPLTADQIFVQLEKIWNSSLQTNKEPVGILTSNHRNSWAKAYNTLIKDKVNRDSVRSIQKSIFTVCLDATMPRVSEDVYRSHVAGQMLHGGGSRLNSGNRWFDKTLQFIVAEDGSCGLVYEHAAAEGPPIVTLLDYVIEYTKKPELVRSPLVPLPMPKKLRFNITPEIKSDIEKAKQNLSIMIQDLDITVMVFHHFGKDFPKSEKLSPDAFIQMALQLAYYRIYGQACATYESASLRMFHLGRTDTIRSASMDSLTFVKAMDDSSVTEHQKVELLRKAVQAHRGYTDRAIRGEAFDRHLLGLKLQAIEDLVSMPDIFMDTSYAIAMHFHLSTSQVPAKTDCVMFFGPVVPDGYGVCYNPMEAHINFSLSAYNSCAETNAARLAHYLEKALLDMRALLQSHPRAKL

SEQ ID NO: 40818 - protein, 172 aa, Homo sapiens
MLRAGWLRGAAALALLLAARVVAAFEPITVGLAIGAASAITGYLSYNDIYCRFAECCREERPLNASALKLDLEEKLFGQHLATEVIFKALTGFRNNKNPKKPLTLSLHGWAGTGKNFVSQIVAENLHPKGLKSNFVHLFVSTLHFPHEQKIKLYQAREPAIISSAGQSDWSG

SEQ ID NO: 40819 - protein, 527 aa, Homo sapiens [sequence omitted]

SEQ ID NO: 40820 - protein, 546 aa, Homo sapiens
MLGLLQLLAEPGLGRVHHLALKDDVRHKVHLNTFGFFKDGYMVVNVSSLSLNEPEDKDVTIGFSLDRTKNDGFSSYLDEDVNYCILKKQSVSVTLLILDISRSEVRVKSPPEAGTQLPKIIFSRDEKVLGQSQEPNVNPASAGNQTQKTQDGGKSKRSTVDSKAMGEKSFSVHNNGGAVSFQFFFNISTDDQEGLYSLYFHKCLGKELPSDKFTFSLDIEITEKNPDSYLSAGEIPLPKLYISMAFFFFLSGTIWIHILRKRRNDVFKIHWLMAALPFTKSLSLVFHAIDYHYISSQGFPIEGWAVVYYITHLLKGALLFITIALIGTGWAFIKHILSDKDKKIFMIVIPLQVLANVAYIIIESTEEGTTEYGLWKDSLFLVDLLCCGAILFPVVWSIRHLQEASATDGKGDSMGPLQQRANLRAGSRIAAINLAKLKLFRHYYVLIVCYIYFTRIIAFLLKLAVPFQWKWLYQLLDETATLVFFVLTGYKFRPASDNPYLQLSQEEEDLEMESVVTTSGVMESMKKVKKVTNGSVEPQGEWEGAV

SEQ ID NO: 40821 - protein, 1063 aa, Homo sapiens [sequence omitted]

SEQ ID NO: 40822 - protein, 2601 aa, Homo sapiens
MKAEIGDDDELYIVDNNGEMPLFDITGQDFENKLRVPLLEILKYPYLLLHERVNELCVEALCRMEQANCSFQVFDKHPGIYLFLVHPNEMVRRWAILTARNLGKVDRDDYYDLQEVLLCLFKVIELGLLESPDIYTSSVLEKGKLILLPSHMYDTTNYKSYWLGICMLLTILEEQAMDSLLLGSDKQNDFMQSILHTMEREADDDSVDPFWPALHCFMVILDRLGSKVWGQLMDPIVAFQTIINNASYNREIRHIRNSSVRTKLEPESYLDDMVTCSQIVYNYNPEKTKKDSGWRTAICPDYCPNMYEEMETLASVLQSDIGQDMRVHNSTFLWFIPFVQSLMDLKDLGVAYIAQVVNHLYSEVKEVLNQTDAVCDKVTEFFLLILVSVIELHRNKKCLHLLWVSSQQWVEAVVKCAKLPTTAFTRSSEKSSGNCSKGTAMISSLSLHSMPSNSVQLAYVQLIRSLLKEGYQLGQQSLCKRFWDKLNLFLRGNLSLGWQLTSQETHELQSCLKQIIRNIKFKAPPCNTFVDLTSACKISPASYNKEESEQMGKTSRKDMHCLEASSPTFSKEPMKVQDSVLIKADNTIEGDNNEQNYIKDVKLEDHLLAGSCLKQSSKNIFTERAEDQIKISTRKQKSVKEISSYTPKDCTSRNGPERGCDRGIIVSTRLLTDSSTDALEKVSTSNEDFSLKDDALAKTSKRKTKVQKDEICAKLSHVIKKQHRKSTLVDNTINLDENLTVSNIESFYSRKDTGVQKGDGFIHNLSLDPSGVLDDKNGEQKSQNNVLPKEKQLKNEELVIFSFHENNCKIQEFHVDGKELIPFTEMTNASEKKSSPFKDLMTVPESRDEEMSNSTSVIYSNLTREQAPDISPKSDTLTDSQIDRDLHKLSLLAQASVITFPSDSPQNSSQLQRKVKEDKRCFTANQNNVGDTSRGQVIIISDSDDDDDERILSLEKLTKQDKICLEREHPEQHVSTVNSKEEKNPVKEEKTETLFQFEESDSQCFEFESSSEVFSVWQDHPDDNNSVQDGEKKCLAPIANTTNGQGCTDYVSEVVKKGAEGIEEHTRPRSISVEEFCEIEVKKPKRKRSEKPMAEDPVRPSSSVRNEGQSDTNKRDLVGNDFKSIDRRTSTPNSRIQRATTVSQKKSSKLCTCTEPIRKVPVSKTPKKTHSDAKKGQNRSSNYLSCRTTPAIVPPKKFRQCPEPTSTAEKLGLKKGPRKAYELSQRSLDYVAQLRDHGKTVGVVDTRKKTKLISPQNLSVRNNKKLLTSQELQMQRQIRPKSQKNRRRLSDCESTDVKRAGSHTAQNSDIFVPESDRSDYNCTGGTEVLANSNRKQLIKCMPSEPETIKAKHGSPATDDACPLNQCDSVVLNGTVPTNEVIVSTSEDPLGGGDPTARHIEMAALKEGEPDSSSDAEEDNLFLTQNDPEDMDLCSQMENDNYKLIELIHGKDTVEVEEDSVSRPQLESLSGTKCKYKDCLETTKNQGEYCPKHSEVKAADEDVFRKPGLPPPASKPLRPTTKIFSSKSTSRIAGLSKSLETSSALSPSLKNKSKGIQSILKVPQPVPLIAQKPVGEMKNSCNVLHPQSPNNSNRQGCKVPFGESKYFPSSSPVNILLSSQSVSDTFVKEVLKWKYEMFLNFGQCGPPASLCQSISRPVPVRFHNYGDYFNVFFPLMVLNTFETVAQEWLNSPNRENFYQLQVRKFPADYIKYWEFAVYLEECELAKQLYPKENDLVFLAPERINEEKKDTERNDIQDLHEYHSGYVHKFRRTSVMRNGKTECYLSIQTQENFPANLNELVNCIVISSLVTTQRKLKAMSLLGSRNQLARAVLNPNPMDFCTKDLLTTTSERIIAYLRDFNEDQKKAIETAYAMVKHSPSVAKICLIHGPPGTGKSKTIVGLLYRLLTENQRKGHSDENSNAKIKQNRVLVCAPSNAAVDELMKKIILEFKEKCKDKKNPLGNCGDINLVRLGPEKSINSEVLKFSLDSQVNHRMKKELPSHVQAMHKRKEFLDYQLDELSRQRALCRGGREIQRQELDENISKVSKERQELASKIKEVQGRPQKTQSIIILESHIICCTLSTSGGLLLESAFRGQGGVPFSCVIVDEAGQSCEIETLTPLIHRCNKLILVGDPKQLPPTVISMKAQEYGYDQSMMARFCRLLEENVEHNMISRLPILQLTVQYRMHPDICLFPSNYVYNRNLKTNRQTEAIRCSSDWPFQPYLVFDVGDGSERRDNDSYINVQEIKLVMEIIKLIKDKRKDVSFRNIGIITHYKAQKTMIQKDLDKEFDRKGPAEVDTVDAFQGRQKDCVIVTCVRANSIQGSIGFLASLQRLNVTITRAKYSLFILGHLRTLMENQHWNQLIQDAQKRGAIIKTCDKNYRHDAVKILKLKPVLQRSLTHPPTIAPEGSRPQGGLPSSKLDSGFAKTSVAASLYHTPSDSKEITLTVTSKDPERPPVHDQLQDPRLLKRMGIEVKGGIFLWDPQPSSPQHPGATPPTGEPGFPVVHQDLSHIQQPAAVVAALSSHKPPVRGEPPAASPEASTCQSKCDDPEEELCHRREARAFSEGEQEKCGSETHHTRRNSRWDKRTLEQEDSSSKKRKLL

SEQ ID NO: 40823 - protein, 857 aa, Homo sapiens
MRNGKTECYLSIQTQENFPANLNELVNCIVISSLVTTQRKLKAMSLLGSRNQLARAVLNPNPMDFCTKDLLTTTSERIIAYLRDFNEDQKKAIETAYAMVKHSPSVAKICLIHGPPGTGKSKTIVGLLYRLLTENQRKGHSDENSNAKIKQNRVLVCAPSNAAVDELMKKIILEFKEKCKDKKNPLGNCGDINLVRLGPEKSINSEVLKFSLDSQVNHRMKKELPSHVQAMHKRKEFLDYQLDELSRQRALCRGGREIQRQELDENISKVSKERQELASKIKEVQGRPQKTQSIIILESHIICCTLSTSGGLLLESAFRGQGGVPFSCVIVDEAGQSCEIETLTPLIHRCNKLILVGDPKQLPPTVISMKAQEYGYDQSMMARFCRLLEENVEHNMISRLPILQLTVQYRMHPDICLFPSNYVYNRNLKTNRQTEAIRCSSDWPFQPYLVFDVGDGSERRDNDSYINVQEIKLVMEIIKLIKDKRKDVSFRNIGIITHYKAQKTMIQKDLDKEFDRKGPAEVDTVDAFQGRQKDCVIVTCVRANSIQGSIGFLASLQRLNVTITRAKYSLFILGHLRTLMQLLPRSFCVHVNHSPFFSPEPKYLHWALKENQHWNQLIQDAQKRGAIIKTCDKNYRHDAVKILKLKPVLQRSLTHPPTIAPEGSRPQGGLPSSKLDSGFAKTSVAASLYHTPSDSKEITLTVTSKDPERPPVHDQLQDPRLLKRMGIEVKGGIFLWDPQPSSPQHPGATPPTGEPGFPVVHQDLSHIQQPAAVVAALSSHKPPVRGEPPAASPEASTCQSKCDDPEEELCHRREARAFSEGEQEKCGSETHHTRRNSRWDKRTLEQEDSSSKKRKLL

SEQ ID NO: 40824 - protein, 320 aa, Homo sapiens [sequence omitted]

SEQ ID NO: 40825 - protein, 580 aa, Homo sapiens
MFAGLQDLGVANGEDLKETLTNCTEPLKAIEQFQTENGVLLPSLQSALPFLDLHGTPRLEFHQSVFDELRDKLLERVSAIASEGKAEERYKKLEDLLEKSFSLVKMPSLQPVVMCVMKHLPKVPEKKLKLVMADKELYRACAVEVKRQIWQDNQALFGDEVSPLLKQYILEKESALFSTELSVLHNFFSPSPKTRRQGEVVQRLTRMVGKNVKLYDMVLQFLRTLFLRTRNVHYCTLRAELLMSLHDLDVGEICTVDPCHKFTWCLDACIRERFVDSKRARELQGFLDGVKKGQEQVLGDLSMILCDPFAINTLALSTVRHLQELVGQETLPRDSPDLLLLLRLLALGQGAWDMIDSQVFKEPKMEVELITRFLPMLMSFLVDDYTFNVDQKLPAEEKAPVSYPNTLPESFTKFLQEQRMACEVGLYYVLHITKQRNKNALLRLLPGLVETFGDLAFGDIFLHLLTGNLALLADEFALEDFCSSLFDGFFLTASPRKENVHRHALRLLIHLHPRVAPSKLEALQKALEPTGQSGEAVKELYSQLGEKLEQLDHRKPSPAQAAETPALELPLPSVPAPAPL

SEQ ID NO: 40826 - protein, 165 aa, Homo sapiens
MSPGCNYLVQEDFVPFLQDVVNTHPGLSFLKEASEFHSRYITTVIQRIFYAVNRSWSGRITCAELRRSSFLQNVALLEEEADINQLTEFFSYEHFYVIYCKFWELDTDHDLLIDADDLARHNDHALSTKMIDRIFSGAVTRYVRLRRLTAAIAPARTPVPLLIVA

SEQ ID NO: 40827 - protein, 644 aa, Homo sapiens [sequence omitted]

SEQ ID NO: 40828 - protein, 1045 aa, Homo sapiens [sequence omitted]

SEQ ID NO: 40829 - protein, 707 aa, Homo sapiens
MGEEEINPQTEEVSIKEIAITHHVKEGHEKADPSQFELLKVLGQGSFGKVFLVKKISGSDARQLYAMKVLKKATLKVRDRVRTKMERDILVEVNHPFIVKLHYAFQTEGKLYLILDFLRGGDLFTRLSKEVMFTEEDVKFYLAELALALDHLHSLGIIYRDLKPENILLDEEGHIKLTDFGLSKESIDHEKKAYSFCGTVEYMAPEVVNRRGHTQSADWWSFGVLMFEMLTGTLPFQGKDRKETMTMILKAKLGMPQFLSPEAQSLLRMLFKRNPANRLGAGPDGVEEIKRHSFFSTIDWNKLYRREIHPPFKPATGRPEDTFYFDPEFTAKTPKDSPGIPPSANAHQLFRGFSFVAITSDDESQAMQTVGVHSIVQLHRNSIQFTDGYEVKEDIGVGSYSVCKRCIHKATNMEFAVKIIDKSKRDPTEEIEILLRYGQHPNIITLKDVYDDGKYVYVVTELMKGGELLDKILRQKFFSEREASAVLFTITKTVEYLHAQGVVHRDLKPSNILYVDESGNPESIRICDFGFAKQLRAENGLLMTPCYTANFVAPEVLKRQGYDAACDIWSLGVLLYTMLTGYTPFANGPDDTPEEILARIGSGKFSLSGGYWNSVSDTAKDLVSKMLHVDPHQRLTAALVLRHPWIVHWDQLPQYQLNRQDAPHLVKGAMAATYSALNRNQSPVLEPVGRSTLAQRRGIKKITSTAL

SEQ ID NO: 40830 - protein, 798 aa, Homo sapiens [sequence omitted]

SEQ ID NO: 40831 - protein, 633 aa, Homo sapiens
MRGVGLGPALPPPPPYVILEEGGIRAYFTLGAECPGWDSTIESGYGEAPPPTESLEALPTPEASGGSLEIDFQVVQSSSFGGEGALETCSAVGWAPQRLVDPKSKEEAIIIVEDEDEDERESMRSSRRRRRRRRRKQRKVKRESRERNAERMESILQALEDIQLDLEAVNIKAGKAFLRLKRKFIQMRRPFLERRDLIIQHIPGFWVKAFLNHPRISILINRRDEDIFRYLTNLQVQDLRHISMGYKMKLYFQTNPYFTNMVIVKEFQRNRSGRLVSHSTPIRWHRGQEPQARRHGNQDASHSFFSWFSNHSLPEADRIAEIIKNDLWVNPLRYYLRERGSRIKRKKQEMKKRKTRGRCEVVIMEDAPDYYAVEDIFSEISDIDETIHDIKISDFMETTDYFETTDNEITDINENICDSENPDHNEVPNNETTDNNESADDHETTDNNESADDNNENPEDNNKNTDDNEENPNNNENTYGNNFFKGGFWGSHGNNQDSSDSDNEADEASDDEDNDGNEGDNEGSDDDGNEGDNEGSDDDDRDIEYYEKVIEDFDKDQADYEDVIEIISDESVEEEGIEEGIQQDEDIYEEGNYEEEGSEDVWEEGEDSDDSDLEDVLQVPNGWANPGKRGKTG

SEQ ID NO: 40832 - protein, 974 aa, Homo sapiens
MPKPKKGLKGFFSSIRRHRKSKVTGAEQSEPGAKGPERVRARPHEHVSSAPQVPCFEETFQAPRKENANPQDAPGPKVSPTPEPSPPATEKMACKDPEKPMEACASAHVQPKPAPEASSLEEPHSPETGEKVVAGEVNPPNGPVGDPLSLLFGDVTSLKSFDSLTGCGDIIAEQDMDSMTDSMASGGQRANRDGTKRSSCLVTYQGGGEEMALPDDDDEEEEEEEEVELEEEEEEVKEEEEDDDLEYLWETAQMYPRPNMNLGYHPTTSPGHHGYMLLDPVRSYPGLAPGELLTPQSDQQESAPNSDEGYYDSTTPGFEDDSGEALGLVRRDCLPRDSYSGDALYEFYEPDDSLENSPPGDDCLYDLHGRSSEMFDPFLNFEPFLSSRPPGAMETEEERLVTIQKQLLYWELRREQLEAQEARAREAHAREAHAREAYTREAYGREAYAREAHTWEAHGREARTREAQAREVRCRETQVRETQARQEKPVLEYQMRPLGPSVMGLAAGVSGTSQISHRGITSAFPTTASSEPDWRDFRPLEKRYEGTCSKKDQSTCLMQLFQSDAMFEPDMQEANFGGSPRRAYPTYSPPEDPEEEEVEKEGNATVSFSQALVEFTSNGNLFSSMSCSSDSDSSFTQNLPELPPMVTFDIADVERDGEGKCEENPEFHNDEDLAASLEAFELGYYHKHAFNNYHSRFYQGLPWGVSSLPRYLGLPGLHPRPPPAAMALNRRSRSLDTAETLEMELSNSHLVQGYLESDELQAQQEDSDEEDEEEEEGEWSRDSPLSLYTEPPGAYDWPAWAPCPLPVGPGPAWISPNQLDRPSSQSPYRQATCCIPPMTMSISLSVPESRAPGESGPQLARPSHLHLPMGPCYNLQPQASQSMRARPRDVLLPVDEPSCSSSSGGFSPSPLPQAKPVGITHGIPQLPRVRPEHPQPQPTHYGPSSLDLSKERAEQGASLATSYSSTAMNGNLAK

SEQ ID NO: 40833 - protein, 499 aa, Homo sapiens
MGLGSASASAWRRASQRWAWPLRSLRPGGDAREPRKIILHKGSTGLGFNIVGGEDGEGIFVSFILAGGPADLSGELRRGDRILSVNGVNLRNATHEQAAAALKRAGQSVTIVAQYRPEEYSRFESKIHDLREQMMNSSMSSGSGSLRTSEKRSLYVRALFDYDRTRDSCLPSQGLSFSYGDILHVINASDDEWWQARLVTPHGESEQIGVIPSKKRVEKKERARLKTVKFHARTGMIESNRSIKTKRKKSFRLSRKFPFYKSKENMAQESSIQEQGVTSNTSDSESSSKGQEDAILSYEPVTRQEIHYARPVIILGPMKDRVNDDLISEFPHKFGSCVPHTTRPRRDNEVDGQDYHFVVSREQMEKDIQDNKFIEAGQFNDNLYGTSIQSVRAVAERGKHCILDVSGNAIKRLQQAQLYPIAIFIKPKSIEALMEMNRRQTYEQANKIYDKAMKLEQEFGEYFTAIVQGDSLEEIYNKIKQIIEDQSGHYIWVPSPEKL

SEQ ID NO: 40834 - protein, 2180 aa, Homo sapiens
MAAFGILSYEHRPLKRPRLGPPDVYPQDPKQKEDELTALNVKQGFNNQPAVSGDEHGSAKNVSFNPAKISSNFSSIIAEKLRCNTLPDTGRRKPQVNQKDNFWLVTARSQSAINTWFTDLAGTKPLTQLAKKVPIFSKKEEVFGYLAKYTVPVMRAAWLIKMTCAYYAAISETKVKKRHVDPFMEWTQIITKYLWEQLQKMAEYYRPGPAGSGGCGSTIGPLPHDVEVAIRQWDYTEKLAMFMFQDGMLDRHEFLTWVLECFEKIRPGEDELLKLLLPLLLRYSGEFVQSAYLSRRLAYFCTRRLALQLDGVSSHSSHVISAQSTSTLPTTPAPQPPTSSTPSTPFSDLLMCPQHRPLVFGLSCILQTILLCCPSALVWHYSLTDSRIKTGSPLDHLPIAPSNLPMPEGNSAFTQQVRAKLREIEQQIKERGQAVEVRWSFDKCQEATAGFTIGRVLHTLEVLDSHSFERSDFSNSLDSLCNRIFGLGPSKDGHEISSDDDAVVSLLCEWAVSCKRSGRHRAMVVAKLLEKRQAEIEAERCGESEAADEKGSIASGSLSAPSAPIFQDVLLQFLDTQAPMLTDPRSESERVEFFNLVLLFCELIRHDVFSHNMYTCTLISRGDLAFGAPGPRPPSPFDDPADDPEHKEAEGSSSSKLEDPGLSESMDIDPSSSVLFEDMEKPDFSLFSPTMPCEGKGSPSPEKPDVEKEVKPPPKEKIEGTLGVLYDQPRHVQYATHFPIPQEESCSHECNQRLVVLFGVGKQRDDARHAIKKITKDILKVLNRKGTAETDQLAPIVPLNPGDLTFLGGEDGQKRRRNRPEAFPTAEDIFAKFQHLSHYDQHQVTAQVSRNVLEQITSFALGMSYHLPLVQHVQFIFDLMEYSLSISGLIDFAIQLLNELSVVEAELLLKSSDLVGSYTTSLCLCIVAVLRHYHACLILNQDQMAQVFEGLCGVVKHGMNRSDGSSAERCILAYLYDLYTSCSHLKNKFGELFSDFCSKVKNTIYCNVEPSESNMRWAPEFMIDTLENPAAHTFTYTGLGKSLSENPANRYSFVCNALMHVCVGHHDPDRVNDIAILCAELTGYCKSLSAEWLGVLKALCCSSNNGTCGFNDLLCNVDVSDLSFHDSLATFVAILIARQCLLLEDLIRCAAIPSLLNAACSEQDSEPGARLTCRILLHLFKTPQLNPCQSDGNKPTVGIRSSCDRHLLAASQNRIVDGAVFAVLKAVFVLGDAELKGSGFTVTGGTEELPEEEGGGGSGGRRQGGRNISVETASLDVYAKYVLRSICQQEWVGERCLKSLCEDSNDLQDPVLSSAQAQRLMQLICYPHRLLDNEDGENPQRQRIKRILQNLDQWTMRQSSLELQLMIKQTPNNEMNSLLENIAKATIEVFQQSAETGSSSGSTASNMPSSSKTKPVLSSLERSGVWLVAPLIAKLPTSVQGHVLKAAGEELEKGQHLGSSSRKERDRQKQKSMSLLSQQPFLSLVLTCLKGQDEQREGLLTSLYSQVHQIVNNWRDDQYLDDCKPKQLMHEALKLRLNLVGGMFDTVQRSTQQTTEWAMLLLEIIISGTVDMQSNNELFTTVLDMLSVLINGTLAADMSSISQGSMEENKRAYMNLAKKLQKELGERQSDSLEKVRQLLPLPKQTRDVITCEPQGSLIDTKGNKIAGFDSIFKKEGLQVSTKQKISPWDLFEGLKPSAPLSWGWFGTVRVDRRVARGEEQQRLLLYHTHLRPRPRAYYLEPLPLPPEDEEPPAPTLLEPEKKAPEPPKTDKPGAAPPSTEERKKKSTKGKKRSQPATKTEDYGMGPGRSGPYGVTVPPDLLHHPNPGSITHLNYRQGSIGLYTQNQPLPAGGPRVDPYRPVRLPMQKLPTRPTYPGVLPTTMTGVMGLEPSSYKTSVYRQQQPAVPQGQRLRQQLQAKIQSQGMLGQSSVHQMTPSSSYGLQTSQGYTPYVSHVGLQQHTGPAGTMVPPSYSSQPYQSTHPSTNPTLVDPTRHLQQRPSGYVHQQAPTYGHGLTSTQRFSHQTLQQTPMISTMTPMSAQGVQAGVRSTAILPEQQQQQQQQQQQQQQQQQQQQQQQQQQYHIRQQQQQQILRQQQQQQQQQQQQQQQQQQQQQQQQQQHQQQQQQQAAPPQPQPQSQPQFQRQGLQQTQQQQQTAALVRQLQQQLSNTQPQPSTNIFGRY

SEQ ID NO: 40835 - protein, 215 aa, Homo sapiens
MKEDGCNSSDKRLKRIELRERRNLSSKRNTKEIQSGSSSSDAEESSEDNKKKKQRTSSKKKAVIVKEKKRNSLRTSTKRKQADITSSSSSDIEDDDQNSIGEGSSDEQKIKPVTENLVLSSHTGFCQSSGDEALSKSVPVTVDDDDDDNDPENRYDSICKDFKKIITHPRHGHKQQQRNSKQVVKTRSACLRKTRSQSSCKFERKARKWAKTQKP

SEQ ID NO: 40836 - protein, 1496 aa, Homo sapiens
MGVNSVTISVEGMTCNSCVWTIEQQIGKVNGVHHIKVSLEEKNATIIYDPKLQTPKTLQEAIDDMGFDAVIHNPDPLPVLTDTLFLTVTASLTLPWDHIQSTLLKTKGVTDIKIYPQKRTVAVTIIPSIVNANQIKELVPELSLDTGTLEKKSGACEDHSMAQAGEVVLKMKVEGMTCHSCTSTIEGKIGKLQGVQRIKVSLDNQEATIVYQPHLISVEEMKKQIEAMGFPAFVKKQPKYLKLGAIDVERLKNTPVKSSEGSQQRSPSYTNDSTATFIIDGMHCKSCVSNIESTLSALQYVSSIVVSLENRSAIVKYNASSVTPESLRKAIEAVSPGLYRVSITSEVESTSNSPSSSSLQKIPLNVVSQPLTQETVINIDGMTCNSCVQSIEGVISKKPGVKSIRVSLANSNGTVEYDPLLTSPETLRGAIEDMGFDATLSDTNEPLVVIAQPSSEMPLLTSTNEFYTKGMTPVQDKEEGKNSSKCYIQVTGMTCASCVANIERNLRREEGIYSILVALMAGKAEVRYNPAVIQPPMIAEFIRELGFGATVIENADEGDGVLELVVRGMTCASCVHKIESSLTKHRGILYCSVALATNKAHIKYDPEIIGPRDIIHTIESLGFEASLVKKDRSASHLDHKREIRQWRRSFLVSLFFCIPVMGLMIYMMVMDHHFATLHHNQNMSKEEMINLHSSMFLERQILPGLSVMNLLSFLLCVPVQFFGGWYFYIQAYKALKHKTANMDVLIVLATTIAFAYSLIILLVAMYERAKVNPITFFDTPPMLFVFIALGRWLEHIAKGKTSEALAKLISLQATEATIVTLDSDNILLSEEQVDVELVQRGDIIKVVPGGKFPVDGRVIEGHSMVDESLITGEAMPVAKKPGSTVIAGSINQNGSLLICATHVGADTTLSQIVKLVEEAQTSKAPIQQFADKLSGYFVPFIVFVSIATLLVWIVIGFLNFEIVETYFPGYNRSISRTETIIRFAFQASITVLCIACPCSLGLATPTAVMVGTGVGAQNGILIKGGEPLEMAHKVKVVVFDKTGTITHGTPVVNQVKVLTESNRISHHKILAIVGTAESNSEHPLGTAITKYCKQELDTETLGTCIDFQVVPGCGISCKVTNIEGLLHKNNWNIEDNNIKNASLVQIDASNEQSSTSSSMIIDAQISNALNAQQYKVLIGNREWMIRNGLVINNDVNDFMTEHERKGRTAVLVAVDDELCGLIAIADTVKPEAELAIHILKSMGLEVVLMTGDNSKTARSIASQVGITKVFAEVLPSHKVAKVKQLQEEGKRVAMVGDGINDSPALAMANVGIAIGTGTDVAIEAADVVLIRNDLLDVVASIDLSRKTVKRIRINFVFALIYNLVGIPIAAGVFMPIGLVLQPWMGSAAMAASSVSVVLSSLFLKLYRKPTYESYELPARSQIGQKSPSEISVHVGIDDTSRNSPKLGLLDRIVNYSRASINSLLSDKRSLNSVVTSEPDKHSLLVGDFREDDDTAL

SEQ ID NO: 40837 - protein, 22 aa, Homo sapiens
MVIRVYIASSSGSTASSALFAS

SEQ ID NO: 40838 - protein, 278 aa, Homo sapiens [sequence omitted]

SEQ ID NO: 40839 - protein, 65 aa, Homo sapiens
MITVPIGLYFTTKSYIFEGALGMSNRDSYFYAAIVAVVAVHVVLALFVYVAWNEGSRQWREGKQD

SEQ ID NO: 40840 - protein, 181 aa, Homo sapiens
MTESREEAMAAMASLGALALLLLSSLSRCSAEACLEPQITPSYYTTSDAVISTETVFIVEISLTCKNRVQNMALYADVGGKQFPVTRGQDVGRYQVSWSLDHKSAHAGTYEVRFFDEESYSLLRKAQRNNEDISIIPPLFTVSVDHRGTWNGPWVSTEVLAAAIGLVIYYLAFSAKSHIQA

SEQ ID NO: 40841 - protein, 47 aa, Homo sapiens
MTESREEAMAAMASLGALALLLLSSLSRCSGICLLWSRPRAFSDVLC

SEQ ID NO: 40842 - protein, 469 aa, Homo sapiens [sequence omitted]

SEQ ID NO: 40843 - protein, 86 aa, Homo sapiens [sequence omitted]

SEQ ID NO: 40844 - protein, 474 aa, Homo sapiens [sequence omitted]

SEQ ID NO: 40845 - protein, 500 aa, Homo sapiens
MGTWLLACICICTCVCLGVSVTGEGQGPRSRTFTCLTNNILRIDCHWSAPELGQGSSPWLLFTSNQAPGGTHKCILRGSECTVVLPPEAVLVPSDNFTITFHHCMSGREQVSLVDPEYLPRRHVKLDPPSDLQSNISSGHCILTWSISPALEPMTTLLSYELAFKKQEEAWEQAQHRDHIVGVTWLILEAFELDPGFIHEARLRVQMATLEDDVVEEERYTGQWSEWSQPVCFQAPQRQGPLIPPWGWPGNTLVAVSIFLLLTGPTYLLFKLSPRVKRIFYQNVPSPAMFFQPLYSVHNGNFQTWMGAHGAGVLLSQDCAGTPQGALEPCVQEATALLTCGPARPWKSVALEEEQEGPGTRLPGNLSSEDVLPAGCTEWRVQTLAYLPQEDWAPTSLTRPAPPDSEGSRSSSSSSSSNNNNYCALGCYGGWHLSALPGNTQSSGPIPALACGLSCDHQGLETQQGVAWVLAGHCQRPGLHEDLQGMLLPSVLSKARSWTF

SEQ ID NO: 40846 - protein, 75 aa, Homo sapiens
MNRSSGTPGRPHPGAPRVAASLFLGTFFISSGLILSVAGFFYLKRSSKLPRACYRRNKAPALQPGEAVSNPHHPG

SEQ ID NO: 40847 - protein, 444 aa, Homo sapiens
MEQEKMTMNKELSPDAAAYCCSACHGDETWSYNHPIRGRAKSRSLSASPALGSTKEFRRTRSLHGPCPVTTFGPKACVLQNPQTIMHIQDPASQRLTWNKSPKSVLVIKKMRDASLLQPFKELCTHLMEENMIVYVEKKVLEDPAIASDESFGAVKKKFCTFREDYDDISNQIDFIICLGGDGTLLYASSLFQGSVPPVMAFHLGSLGFLTPFSFENFQSQVTQVIEGNAAVVLRSRLKVRVVKELRGKKTAVHNGLGENGSQAAGLDMDVGKQAMQYQVLNEVVIDRGPSSYLSNVDVYLDGHLITTVQGDGVIVSTPTGSTAYAAAAGASMIHPNVPAIMITPICPHSLSFRPIVVPAGVELKIMLSPEARNTAWVSFDGRKRQEIRHGDSISITTSCYPLPSICVRDPVSDWFESLAQCLHWNVRKKQAHFEEEEEEEEEG

SEQ ID NO: 40848 - protein, 4144 aa, Homo sapiens
MELQEAMARSMESRSHHYVLEPVFASALLKRNCSKKPLRSRHSPRIDCDIQLETIPLKLSQLQYRQIMEFLKELERKERQVKFRRWKPKVAISKNCREWWYFALNANLYEIREQRKRCTWDFMLHRARDAVSYTDKYFNKLKGGLLSTDDKEEMCRIEEEQSFEELKILRELVHDRFHKQEELAESLREPQFDSPGACPGAPEPGGGSGMLQYLQSWFPGWGGWYGQQTPEGNVVEGLSAEQQEQWIPEEILGTEEFFDPTADASCMNTYTKRDHVFAKLNLQLQRGTVTLLHKEQGTPQMNESAFMQLEFSDVKLLAESLPRRNSSLLSVRLGGLFLRDLATEGTMFPLLVFPNPQKEVGRVSQSFGLQTTSADRSDHYPAADPDGPVFEMLYERNPAHSHFERRLNVSTRPLNIIYNPQAIKKVADFFYKGKVHTSGFGYQSELELRVAEAARRQYNKLKMQTKAEIRQTLDRLLVGDFIEESKRWTVRLDISAPQVIFPDDFKFKNPVLVVVDLGRMLLTNTQDNSRRKSRDGSASEETQFSDDEYKTPLATPPNTPPPESSSSNGEKTPPFSGVEFSEEQLQAHLMSTKMYERYSLSFMDLQIMVGRVKDNWKHVQDIDVGPTHVVEKFNVHLQLERRLIYTSDPKYPGAVLSGNLPDLKIHINEDKISALKNCFALLTTPEMKTSDTQIKEKIFPQEEQRGSLQDSVMNLTQSIVLLEQHTREVLVESQLLLAEFKVNCMQLGVESNGRYISVLKVFGTNAHFVKRPYDAEVSLTVHGLLLVDTMQTYGADFDLLMASHKNLSFDIPTGSLRDSRAQSPVSGPNVAHLTDGATLNDRSATSVSLDKILTKEQESLIKLEYQFVSSECPSMNLDSTLQVISLQVNNLDIILNPETIVELIGFLQKSFPKEKDDLSPQPLMTDFERSFREQGTYQSTYEQNTEVAVEIHRLNLLLLRTVGMANREKYGRKIATASIGGTKVNVSMGSTFDMNGSLGCLQLMDLTQDNVKNQYVVSIGNSVGYENIISDIGYFESVFVRMEDAALTEALSFTFVERSKQECFLNLKMASLHYNHSAKFLKELTLSMDELEENFRGMLKSAATKVTTVLATKTAEYSEMVSLFETPRKTREPFILEENEIYGFDLASSHLDTVKLILNINIESPVVSIPRKPGSPELLVGHLGQIFIQNFVAGDDESRSDRLQVEIKDIKLYSLNCTQLAGREAVGSEGSRMFCPPSGSGSANSQEEAHFTRHDFFESLHRGQAFHILNNTTIQFKLEKIPIERESELTFSLSPDDLGTSSIMKIEGKFVNPVQVVLAKHVYEQVLQTLDNLVYSEDLNKYPASATSSPCPDSPLPPLSTCGESSVERKENGLFSHSSLSNTSQKSLSVKEVKSFTQIQATFCISELQVQLSGDLTLGAQGLVSLKFQDFEVEFSKDHPQTLSIQIALHSLLMEDLLEKNPDSKYKNLMVSRGAPKPSSLAQKEYLSQSCPSVSNVEYPDMPRSLPSHMEEAPNVFQLYQRPTSASRKKQKEVQDKDYPLTPPPSPTVDEPKILVGKSKFDDSLVHINIFLVDKKHPEFSSSYNRVNRSIDVDFNCLDVLITLQTWVVILDFFGIGSTADNHAMRLPPEGILHNVKLEPHASMESGLQDPVNTKLDLKVHSLSLVLNKTTSELAKANVSKLVAHLEMIEGDLALQGSIGSLSLSDLTCHGEFYRERFTTSGEEALIFQTFKYGRPDPLLRREHDIRVSLRMASVQYVHTQRFQAEVVAFIQHFTQLQDVLGRQRAAIEGQTVRDQAQRCSRVLLDIEAGAPVLLIPESSRSNNLIVANLGKLKVKNKFLFAGFPGTFSLQDKESVPSASPTGIPKHSLRKTTSTEEPRGTHSQGQFTMPLAGMSLGSLKSEFVPSTSTKQQGPQPTLSVGQESSSPEDHVCLLDCVVVDLQDMDIFAAERHPREYSKAPEDSSGDLIFPSYFVRQTGGSLLTEPCRLKLQVERNLDKEISHTVPDISIHGNLSSVHCSLDLYKYKLIRGLLENNLGEPIEEFMRPYDLQDPRIHTVLSGEVYTCMCFLIDMVNVSLELKDPKRKEGAGSLARFDFKKCKLLYESFSNQTKSINLVSHSMMAFDTRYAGQKTSPGMTNVFSCIFQPAKNSSTTQGSIQIELHFRSTKDSSCFTVVLNNLRVFLIFDWLLLVHDFLHTPSDIKKQNHVTPSRHRNSSSESAIVPKTVKSGVVTKRSSLPVSNERHLEVKVNVTGTEFVVIEDVSCFDTNAIILKGTTVLTYKPRFVDRPFSGSLFGIEVFSCRLGNEHDTALSIVDPVQIQMELVGNSSYQNSSGLMDAFNSEDFPPVLEIQLQALDIRLSYNDVQLFLAIAKSIPEQANAAVPDSVALESDSVGTYLPGASRVGEEIREGTRHTLDPVLELQLARLQELGFSMDDCRKALLACQGQLKKAASWLFKNAEPLKSLSLASTSRDSPGAVAAPLISGVEIKAESVCICFIDDCMDCDVPLAELTFSRLNFLQRVRTSPEGYAHFTLSGDYYNRALSGWEPFIEPWPCSVSWQQQAASRLHPPRLKLEAKAKPRLDINITSVLIDQYVSTKESWMADYCKDDKDIESAKSEDWMGSSVDPPCFGQTEVKTPKRRQPFVPFALRNHTGCTLWFATLTTTPTRAALSHSGSPGVVPEGNGTFLDDTHNVSEWREVLTGEEIPFEFEARGKLRHRHTHDLRIHQLQVRVNGWEQVSPVSVDKVGTFFRYAAPDKNSSSSTIGSPSSRTNIIHPQVYFSSLPPVRVVFAVTMEGSARKVITVRSALIVRNRLETPMELRLDSPSAPDKPVVLPAIMPGDSFAVPLHLTSWRLQARPKGLGVFFCKAPIHWTNVVKTAEISSSKRECHSMDTEKSRFFRFCVAIKKENYPDYMPSNIFSDSAKQIFRQPGHTIYLLPTVVICNLLPCELDFYVKGMPINGTLKPGKEAALHTADTSQNIELGVSLENFPLCKELLIPPGTQNYMVRMRLYDVNRRQLNLTIRIVCRAEGSLKIFISAPYWLINKTGLPLIFRQDNAKTDAAGQFEEHELARSLSPLLFCYADKEQPNLCTMRIGRGIHPEGMPGWCQGFSLDGGSGVRALKVIQQGNRPGLIYNIGIDVKKGRGRYIDTCMVIFAPRYLLDNKSSHKLAFAQREFARGQGTANPEGYISTLPGSSVVFHWPRNDYDQLLCVRLMDVPNCIWSGGFEVNKNNSFHINMRDTLGKCFFLRVEITLRGATYRISFSDTDQLPPPFRIDNFSKVPVVFTQHGVAEPRLRTEVKPMTSLDYAWDEPTLPPFITLTVKGAGSSEINCNMNDFQDNRQLYYENFIYIAATYTFSGLQEGTGRPVASNKAITCAELVLDVSPKTQRVILKKKEPGKRSQLWRMTGTGMLAHEGSSVPHNPNKPSAARSTEGSAILDIAGLAAVTDNRYEPLMLRKPDRRRSTTQTWSFREGKLTCGLHGLVVQAKGGLSGLFDGAEVVLGPDTSMELLGPVPPEQQFINQKMRPGSGMLSIRVIPDGPTRALQITDFCHRKSSRSYEVDELPVTEQELQKLKNPDTEQELEVLVRLEGGIGLSLINKVPEELVFASLTGINVHYTQLATSHMLELSIQDVQVDNQLIGTTQPFMLYVTPLSNENEVIETGPAVQVNAVKFPSKSALTNIYKHLMITAQRFTVQIEEKLLLKLLSFFGYDQAESEVEKYDENLHEKTAEQGGTPIRYYFENLKISIPQIKLSVFTSNKLPLDLKALKSTLGFPLIRFEDAVINLDPFTRVHPYETKEFIINDILKHFQEELLSQAARILGSVDFLGNPMGLLNDVSEGVTGLIKYGNVGGLIRNVTHGVSNSAAKFAGTLSDGLGKTMDNRHQSEREYIRYHAATSGEHLVAGIHGLAHGIIGGLTSVITSTVEGVKTEGGVSGFISGLGKGLVGTVTKPVAGALDFASETAQAVRDTATLSGPRTQAQRVRKPRCCTGPQGLLPRYSESQAEGQEQLFKLTDNIQDEFFIAVENIDSYCVLISSKAVYFLKSGDYVDREAIFLEVKYDDLYHCLVSKDHGKVYVQVTKKAVSTSSGVSIPGPSHQKPMVHVKSEVLAVKLSQEINYAKSLYYEQQLMLRLSENREQLELDS

SEQ ID NO: 40849 - protein, 125 aa, Homo sapiens
MKHQFLLRARTESEKQRWISALCPSSPQEDKEVISEGEDCPQVQCVRTYKALHPDELTLEKTDILSVRTWTSDGWLEGVRLADGEKGWVPQAYVEEISSLSARLRNLRENKRVTSATSKLGEAPV

SEQ ID NO: 40850 - protein, 122 aa, Homo sapiens
MLSGPRRAEILAKTMVGQGKTVIQAEIDAAAELIDFFRFNAKYAVELEGQQPISVPPSTNSTVYRGLEGFVAAISPFNFTAIGGNLAGAPALMLREGVVTLPLCQMTKLRHTAVTYLARLSD

SEQ ID NO: 40851 - protein, 180 aa, Homo sapiens
MLRVLVGAVLPAMLLAAPPPINKLALFPDKSAWCEAKNITQIVGHSGCEAKSIQNRACLGQCFSYSVPNTFPQSTESLVHCDSCMPAQSMWEIVTLECPGHEEVPRVDKLVEKILHCSCQACGKEPSHEGLSVYVQGEDGPGSQPGTHPHPHPHPHPGGQTPEPEDPPGAPHTEEEGAED

SEQ ID NO: 40852 - protein, 79 aa, Homo sapiens
MCGNTMSVPLLTDAATVSGAERETAAVIFLHGLGDTGHSWADALSTIRLPHVKYICPHAPRIPVTLNMKMVMPSCQGLD

SEQ ID NO: 40853 - protein, 67 aa, Homo sapiens
MKESRLPPPGAAQWLPCPSSAGAGSNVRNGSHCDHPNLAKQATWGCSKCSKKNWDQPTLEAVCPGVL

SEQ ID NO: 40854 - protein, 289 aa, Homo sapiens
MEATVTIPIWQNKPHGAARSVVRRIGTNLPLKPCARASFETLPNISDLCLRDVPPVPTLADIAWIAADEEETYARVRSDTRPLRHTWKPSPLIVMQRNASVPNLRGSEERLLALKKPALPALSRTTELQDELSHLRSQIAKIVAADAASASLTPDFLSPGSSNVSSPLPCFGSSFHSTTSFVISDITEETEVEVPELPSVPLLCSASPECCKPEHKAACSSSEEDDCVSLSKASSFADMMGILKDFHRMKQSQDLNRSLLKEEDPAVLISEVLRRKFALKEEDISRKGN

SEQ ID NO: 40855 - protein, 188 aa, Homo sapiens
MAEVEAPTAAETDMKQYQGSGGVAMDVERSRFPYCVVWTPIPVLTWFFPIIGHMGICTSTGVIRDFAGPYFVSEDNMAFGKPAKYWKLDPAQVYASGPNAWDTAVHDASEEYKHRMHNLCCDNCHSHVALALNLMRYNNSTNWNMVTLCFFCLLYGKYVSVGAFVKTWLPFILLLGIILTVSLVFNLR

SEQ ID NO: 40856 - protein, 686 aa, Homo sapiens
MVLDSVEAGDTTPPTKRKSKFSGFGKIFKPWKWRKKKSSDKFKETSEVLERKISMRKPREELVKRGVLLEDPEQGGEDPGKPSDAMLKNGHTTPIGNARSSSPVQVEEEPVRLASLRKAIPEEDLKKRLGSTGSQPNSEAESVPENVPKPPLLPPKRPLSSSHEASEGQAKDATSSGGTARFIISTSITTAPAATTAATSLAKTVNLSVTPSPAPRTLPAAPASTNTTATPSLTHMVPAKQPPIPPPKPAHRNSNPVIAELSQAINSGTLLSKPSPPLPPKRGIPSTSVPTLESAAAITTKTPSDEREKSTCSMGSELLPMISPRSPSPPLPTHIPPEPPRTPPFPAKTFQVVPEIEFPPSLDLHQEIPQQEDQKKEVPKRILDQNFGEPHIPSRLPPLPLHIRIQQALTSPLPMTPILEGSHRAHSLLFENSDSFSEDSSTLGRTRSLPITIEMLKVPDDEEEEEQTCPSTFSEEMTPTSVIPKLPQCLREEEEKESDSDSEGPIQYRDEEDEDESYQSALANKVKRKDTLAMKLNHRPSEPELNLNSWPCKSKEEWNEIRHQIGNTLIRRLSQRPTPEELEQRNILQPKNEADRQAEKREIKRRLTRKLSQRPTVAELLARKILRFNEYVEVTDAQDYDRRADKPWTKLTPADKAAIRKELNEFKSSEMEVHEESKHFTRYHRP

SEQ ID NO: 40857 - protein, 533 aa, Homo sapiens
MASPGKDNYRMKSYKNNALNPEEMRRRREEEGIQLRKQKREQQLFKRRNVELINEEAAMFDSLLMDSYVSSTTGESVITREMVEMLFSDDSDLQLATTQKFRKLLSKEPSPPIDEVINTPRVVDRFVEFLKRNENCTLQFEAAWALTNIASGTSQQTKIVIEAGAVPIFIELLNSDFEDVQEQAVWALGNIAGDSSVCRDYVLNCSILNPLLTLLTKSTRLTMTRNAVWALSNLCRGKNPPPEFAKVSPCLPVLSRLLFSSDSDLLADACWALSYLSDGPNEKIQAVIDSGVCRRLVELLMHNDYKVASPALRAVGNIVTGDDIQTQVILNCSALPCLLHLLSSPKESIRKEACWTISNITAGNRAQIQAVIDANIFPVLIEILQKAEFRTRKEAAWAITNATSGGTPEQIRYLVSLGCIKPLCDLLTVMDSKIVQVALNGLENILRLGEQEGKRSGSGVNPYCGLIEEAYGLDKIEFLQSHENQEIYQKAFDLIEHYFGVEDDDSSLAPQVDETQQQFIFQQPEAPMEGFQL

SEQ ID NO: 40858 - protein, 341 aa, Homo sapiens
MMCSRVPSEQSSGTSLLPKDGAPFSWDSLDEDGLDDSLLELSEGEEDDGDVNYTEEEIDALLKEDDPSYEQSSGEDDGGHVEKGERGSQILLDTPREKNSSYSLGPVAETPDLFKLPQLSTSSGHGPAHTKPLNRRSVLEKNLIKVTVAPFNPTVCDALLDKDETDSSKDTEKLSSLGEEMREDGLSPNESKLCTESEGISPNNSAWNGPQLSSSNNNFQQTVSDKNMPDSENPTSVFSRISDHSETPNMELSCRNGGSHKSSCEMRSLVVSTSSNKDVLNKDSGKMKGHERRLGKVIPVLQTKTRTNVPTFSQSNLEQQKQLYLRSVIAHIEDPEDTNQG

SEQ ID NO: 40859 - protein, 1228 aa, Homo sapiens
MLYKGQTAYHKTGSTQLFCSTRCITRHSSPACLPPPPKKTCTNCSKDILNPKDVITTRFENSYPSKDFCSQSCLSSYELKKKPVVTIYTKSISTKCSMCQKNADTRFEVKYQNVVHGLCSDACFSKFHSTNNLTMNCCENCGSYCYSSSGPCQSQKVFSSTSVTAYKQNSAQIPPYALGKSLRPSAEMIETTNDSGKTELFCSINCLSAYRVKTVTSSGVQVSCHSCKTSAIPQYHLAMSNGTIYSFCSSSCVVAFQNVFSKPKGTNSSAVPLSQGQVVVSPPSSRSAVSIGGGNTSAVSPSSIRGSAAASLQPLAEQSQQVALTHTVVKLKCQHCNHLFATKPELLFYKGKMFLFCGKNCSDEYKKKNKVVAMCDYCKLQKIIKETVRFSGVDKPFCSEVCKFLSARDFGERWGNYCKMCSYCSQTSPNLVENRLEGKLEEFCCEDCMSKFTVLFYQMAKCDGCKRQGKLSESIKWRGNIKHFCNLFCVLEFCHQQIMNDCLPQNKVNISKAKTAVTELPSARTDTTPVITSVMSLAKIPATLSTGNTNSVLKGAVTKEAAKIIQDESTQEDAMKFPSSQSSQPSRLLKNKGISCKPVTQTKATSCKPHTQHKECQTDLPMPNEKNDAELDSPPSKKKRLGFFQTYDTEYLKVGFIICPGSKESSPRPQCVICGEILSSENMKPANLSHHLKTKHSELENKPVDFFEQKSLEMECQNSSLKKCLLVEKSLVKASYLIAFQTAASKKPFSIAEELIKPYLVEMCSEVLGSSAGDKMKTIPLSNVTIQHRIDELSADIEDQLIQKVRESKWFALQIDESSEISNITLLLCYIRFIDYDCRDVKEELLFCIEMPTQITGFEIFELINKYIDSKSLNWKHCVGLCTDGAASMTGRYSGLKAKIQEVAMNTAAFTHCFIHRERLVAEKLSPCLHKILLQSAQILSFIKSNALNSRMLTILCEEMGSEHVSLPLHAEVRWISRGRMLKRLFELRHEIEIFLSQKHSDLAKYFHDEEWVGKLAYLSDIFSLINELNLSLQGTLTTFFNLCNKIDVFKRKLKMWLKRTQENDYDMFPSFSEFSNSSGLNMTDITRIIFEHLEGLSQVFSDCFPPEQDLRSGNLWIIHPFMNHQNNNLTDFEEEKLTELSSDLGLQALFKSVSVTQFWINAKTSYPELHERAMKFLLPFSTVYLCDAAFSALTESKQKNLLGSGPALRLAVTSLIPRIEKLVKEKE

SEQ ID NO: 40860 - protein, 538 aa, Homo sapiens
MCQKNADTRFEVKYQNVVHGLCSDACFSKFHSTNNLTMNCCENCGSYCYSSSGPCQSQKVFSSTSVTAYKQNSAQIPPYALGKSLRPSAEMIETTNDSGKTELFCSINCLSAYRVKTVTSSGVQVSCHSCKTSAIPQYHLAMSNGTIYSFCSSSCVVAFQNVFSKPKGTNSSAVPLSQGQVVVSPPSSRSAVSIGGGNTSAVSPSSIRGSAAASLQPLAEQSQQVALTHTVVKLKCQHCNHLFATKPELLFYKGKMFLFCGKNCSDEYKKKNKVVAMCDYCKLQKIIKETVRFSGVDKPFCSEVCKFLSARDFGERWGNYCKMCSYCSQTSPNLVENRLEGKLEEFCCEDCMSKFTVLFYQMAKCDGCKRQGKLSESIKWRGNIKHFCNLFCVLEFCHQQIMNDCLPQNKVNISKAKTAVTELPSARTDTTPVITSVMSLAKIPATLSTGNTNSVLKGAVTKEAAKIIQDESTQEDAMKFPSSQSSQPSRLLKNKGISCKPVTQTKATSCKPHTQHKECQTETGFHSVGNAGLKLVTS

SEQ ID NO: 40861 - protein, 158 aa, Homo sapiens [sequence omitted]

SEQ ID NO: 40862 - protein, 235 aa, Homo sapiens
MNESELFGRTIRVNLAKPMRIKEGSSRPVWSDDDWLKKFSGKTLEENKEEEGSEPPKAETQEGEPIAKKARSNPQVYMDIKIGNKPAGRIQMLLRSDVVPMTAENFRCLCTHEKGFGFKGSSFHRIIPQFMCQGGDFTNHNGTGGKSIYGKKFDDENFILKHTGPGLLSMANSGPNTNGSQFFLTCDKTDWLDGKHVVFGEVTEGLDVLRQIEAQGSKDGKPKQKVIIADCGEYV

SEQ ID NO: 40863 - protein, 230 aa, Homo sapiens
MNESELFGRTIRVNLAKPMRIKEGSSRPVWSDDDWLKKFSGKTLEENKEEEGSEPPKAETQEGEPIAKKARSNPQVYMDIKIGNKPAGRIQMLLRSDVVPMTAENFRCLCTHEKGFGFKGSSFHRIIPQFMCQGGDFTNHNGTGGKSIYGKKFDDENFILKHTGPGLLSMANSGPNTNGSQFFLTCDKTDWLDGKHVVFGEVTEGLDVLRQIEKQEESAITSQPRSWKLT

SEQ ID NO: 40864 - protein, 248 aa, Homo sapiens
MNESELFGRTIRVNLAKPMRIKEGSSRPVWSDDDWLKKFSGKTLEENKEEEGSEPPKAETQEGEPIAKKARSNPQVYMDIKIGNKPAGRIQMLLRSDVVPMTAENFRCLCTHEKGFGFKGSSFHRIIPQFMCQGGDFTNHNGTGGKSIYGKKFDDENFILKHTGPGLLSMANSGPNTNGSQFFLTCDKTDWLDGKHVVFGEVTEGLDVLRQIEVAPDTKASKARGSRKNKDGQERNWGKSQKVESHTI

SEQ ID NO: 40865 - protein, 219 aa, Homo sapiens
MAVRALKLLTTLLAVVAAASQAEVESEAGWGMVTPDLLFAEGTAAYARGDWPGVVLSMERALRSRAALRALRLRCRTQCAADFPWELDPDWSPSPAQASGAAALRDLSFFGGLLRRAACLRRCLGPPAAHSLSEEMELEFRKRSPYNYLQVAYFKINKLEKAVAAAHTFFVGNPEHMEMQQNLDYYQTMSGVKEADFKDLETQPHMVKKTLSPSFFLSF

SEQ ID NO: 40866 - protein, 914 aa, Homo sapiens [sequence omitted]

SEQ ID NO: 40867 - protein, 24 aa, Homo sapiens
MTGLALLYSGVFVAFWACALAVGS

SEQ ID NO: 40868 - protein, 99 aa, Homo sapiens
MHWPYAFERGDNPFPKNADGTICYDSTHYKETWKALEALVAKGLVQALGLSNFNSRQIDDILSVASVRPAVLQVAGPAESDLHPQKYHSFSNPSEHQGV

SEQ ID NO: 40869 - protein, 260 aa, Homo sapiens
MAAVVVAAAGGAGPAVLQVAGLYRGLCAVRSRALGLGLVSPAQLRVFPVRPGSGRPEGGADSSGVGAEAELQANPFYDRYRDKIQLLRRSDPAAFESRLEKRSEFRKQPVGHSRQGDFIKCVEQKTDALGKQSVNRGFTKDKTLSSIFNIEMVKEKTAEEIKQIWQQYFAAKDTVYAVIPAEKFDLIWNRAQSCPTNVAEAQCIANQVQLFYATDRKETYGLVETFNLRPNEFKYMSVIAELEQSGLGAELKCAQNQNKT

SEQ ID NO: 40870 - protein, 340 aa, Homo sapiens
MKKRKELNALIGLAGDSRRKKPKKGPSSHRLLRTEPPDSDSESSSEEEEEFGVVGNRSRFAKGDYLRCCKICYPLCGFVILAACVVACVGLVWMQVALKEDLDALKEKFRTMESNQKSSFQEIPKLNEELLSKQKQLEKIESGEMGLNKVWINITEMNKQISLLTSAVNHLKANVKSAADLISLPTTVEGLQKSVASIGNTLNSVHLAVEALQKTVDEHKKTMELLQSDMNQHFLKETPGSNQIIPSPSATSELDNKTHSENLKQVLFISGLTPCDHSALQRQPNSLGLVFGVSAGASCIYLPAWELSREECVLVSRGSILLSFPFFGTLQFFPACQSVE

SEQ ID NO: 40871 - protein, 516 aa, Homo sapiens
MLKNVVALDVEVATNRIYWCDLSYRKIYSAYMDKASDPKEQEVLIDEQLHSPEGLAVDWVHKHIYWTDSGNKTISVATVDGGRRRTLFSRNLSEPRAIAVDPLRGFMYWSDWGDQAKIEKSGLNGVDRQTLVSDNIEWPNGITLDLLSQRLYWVDSKLHQLSSIDFSGGNRKTLISSTDFLSHPFGIAVFEDKVFWTDLENEAIFSANRLNGLEISILAENLNNPHDIVIFHELKQPRAPDACELSVQPNGGCEYLCLPAPQISSHSPKYTCACPDTMWLGPDMKRCYRAPQSTSTTTLASTMTRTVPATTRAPGTTVHRSTYQNHSTETPSLTAAVPSSVSVPRAPSISPSTLSPATSNHSQHYANEDSKMGSTVTAAVIGIIVPIVVIALLCMSGYLIWRNWKRKNTKSMNFDNPVYRKTTEEEDEDELHIGRTAQIGHVYPAAISSFDRPLWAEPCLGETREPEDPAPALKELFVLPGEPRSQLHQLPKNPLSELPVVKSKRVALSLEDDGLP

SEQ ID NO: 40872 - protein, 271 aa, Homo sapiens
MSPGAMRRSLPSTSSTSSTKRLKSVEDEMDSPGEEPFYTGQGRSPGSGSQSSGWHEVEPGMPSPTTLKKSEKSGFSSPSPSQTSSLGTAFTQHHRPVITGPREFKMAPSILGSPFWKVYSASPHATPSTLHFPTSPIIQQPGPYFSHPAIRYHPQETLKEFVQLVCPDAGQQAGQVGFLNPNGSSQGKVHNPFLPTPMLPPPPPPPMARPVPLPVPDTKPPTTSTEGGAASPTSPTYSTPSTSPANRFVSVGPRDPSFVNIPQQTQSWYLG

SEQ ID NO: 40873 - protein, 37 aa, Homo sapiens
MAGVKALVALSFSGAIGLTFLMLGCALEDYGDATTPS

SEQ ID NO: 40874 - protein, 445 aa, Homo sapiens
MYIDFPLNMNPGILVTCADDIELYSIGEFEFIRFDKPGFTALAHPSSLTIGTTHGVFVLDPFDDLKHRDLEYRSCHRFLHKPSIEKMYQFNAVCRPGNFCQQDFAGGDIADLKLDSDYVYTDSLFYMDHKSAKMLLAFYEKIGTLSCEIDAYGDFLQALGPGATVEYTRNTSNVIKEESELVEMRQRIFHLLKGTSLNVVVLNNSKFYHIGTTEEYLFYFTSDNSLKSELGLQSITFSIFPDIPECSGKTSCIIQSILDSRCSVAPGSVVEYSRLGPDVSVGENCIISGSYILTKAALPAHSFVCSLSLKMNRCLKYATMAFGVQDNLKKSVKTLSDIKLLQFFGVCFLSCLDVWNLKVTEELFSGNKTCLSLWTARIFPVCSSLSDSVITSLKMLNAVKNKSAFSLNSYKLLSIEEMLIYKDVEDMITYREQIFLEISLKSSLM

SEQ ID NO: 40875 - protein, 675 aa, Homo sapiens
MIFLLCIIGYIVLGLVAWVHGDPRRAAYPTDSQGHFCGQKGTPNENKTILFYFNLLRCTSPSVLLNLQCPTTQICVSKCPEKFLTYVEMQLLYTKDKSYWEDYRQFCKTTAKPVKSLTQLLLDDDCPTAIFPSKPFLQRCFPDFSTKNGTLTIGSKMMFQDGNGGTRSVVELGIAANGINKLLDAKSLGLKVFEDYARTWYWILIGLTIAMVLSWIFLILLRFIAGCLFWVFMIGVIGIIGYGIWHCYQQYTNLQERPSSVLTIYDIGIQTNISMYFELQQTWFTFMIILCIIEVIVILMLIFLRNRIRVAIILLKEGSKAIGYVPSTLVYPALTFILLSICICYWVVTAVFLATSGVPVYKVIAPGGHCIHENQTCDPEIFNTTEIAKACPGALCNFAFYGGKSLYHQYIPTFHVYNLFVFLWLINFVIALGQCALAGAFATYYWAMKKPDDIPRYPLFTAFGRAIRYHTGSLAFGSLIIALIQMFKIVLEYLDHRLKRTQNTLSKFLQCCLRCCFWCLENAIKFLNRNAYIMIAIYGRNFCRSAKDAFNLLMRNVLKVAVTDEVTYFVLFLGKLLVAGSIGVLAFLFFTQRLPVIAQGPASLNYYWVPLLTVIFGSYLIAHGFFSVYAMCVETIFICFLEDLERNDGSTARPYYVSQPLLKIFQEENPQTRKQ

SEQ ID NO: 40876 - protein, 677 aa, Homo sapiens
MIFLLCIIGYIVLGLVAWVHGDPRRAAYPTDSQGHFCGQKGTPNENKTILFYFNLLRCTSPSVLLNLQCPTTQICVSKCPEKFLTYVEMQLLYTKDKSYWEDYRQFCKTTAKPVKSLTQLLLDDDCPTAIFPSKPFLQRCFPDFSTKNGTLTIGSKMMFQDGNGGTRSVVELGIAANGINKLLDAKSLGLKVFEDYARTWYWILIGLTIAMVLSWIFLILLRFIAGCLFWVFMIGVIGIIGYGIWHCYQQYTNLQERPSSVLTIYDIGIQTNISMYFELQQTWFTFMIILCIIEVIVILMLIFLRNRIRVAIILLKEGSKAIGYVPSTLVYPALTFILLSICICYWVVTAVFLATSGVPVYKVIAPGGHCIHENQTCDPEIFNTTEIAKACPGALCNFAFYGGKSLYHQYIPTFHVYNLFVFLWLINFVIALGQCALAGAFATYYWAMKKPDDIPRYPLFTAFGRAIRYHTGSLAFGSLIIALIQMFKIVLEYLDHRLKRTQNTLSKFLQCCLRCCFWCLENAIKFLNRNAYIMIAIYGRNFCRSAKDAFNLLMRNVLKVAVTDEVTYFVLFLGKLLVAGSIGVLAFLFFTQRLPVIAQGPASLNYYWVPLLTVIFGSYLIAHGFFSVYAMCVETIFICFCEDLERNDGSTEKPYFVTPNLHGILIKKQLVPQKQKE

SEQ ID NO: 40877 - protein, 8 aa, Homo sapiens
MLKLHSRS

SEQ ID NO: 40878 - protein, 669 aa, Homo sapiens
MYKGRLLSLGMKGRARGTAPKVTGTQAASPNVGALKVRENRVLSVPPDQRITLTDLFENAYGSSMKGRELEELKDNIEFRGHKPLNSITVSKKRNWLYQSTLRPLNLEEENKKCQDRSHLSISPVSLPKHQLSQSFLKSSKEYCTYVVCNATNSSLSKNCALDFNEENDADDEGEIWYNPIPEDDDLGISSALSFGEADSAVLKLPAVNLSMLSGSDLMKAERHTEDSLCSSEHAGDIQTTRSNGMNPIHPAHSTEFVQQYKQKLGHKTQEGIMVEDSPMLKSPFAGSGILAATNSTELGIMEPSSPNPSPVKKGSSINWSLPDKIKSPRTVRKLSMKMKKLPEFSRKLSVKGTLNYINSPDNTPSLSKYNCREVHHTDILPSGNTTTAAKRNVISRYHLDTSVSSQQSYQKKNSMSSKYSCKGGYLSDGDSPELTTKASKHGSENKFGKGKEIISNSCSKNEIDIDAFRHYSFSDQPKCSQYISGLMSVHFYGAEDLKPPRIDSKDVFCAIQVDSVNKARTALLTCRTTFLDMDHTFNIEIENAQHLKLVVFSWEPTPRKNRVCCHGTVVLPTLFRVTKTHQLAVKLEPRGLIYVKVTLMEQWENSLHGLDINQEPIIFGVDIQKVVEKENIGLMVPLLIQKCIMEIEKRGCQVLSYYGSLLLPLLID

SEQ ID NO: 40879 - protein, 290 aa, Homo sapiens
MPERAIARHEVREIEQRHTMDGPRQDATLDEEEDMVIIYNRVPKTASTSFTNIAYDLCAKNKYHVLHINTTKNNPVMSLQDQVRFVKNITSWKEMKPGFYHGHVSYLDFAKFGVKKKPIYINVIRDPIERLVSYYYFLRFGDDYRPGLRRRKQGDKKTFDECVAEGGSDCAPEKLWLQIPFFCGHSSECWNVGSRWAMDQAKYNLINEYFLVGVTEELEDFIMLLEAALPRFFRGATELYRTAPDTATPSHRHGPICGSKSISSLLVKVSPVCKDSHCLGKCSRNGLSAV

SEQ ID NO: 40880 - protein, 309 aa, Homo sapiens
MIRDLCDGQLEGAEIGSTEITFTPEKIKGGIHTADTKTAGSVCLLMQVSMPCVLFAASPSELHLKGGTNAEMAPQIDYTVMVFKPIVEKFGFIFNCDIKTRGYYPKGGGEVIVRMSPVKQLNPINLTERGCVTKIYGRAFVAGVLPFKVAKDMAAAAVRCIRKEIRDLYVNIQPVQEPKDQAFGNGNGIIIIAETSTGCLFAGSSLGKRGVNADKVGIEAAEMLLANLRHGGTVDEYLQDQLIVFMALANGVSRIKTGPVTLHTQTAIHFAEQIAKAKFIVKKSEDEEDAAKDTYIIECQGIGMTNPNL

SEQ ID NO: 40881 - protein, 513 aa, Homo sapiens
MRKSQAKYGISGEKDVSPDLSCADEISECYHKLDSLTYKIDECEKKKREDYESQSNPVFRRYLNKILIEAGKLGLPDENKGDMHYDAEIILKRETLLEIQKFLNGEDWKPGALDDALSDILINFKFHDFETWKWRFEDSFGVDPYNVLMVLLCLLCIVVLVATELWTYVRWYTQLRRVLIISFLFSLGWNWMYLYKLAFAQHQAEVAKMEPLNNVCAKKMDWTGSIWEWFRSSWTYKDDPCQKYYELLLVNPIWLVPPTKALAVTFTTFVTEPLKHIGKGTGEFIKALMKEIPALLHLPVLIIMALAILSFCYGAGKSVHVLRHIGGPESEPPQALRPRDRRRQEEIDYRPDGGAGDADFHYRGQMGPTEQGPYAKTYEGRREILRERDVDLRFQTGNKSPEVLRAFDVPDAEAREHPTVVPSHKSPVLDTKPKETGGILGEGTPKESSTESSQSAKPVSGQDTSGNTEGSPAAEKAQLKSEAAGSPDQGSTYSPARGVAGPRGQDPVSSPCG

SEQ ID NO: 40882 - protein, 47 aa, Homo sapiens
MDNHMQLGMICYNPEFEKCNVGWSSRRNLDTVCRTSQRILCQNRENE

SEQ ID NO: 40883 - protein, 619 aa, Homo sapiens
MVMSFRVSELQVLLGFAGRNKSGRKHELLAKALHLLKSSCAPSVQMKIKELYRRRFPRKTLGPSDLSLLSLPPGTSPVGSPGPLAPIPPTLLAPGTLLGPKREVDMHPPLPQPVHPDVTMKPLPFYEVYGELIRPTTLASTSSQRFEEAHFTFALTPQQVQQILTSREVLPGAKCDYTIQVQLRFCLCETSCPQEDYFPPNLFVKVNGKLCPLPGYLPPTKNGAEPKRPSRPINITPLARLSATVPNTIVVNWSSEFGRNYSLSVYLVRQLTAGTLLQKLRAKGIRNPDHSRALIKEKLTADPDSEVATTSLRVSLMCPLGKMRLTVPCRALTCAHLQSFDAALYLQMNEKKPTWTCPVCDKKAPYESLIIDGLFMEILSSCSDCDEIQFMEDGSWCPMKPKKEASEVCPPPGYGLDGLQYSPVQGGDPSENKKKVEVIDLTIESSSDEEDLPPTKKHCSVTSAAIPALPGSKGVLTSGHQPSSVLRSPAMGTLGGDFLSSLPLHEYPPAFPLGADIQGLDLFSFLQTESQHYGPSVITSLDEQDALGHFFQYRGTPSHFLGPLAPTLGSSHCSATPAPPPGRVSSIVAPGGALREGHGGPLPSGPSLTGCRSDIISLD

SEQ ID NO: 40884 - protein, 148 aa, Homo sapiens
MRQLPYFIRPAVPKRDVERYSDKYQMSGPIDNAIDWNPDWRRLPRELKIRVRKLQKERITILLPKRPPKTTEDKEETIQKLETLEKKEEEVTSEEDEEKEEEEEKEEEEEEEYDEEEHEEETDYIMSYFDNGEDFGGDSDDNMDEAIY

SEQ ID NO: 40885 - protein, 237 aa, Homo sapiens [sequence omitted]

SEQ ID NO: 40886 - protein, 162 aa, Homo sapiens
MQEFLSESDENYNGVSDVELRVALPDGTTVTVRVKKNSTTDQVYQAIAAKVGMDSTTVNYFALFEVISHSFVRKLAPNEFPHKLYIQNYTSAVPGTCLTIRKWLFTTEEEILLNDNDLAVTYFFHQIPAASLHFPLLKMRHQLSFLLHSYHIPIPFSSLPSP

SEQ ID NO: 40887 - protein, 154 aa, Homo sapiens
MAYGSLVFVLLFIFVKRQIMRFAMKSRRGPHVPVGHNAPKDLKEEIDIRLSRVQDIKYEPQLLADDDARLLQLETQGNQSCYNYLYRMKALDAIRTSEIPFHSEGRHPRSLMGKNFRSYLLDLRNTSTPFKGVRKALIDTLLDGYETARYGTGG

SEQ ID NO: 40888 - protein, 173 aa, Homo sapiens
MAYGSLVFVLLFIFVKRQIMRFAMKSRRGPHVPVGHNAPKDLKEEIDIRLSRVQDIKYEPQLLADDDARLLQLETQGNQSCYNYLYRMKALDAIRTSEIPFHSEGRHPRSLMGKNFRSYLLDLRNTSTPFKGVRKALIDTLLDGYETARYGTGVFGQNEYLRYQEALSELATA

SEQ ID NO: 40889 - protein, 127 aa, Homo sapiens
MESTESRHYPVFENPKQGKLRTKVENGEGTIPVESSDIVPTWDGIRLGERLRTMSCSDKILRWNVLGLQGALLTHFLQPIYLKSVTLGYLFSQGHLTRAICCRVTRDGSAFEDGLRHPFIVNHPKVL

SEQ ID NO: 40890 - protein, 722 aa, Homo sapiens
MNPRQELSIYQDQEQRILKFLEELGEGKATTAHDLSGKLGTPKKEINRVLYSLAKKGKLQKEAGTPPLWKIAVSTQAWNQHSGVVRPDGHSQGAPNSDPSLEPEDRNSTSVSEDLLEPFIAVSAQAWNQHSGVVRPDSHSQGSPNSDPGLEPEDSNSTSALEDPLEFLDMAEIKEKICDYLFNVSDSSALNLAKNIGLTKARDINAVLIDMERQGDVYRQGTTPPIWHLTDKKRERMQIKRNTNSVPETAPAAIPETKRNAEFLTCNIPTSNASNNMVTTEKVENGQEPVIKLENRQEARPEPARLKPPVHYNGPSKAGYVDFENGQWATDDIPDDLNSIRAAPGEFRAIMEMPSFYSHGLPRCSPYKKLTECQLKNPISGLLEYAQFASQTCEFNMIEQSGPPHEPRFKFQVVINGREFPPAEAGSKKVAKQDAAMKAMTILLEEAKAKDSGKSEESSHYSTEKESEKTAESQTPTPSATSFFSGKSPVTTLLECMHKLGNSCEFRLLSKEGPAHEPKFQYCVAVGAQTFPSVSAPSKKVAKQMAAEEAMKALHGEATNSMASDNQPEGMISESLDNLESMMPNKVRKIGELVRYLNTNPVGGLLEYARSHGFAAEFKLVDQSGPPHEPKFVYQAKVGGRWFPAVCAHSKKQGKQEAADAALRVLIGENEKAERMGFTEVTPVTGASLRRTMLLLSRSPEAQPKTVKTSTFGAFFGAGGSS

SEQ ID NO: 40891 - protein, 139 aa, Homo sapiens
MPHPRRYHSSERGSRGSYREHYRSRKHKRRRSRSWSSSSDRTRRRRREDSYHVRSRSSYDDRSSDRRVYDRRYCGSYRRNDYSRDRGDAYYDTDYRHSYEYQRENSSYRSQRSSRRKHRRRRRRSRTFSRSSSMKSLAP

SEQ ID NO: 40892 - protein, 310 aa, Homo sapiens [sequence omitted]

SEQ ID NO: 40893 - protein, 250 aa, Homo sapiens
MSQNVCPRNLWLLQPLTVLLLLASADSQAAPPKAVLKLEPPWINVLQEDSVTLTCQGARSPESDSIQWFHNGNLIPTHTQPSYRFKANNNDSGEYTCQTGQTSLSDPVHLTVLSEWLVLQTPHLEFQEGETIMLRCHSWKDKPLVKVTFFQNGKSQKFSHLDPTFSIPQANHSHSGDYHCTGNIGYTLFSSKPVTITVQGMGSLPRCREGRRGDGQGLRSHGPTWRSEKAHSSKIGHWSKEEWGGSLAKY

SEQ ID NO: 40894 - protein, 112 aa, Homo sapiens
MDCTHPLGNFSFSSQCAFSCSEGTNLTGIEETTCGPFGNWSSPEPTCQVIQCEPLSAPDLGIMNCSHPLASFSFTSACTFICSEGTELIGKKKTICESSGIWSNPSPICQSE

SEQ ID NO: 40895 - protein, 501 aa, Homo sapiens
MKKHRRALALVSCLFLCSLVWLPSWRVCCKESSSASASSYYSQDDNCALENEDVQFQKKDEREGPINAESLGKSGSNLPISPKEHKLKDDSIVDVQNTESKKLSPPVVETLPTVDLHEESSNAVVDSETVENISSSSTSEITPISKLDEIEKSGTIPIAKPSETEQSETDCDVGEALDASAPIEQPSFVSPPDSLVGQHIENVSSSHGKGKITKSEFESKVSASEQGGGDPKSALNASDNLKNESSDYTKPGDIDPTSVASPKDPEDIPTFDEWKKKVMEVEKEKSQSMHASSNGGSHATKKVQKNRNNYASVECGAKILAANPEAKSTSAILIENMDLYMLNPCSTKIWFVIELCEPIQVKQLDIANYELFSSTPKDFLVSISDRYPTNKWIKLGTFHGRDERNVQSFPLDEQMYAKYVKMFIKYIKVELLSHFGSEHFCPLSLIRVFGTSMVEEYEEIADSQYHSERQELFDEDYDYPLDYNTGEDKSSKNLLGSATSM

SEQ ID NO: 40896 - protein, 1086 aa, Homo sapiens
MCLNKLHRKACPFDQTTINTDIELLPVNSALLQLVGAQVPEQQPITLCSGVEDTKHYEEAKKCVEELALYLKPLSSARGVGLNSTTQSVLSRPMQRKLVTLVHCQLVEEEGRIRAMRAARSLGERTVTELILQHQNPQQLSSNLWAAVRARGCQFLGPAMQEEALKLVLLALEDGSALSRKVLVLFVVQRLEPRFPQASKTSIGHVVQLLYRASCFKVTKRDEDSSLMQLKEEFRTYEALRREHDSQIVQIAMEAGLRIAPDQWSSLLYGDQSHKSHMQSIIDKLQTPASFAQSVQELTIALQRTGDPANLNRLRPHLELLANIDPSPDAPPPTWEQLENGLVAVRTVVHGLVDYIQNHSKKGADQQQPPQHSKYKTYMCRDMKQRGGCPRGASCTFAHSQEELEKFRKMNKRLVPRRPLSASLGQLNEVGLPSAAILPDEGAVDLPSRKPPALPNGIVSTGNTVTQLIPRGTDPSYDSSLKPGKIDHLSSSAPGSPPDLLESVPKSISALPVNPHSIPPRGPADLPPMPVTKPLQMVPRGSQLYPAQQTDVYYQDPRGAAPPFEPAPYQQGMYYTPPPQCVSRFVRPPPSAPEPAPPYLDHYPPYLQERVVNSQYGTQPQQYPPIYPSHYDGRRVYPAPSYTREEIFRESPIPIEIPPAAVPSYVPESRERYQQIESYYPVAPHPTQIRPSYLREPPYSRLPPPPQPHPSLDELHRRRKEIMAQLEERKVISPPPFAPSPTLPPTFHPEEFLDEDLKVAGKYKGNDYSQYSPWSCDTIGSYIGTKDAKPKDVVAAGSVEMMNVESKGMRDQRLDLQRRAAETSDDDLIPFGDRPTVSRFGAISRTSKTIYQGAGPMQAMAPQGAPTKSINISDYSPYGTHGGWGASPYSPHQNIPSQGHFSERERISMSEVASHGKPLPSAEREQLRLELQQLNHQISQQTQLRGLEREANTLAGQSQPPPPPPPKWPGMISSEQLSLELHQVEREIGKRTRELSMENQCSLDMKSKLNTSKQAENGQPEPQNKVPAEDLTLTFSSDVPNGSALTQENISLLSNKTSSLNLSEDPEGGGDNNDSQRSGVTPSSAP

SEQ ID NO: 40897 - protein, 3056 aa, Homo sapiens
MDTKKSSTSATRKISRKDGRYLDDSWVNAPISKSTKSRKEKSRSPLRATTLESNVKKNNRVEFREPLVSYREIHGAPSNFSSSHLESKHVYCVDVNEEKTESGNWMIGSREERNIRSCDFESSQSSVINDTVVRFLNDRPAIDALQNSECLIRMGASMRTEEEMPNRTKGSENNLKLSVNNMAHDTDPKALRLTDSSPSSTSTSNSQRLDILKRRQHDVKLEKLKERIRKQWEHSEETNGRGQKLGHIDHPVMVVNVDNSVTAKVRKVATAPPAPAYKGFNPSETKIRTPDGKVWQEAEFQNMSRELYRDLALHFADDISIKEKPAEKSKEKKVVKPVRKVQKVAQLSSTECRTGSSHLISTSSWRDGQKLVKKILGPAPRMEPKEQRTASSDRGGRERTAKSGGHIGRAESDPRLDVLHRHLQRNSERSRSKSRSENNIKKLASSLPDNKQEENTALNKDFLPIEIRGILDDLQLDSTAHTAKQDTVELQNQKSSAPVHAPRSHSPVKRKPDKITANEDPPVISKRRHYDTDEVRQYIVRQQEERKRKQNEEKKAQKEATEQKNKRLQELYRKQKEAFTKVKNVPPSEPSATRRLQETYSKLLLEKTLLEEPSHQHVTQETQAKPGYQPSGESDKENKVQERPPSASSSSDMSLSEPPQPLARKDLMESTWMQPERLSPQVHHSQPQPFAGTAGSLLSHLLSLEHVGILHKDFESILPTRKNHNMASRPLTFTPQPYVTSPAAYTDALLKPSASQYKSKLDRIEALKATAASLSSRIESEAKKLAGASINYGSAWNTEYDVQQAPQEDGPWTKAVTPPVKDDNEDVFSARIQKMLGSCVSHATFDDDLPGVGNLSEFKKLPEMIRPQSAISSFRVRSPGPKPEGLLAQLCKRQTDSSSSDMQACSQDKAKISLGSSIDSVSEGPLLSEGSLSEEEGDQDGQPLLKVAEILKEKEFCPGERNSYEPIKEFQKEAEKFLPLFGHIGGTQSKGPWEELAKGSPHSVINIFTKSYQLYGKGFEDKLDRGTSTSRPLNATATPLSGVSYEDDFVSSPGTGTSTEKKSTLEPHSTLSPQEDHSNRKSAYDPSSVDVTSQHSSGAQSAASSRSSTSSKGKKGKKEKTEWLDSFTGNVQNSLLDEEKAERGSHQGKKSGTSSKLSVKDFEQTLDTDSTLEDLSGHSVSVSSDKGRSQKTPTSPLSPSSQKSLQFDVAGTSSERSKSSVMPPTITGFKPNAPLTDLNPAASRTTTENMAPIPGSKRFSPAGLHHRMAAELSYLNAIEESVRQLSDVERVRGISLAQQESVSLAQIIKAQQQRHERDLALLKLKAEQEALESQRQLEETRNKAAQVHAESLQQVVQSQREVTEVLQEATCKIAAQQSETARLTTDAARQICEMAELTRTHISDAVVASGAPLAILYDHQRQHLPDFVKQLRTRTETDRKSPSVSLSQSKEGTLDSKHQKYSASYDSYSESSGYKNHDRRSSSGSSRQESPSVPSCKENEKKLNGEKIESSIDEQVQTAADDSLRSDSVPSLPDEKDSTSIATEYSLKFDESMTEDEIEEQSFRSLLPSESHRRFNMEKRRGHHDDSDEEASPEKTTLSTAKELNMPFSGGQDSFSKFTMEMVRQYMKEEEMRAAHQSSLLRLREKALKEKTKAELAWLEHQKKHLRDKGEDDKMPPLRKKQRGLLLRLQQEKAEIKRLQEANKAARKERQLILKQQEEIEKIRQTTIKLQEKLKSAGESKLDSHSDDDTKDNKATSPGPTDLETRSPSPISISSSETSSIMQKLKKMRSRMDEKFLTKREQKLMQRRQHAEELLEWKRRLDAEEAEIRQMEKQALAAWDKELIKPKTPKKELEDQRTEQKEIASEEESPVPLYSHLNSESSIPEELGSPAVEYVPSESIGQEQPGSPDHSILTEEMICSQELESSTSPSKHSLPKSCTSVSKQESSKGSHRTGGQCHLPIKSHQHCYSWSDESLSMTQSETTSDQSDIEGRIRALKDELRKRKSVVNQLKKEQKKRQKERLKAQEASLIKQLESYDEFIKKTEAELSQDLETSPTAKPQIKTLSSASEKPKIKPLTPLHRSETAKNWKSLTESERSRGSLESIAEHVDASLSGSERSVSERSLSAYAKRVNEWDSRTEDFQTPSPVLRSSRKIREESGDSLENVPALHLLKELNATSRILDMSDGKVGESSKKSEIKEIEYTKLKKSKIEDAFSKEGKSDVLLKLVLEQGDSSEILSKKDLPLDSENVQKDLVGLAIENLHKSEEMLKERQSDQDMNHSPNIQSGKDIHEQKNTKEKDLSWSEHLFAPKEIPYSEDFEVSSFKKEISAELYKDDFEVSSLLSLRKDSQSCRDKPQPMRSSTSGATSFGSNEEISECLSEKSLSIHSNVHSDRLLELKSPTELMKSKERSDVEHEQQVTESPSLASVPTADELFDFHIGDRVLIGNVQPGILRFKGETSFAKGFWAGVELDKPEGNNNGTYDGIAYFECKEKHGIFAPPQKISHIPENFDDYVDINEDEDCYSDERYQCYNQEQNDTEGPKDREKDVSEYFYEKSLPSVNDIEASVNRSRSLKIETDNVQDISGVLEAHVHQQSSVDSQISSKENKDLISDATEKVSIAAEDDTLDNTFSEELEKQQQFTEEEDNLYAEASEKLCTPLLDLLTREKNQLEAQLKSSLNEEKKSKQQLEKISLLTDSLLKVFVKDTVNQLQQIKKTRDEKIQLSNQELLGDDQKKVTPQDLSQNVEEQSPSISGCFLSSELEDEKEEISSPDMCPRPESPVFGASGQEELAKRLAELELSREFLSALGDDQDWFDEDFGLSSSHKIQKNKAEETIVPLMAEPKRVTQQPCETLLAVPHTAEEVEILVHNAAEELWKWKELGHDLHSISIPTKLLGCASKGLDIESTSKRVYKQAVFDLTKEIFEEIFAEDPNLNQPVWMKPCRINSSYFRRVKNPNNLDEIKSFIASEVLKLFSLKKEPNHKTDWQKMMKFGRKKRDRVDHILVQELHEEEAQWVNYDEDELCVKMQLADGIFETLIKDTIDVLNQISEKQGRMLLV

SEQ ID NO: 40898 - protein, 1254 aa, Homo sapiens [sequence omitted]

SEQ ID NO: 40899 - protein, 1149 aa, Homo sapiens
MRTENLKSEEHLKSSNIRQAEVLKADMTDSKLGPAEVWTSRQALQDLYQKMLVTDLEYALDKKVEQDLWNHAFKNQITTLQGQAKNRANPNRSEVQANLSLFLEAASGFYTQLLQELCTVFNVDLPCRVKSSQLGIISNKQTHTSAIVKPQSSSCSYICQHCLVHLGDIARYRNQTSQAESYYRHAAQLVPSNGQPYNQLAILASSKGDHLTTIFYYCRSIAVKFPFPAASTNLQKALSKALESRDEVKTKWGVSDFIKAFIKFHGHVYLSKSLEKLSPLREKLEEQFKRLLFQKAFNSQQLVHVTVINLFQLHHLRDFSNETEQHTYSQDEQLCWTQLLALFMSFLGILCKCPLQNESQEESYNAYPLPAVKVSMDWLRLRPRVFQEAVVDERQYIWPWLISLLNSFHPHEEDLSSISATPLPEEFELQGFLALRPSFRNLDFSKGHQGITGDKEGQQRRIRQQRLISIGKWIADNQPRLIQCENEVGKLLFITEIPELILEDPSEAKENLILQETSVIESLAADGSPGLKSVLSTSRNLSNNCDTGEKPVVTFKENIKTREVNRDQGRSFPPKEVKSQTELRKTPVSEARKTPVTQTPTQASNSQFIPIHHPGAFPPLPSRPGFPPPTYVIPPPVAFSMGSGYTFPAGVSVPGTFLQPTAHSPAGNQVQAGKQSHIPYSQQRPSGPGPMNQGPQQSQPPSQQPLTSLPAQPTAQSTSQLQVQALTQQQQSPTKAVPALGKSPPHHSGFQQYQQADASKQLWNPPQVQGPLGKIMPVKQPYYLQTQDPIKLFEPSLQPPVMQQQPLEKKMKPFPMEPYNHNPSEVKVPEFYWDSSYSMADNRSVMAQQANIDRRGKRSPGVFRPEQDPVPRMPFEDPKSSPLLPPDLLKSLAALEEEEELIFSNPPDLYPALLGPLASLPGRSLFKSLLEKPSELMSHSSSFLSLTGFSLNQERYPNNSMFNEVYGKNLTSSSKAELSPSMAPQETSLYSLFEGTPWSPSLPASSDHSTPASQSPHSSNPSSLPSSPPTHNHNSVPFSNFGPIGTPDNRDRRTADRWKTDKPAMGGFGIDYLSATSSSESSWHQASTPSGTWTGHGPSMEDSSAVLMESLKSIWSSSMMHPGPSALEQLLMQQKQKQQRGQGTMNPPH

SEQ ID NO: 40900 - protein, 760 aa, Homo sapiens [sequence omitted]

SEQ ID NO: 40901 - protein, 854 aa, Homo sapiens [sequence omitted]

SEQ ID NO: 40902 - protein, 46 aa, Homo sapiens
MGKAYIVDIFQALVLDLEKEAVELEIAMLFRVNIWGYSLPKKFLEN

SEQ ID NO: 40903 - protein, 483 aa, Homo sapiens [sequence omitted]

SEQ ID NO: 40904 - protein, 89 aa, Homo sapiens [sequence omitted]

SEQ ID NO: 40905 - protein, 940 aa, Homo sapiens
MKLLGRQQPDTELEIQQKCGFSELYSWQRERKVKTEFCLHDGPPYANGDPHVGHALNKILKDIANRFHMMNGSKIHFVPGWDCHGLPIEIKVLSELGREAQNLSAMEIRKKARSFAKAAIEKQKSAFIRWGIMADWNNCYYTFDGKYEAKQLRTFYQMYDKGLVYRSYKPVFWSPSSRTALAEAELEYNPEHVSRSIYVKFPLLKPSPKLASLIDGSSPVSILVWTTQPWTIPANEAVCYMPESKYAVVKCSKSGDLYVLAADKVASVASTLETTFETISTLSGVDLENGTCSHPLIPDKASPLLPANHVTMAKGTGLVHTAPAHGMEDYGVASQHNLPMDCLVDEDGVFTDVAGPELQNKAVLEEGTDVVIKMLQTAKNLLKEEKLVHSYPYDWRTKKPVVIRASKQWFINITDIKTAAKELLKKVKFIPGSALNGMVEMMDRRPYWCISRQRVWGVPIPVFHHKTKDEYLINSQTTEHIVKLVEQHGSDIWWTLPPEQLLPKEVLSEVGGPDALEYVPGQDILDIWFDSGTSWSYVLPGPDQRADLYLEGKDQLGGWFQSSLLTSVAARKRAPYKTVIVHGFTLGEKGEKMSKSLGNVIHPDVVVNGGQDQSKEPPYGADVLRWWVADSNVFTEVAIGPSVLNAARDDISKLRNTLRFLLGNVADFNPETDSIPVNDMYVIDQYMLHLLQDLANKITELYKQYDFGKVVRLLRTFYTRELSNFYFSIIKDRLYCEKENDPKRRSCQTALVEILDVIVRSFAPILPHLAEEVFQHIPYIKEPKSVFRTGWISTSSIWKKPGLEEAVESACAMRDSFLGSIPGKNAAEYKVITVIEPGLLFEIIEMLQSEETSSTSQLNELMMASESTLLAQEPREMTADVIELKGKFLINLEGGDIREESSYKVIVMPTTKEKCPRCWKYTAESSDTLCPRCAEVVSGK

SEQ ID NO: 40906 - protein, 933 aa, Homo sapiens
MNSANEMKSGGGPGPSGSETPPPPRRAVLSPGSVFSPGRGASFLFPPAESLSPEEPRSPGGWRSGRRRLNSSSGSGSGSSGSSVSSPSWAGRLRGDRQQVVAAGTLSPPGPEEAKRKLRILQRELQNVQVNQKVGMFEAHIQAQSSAIQAPRSPRLGRARSPSPCPFRSSSQPPGRVLVQGARSEERRTKSWGEQCPETSGTDSGRKGGPSLCSSQVKKGMPPLPGRAAPTGSEAQGPSAFVRMEKGIPASPRCGSPTAMEIDKRGSPTPGTRSCLAPSLGLFGASLTMATEVAARVTSTGPHRPQDLALTEPSGRARELEDLQPPEALVERQGQFLGSETSPAPERGGPRDGEPPGKMGKGYLPCGMPGSGEPEVGKRPEETTVSVQSAESSDSLSWSRLPRALASVGPEEARSGAPVGGGRWQLSDRVEGGSPTLGLLGGSPSAQPGTGNVEAGIPSGRMLEPLPCWDAAKDLKEPQCPPGDRVGVQPGNSRVWQGTMEKAGLAWTRGTGVQSEGTWESQRQDSDALPSPELLPQDPDKPFLRKACSPSNIPAVIITDMGTQEDGALEETQGSPRGNLPLRKLSSSSASSTGFSSSYEDSEEDISSDPERTLDPNSAFLHTLDQQKPRVSKSWRKIKNMVHWSPFVMSFKKKYPWIQLAGHAGSFKAAANGRILKKHCESEQRCLDRLMVDVLRPFVPAYHGDVVKDGERYNQMDDLLADFDSPCVMDCKMGIRTYLEEELTKARKKPSLRKDMYQKMIEVDPEAPTEEEKAQRAVTKPRYMQWRETISSTATLGFRIEGIKKEDGTVNRDFKKTKTREQVTEAFREFTKGNHNILIAYRDRLKAIRTTLEVSPFFKCHEVIGSSLLFIHDKKEQAKVWMIDFGKTTPLPEGQTLQHDVPWQEGNREDGYLSGLNNLVDILTEMSQDAPLA

SEQ ID NO: 40907 - protein, 383 aa, Homo sapiens [sequence omitted]

SEQ ID NO: 40908 - protein, 441 aa, Homo sapiens [sequence omitted]

SEQ ID NO: 40909 - protein, 1487 aa, Homo sapiens
MPRGTPLYGQPSWWGDDEVDEKRAFKTNGKPEEKNHEAGTSGCGIDAKQVEEQSAAANEEVLFPFCREPSYFEIPTKEFQQPSQITESTIHEIPTKDTPSSHITGAGHASFTIEFDDSTPGKVTIRDHVTKFTSDQRHKSKKSSPGTQDLLGIQTGMMAPENKVADWLAQNNPPQMLWERTEEDSKSIKSDVPVYLKRLKGNKHDDGTQSDSENAGAHRRCSKRATLEEHLRRHHSEHKKLQKVQATEKHQDQAVVSQTAFMIAFFDEDNPRKRRSYSFTQSAGILCQETTYSTPHTKLEKAKSPTADAKVVSLSLQTSSAHHRGGHGVPHGKLLKQKSEEPSVSIPFLQTALLRSSGSLGHRPSQEMDKMLKNQATSATSEKDNDDDQSDKGTYTIELENPNSEEVEARKMIDKVFGVDDNQDYNRPVINEKHKDLIKDWALSSAAAVMEERKPLTTSGFHHSEEGTSSSGSKRWVSQWASLAANHTRHDQEERIMEFSAPLPLENETEISESGMTVRSTGSATSLASQGERRRRTLPQLPNEEKSLESHRAKVVTQRSEIGEKQDTELQEKETPTQVYQKDKQDADRPLSKMNRAVNGETLKTGGDNKTLLHLGSSAPGKEKSETDKETSLVKQTLAKLQQQEQREEAQWTPTKLSSKNVSGQTDKCREETFKQESQPPEKNSGHSTSKGDRVAQSESKRRKAEEILKSQTPKGGDKKESSKSLVRQGSFTIEKPSPNIPIELIPHINKQTSSTPSSLALTSASRIRERSESLDPDSSMDTTLILKDTEAVMAFLEAKLREDNKTDEGPDTPSYNRDNSISPESDVDTASTISLVTGETERKSTQKRKSFTSLYKDRCSTGSPSKDVTKSSSSGAREKMEKKTKSRSTDVGSRADGRKFVQSSGRIRQPSVDLTDDDQTSSVPHSAISDIMSSDQETYSCKPHGRTPLTSADEHVHSKLEGSKVTKSKTSPVVSGSSSKSTTLPRPRPTRTSLLRRARLGEASDSELADADKASVASEVSTTSSTSKPPTGRRNISRIDLLAQPRRTRLGSLSARSDSEATISRSSASSRTAEAIIRSGARLVPSDKFSPRIRANSISRLSDSKVKSMTSAHGSASVNSRWRRFPTDYASTSEDEFGSNRNSPKHTRLRTSPALKTTRLQSAGSAMPTSSSFKHRIKEQEDYIRDWTAHREEIARISQDLALIAREINDVAGEIDSVTSSGTAPSTTVSTAATTPGSAIDTREEVGDLHGEMHKLVDRVFDESLNFRKIPPLVHSKTPEGNNGRSGDPRPQAAEPPDHLTITRRRTWSRDEVMGDNLLLSSVFQFSKKIRQSIDKTAGKIRILFKDKDRNWDDIESKLRAESEVPIVKTSSMEISSILQELKRVEKQLQAINAMIDPDGTLEALNNMGFPSAMLPSPPKQKSSPVNNHHSPGQTPTLGQPEARALHPAAVSAAAEFENAESEADFSIHFNRFNPDGEEEDVTVQE

SEQ ID NO: 40910 - protein, 138 aa, Homo sapiens
MHNSWITTGEDSGVGETSKRPFSHDNADFGKAASAGEQLELNFLIISNKKSGRIKQYLHSPPCQPLMTSLQLSEKLKLTYEEKCEIEESQLKFLRNKNHGRARWLTPVIPALWEAEAGESRGQEIETILANMVKPRFY

SEQ ID NO: 40911 - protein, 559 aa, Homo sapiens
MGKPQVSEQDSLNNNESCTLSCEVAAGENLQNTLCEASRDEQAFLGKDKKIPGKRSPRSKKGTAKKIPPGLFSGDIAPLMQEKVLSAVTYAVDDEEAAEVNANEQPEAPKLVLQSLFSLIRGEVEQLDSRALPLCLHQIAESYFQEEDYEKAMKFIQLERLYHEQLLANLSAIQEQWETKWKTVQPHTVTALRNSEKGFNGEDFERLTKICATHQDPLLSKHKIAAVEKSQERKCSTQLLVSEDPKEGGATTKESESKTCLGTESSKESQHTVEPLGSSPCCHQMDVQTDSPSLSVTAGKDHMEELLCSAEATLALHTQSSETAGSPSGPDSSEDACEDDSRLQLAQTEACQDVARIEGIAEDPKVFLSSKSKTEPLISPGCDRIPPALISEGKYSQAQRKELRLPLRDASEALPTDQLENNELNELQQPDLTDSDGKSPQAQADSDGSENVLCGNNQISDLGILLPEVCMAPEEKGDKDDQLNKETEDYLNSLLEGCLKDTEDSLSYEDNQDDDSDLLQDLSPEEASYSLQENLPSDESCLSLDDLAKRIEIAEVNQR

SEQ ID NO: 40912 - protein, 668 aa, Homo sapiens
MGKPQVSEQDSLNNNESCTLSCEVAAGENLQNTLCEASRDEQAFLGKDKKIPGKRSPRSKKGTAKKIPPGLFSGDIAPLMQEKVLSAVTYAVDDEEAAEVNANEQPEAPKLVLQSLFSLIRGEVEQLDSRALPLCLHQIAESYFQEEDYEKAMKFIQLERLYHEQLLANLSAIQEQWETKWKTVQPHTVTALRNSEKGFNGEDFERLTKICATHQDPLLSKHKIAAVEKSQERKCSTQLLVSEDPKEGGATTKESESKTCLGTESSKESQHTVEPLGSSPCCHQMDVQTDSPSLSVTAGKDHMEELLCSAEATLALHTQSSETAGSPSGPDSSEDACEDDSRLQLAQTEACQDVARIEGIAEDPKVFLSSKSKTEPLISPGCDRIPPALISEGKYSQAQRKELRLPLRDASEALPTDQLENNELNELQQPDLTDSDGKSPQAQADSDGSENVLCGNNQISDLGILLPEVCMAPEEKGDKDDQLNKETEDYLNSLLEGCLKDTEDSLSYEDNQDDDSDLLQDLSPEEASYSLQENLPSDESCLSLDDLAKRIEIAEVVPTEGLVSILKKRNDTVGDHPAQMQHKPSKRRVRFQEIDDSLDQDEVGGGSCILLVLLCIATVFLSVGGTALYCTFGDMESPVCTDFADNMDFYYTKLLQGVAELKHWIYLS

SEQ ID NO: 40913 - protein, 501 aa, Homo sapiens
MADTRSVHETRFEAAVKVIQSLPKNGSFQPTNEMMLKFYSFYKQATEGPCKLSRPGFWDPIGRYKWDAWSSLGDMTKEEAMIAYVEEMKKIIETMPMTEKVEELLRVIGPFYEIVEDKKSGRSSDITSVRLEKISKCLEDLGNVLTSTPNAKTVNGKAESSDSGAESEEEEAQEEVKGAEQSDNDKKMMKKSADHKNLEVIVTNGYDKDGFVQDIQNDIHASSSLNGRSTEEVKPIDENLGQTGKSAVCIHQDINDDHVEDVTGIQHLTSDSDSEVYCDSMEQFGQEESLDSFTSNNGPFQYYLGGHSSQPMENSGFREDIQVPPGNGNIGNMQVVAVEGKGEVKHGGEDGRNNSGAPHREKRGGETDEFSNVRRGRGHRMQHLSEGTKGRQVGSGGDGERWGSDRGSRGSLNEQIALVLMRLQEDMQNVLQRLQKLETLTALQAKSSTSTLQTAPQPTSQRPSWWPFEMSPGVLTFAIIWPFIAQWLVYLYYQRRRRKLN

SEQ ID NO: 40914 - protein, 22 aa, Homo sapiens
MVNPTVFFDIAIDGEPLGRVSF

SEQ ID NO: 40915 - protein, 839 aa, Homo sapiens
MINFNPHFDLEDRDCKYDYVEVFDGENENGHFRGKFCGKIAPPPVVSSGPFLFIKFVSDYETHGAGFSIRYEIFKRGPECSQNYTTPSGVIKSPGFPEKYPNSLECTYIVFVPKMSEIILEFESFDLEPDSNPPGGMFCRYDRLEIWDGFPDVGPHIGRYCGQKTPGRIRSSSGILSMVFYTDSAIAKEGFSANYSVLQSSVSEDFKCMEALGMESGEIHSDQITASSQYSTNWSAERSRLNYPENGWTPGEDSYREWIQVDLGLLRFVTAVGTQGAISKETKKKYYVKTYKIDVSSNGEDWITIKEGNKPVLFQGNTNPTDVVVAVFPKPLITRFVRIKPATWETGISMRFEVYGCKITDYPCSGMLGMVSGLISDSQITSSNQGDRNWMPENIRLVTSRSGWALPPAPHSYINEWLQIDLGEEKIVRGIIIQGGKHRENKVFMRKFKIGYSNNGSDWKMIMDDSKRKAKSFEGNNNYDTPELRTFPALSTRFIRIYPERATHGGLGLRMELLGCEVEAPTAGPTTPNGNLVDECDDDQANCHSGTGDDFQLTGGTTVLATEKPTVIDSTIQSEFPTYGFNCEFGWGSHKTFCHWEHDNHVQLKWSVLTSKTGPIQDHTGDGNFIYSQADENQKGKVARLVSPVVYSQNSAHCMTFWYHMSGSHVGTLRVKLRYQKPEEYDQLVWMAIGHQGDHWKEGRVLLHKSLKLYQVIFEGEIGKGNLGGIAVDDISINNHISQEDCARSTPGYEGEGEGDKNISRKPGNVLKTLDPILITIIAMSALGVLLGAVCGVVLYCACWHNGMSERNLSALENYNFELVDGVKLKKDKLNTQSTYSEA

SEQ ID NO: 40916 - protein, 38 aa, Homo sapiens
METGGRIPKPELSRLLLAMVVSQTFLVLDDLDSLEESW

SEQ ID NO: 40917 - protein, 249 aa, Homo sapiens
MSHSSNISKAGSPPSASAPAPVSSFSRTSITPSSQDICRICHCEGDDESPLITPCHCTGSLHFVHQACLQQWIKSSDTRCCELCKYEFIMETKLKPLRKWEKLQMTSSERRKIMCSVTFHVIAITCVVWSLYVLIDRTAEEIKQGQATGILEWPFWTKLVVVAIGFTGGLLFMYVQCKVYVQLWKRLKAYNRVIYVQNCPETSKKNIFEKSPLTEPNFENKHGYGICHSDTNSSCCTEPEDTGAEIIHV

SEQ ID NO: 40918 - protein, 96 aa, Homo sapiens [sequence omitted]

SEQ ID NO: 40919 - protein, 889 aa, Homo sapiens
MRLSDETLIDIMTRFRKEMKNGLSRDFNPTATVKMLPTFVRSIPDGSEKGDFIALDLGGSSFRILRVQVNHEKNQNVHMESEVYDTPENIVHGSGSQLFDHVAECLGDFMEKRKIKDKKLPVGFTFSFPCQQSKIDEAILITWTKRFKASGVEGADVVKLLNKAIKKRGDYDANIVAVVNDTVGTMMTCGYDDQHCEVGLIIGTGTNACYMEELRHIDLVEGDEGRMCINTEWGAFGDDGSLEDIRTEFDREIDRGSLNPGKQLFEKMVSGMYLGELVRLILVKMAKEGLLFEGRITPELLTRGKFNTSDVSAIEKNKEGLHNAKEILTRLGVEPSDDDCVSVQHVCTIVSFRSANLVAATLGAILNRLRDNKGTPRLRTTVGVDGSLYKTHPQYSRRFHKTLRRLVPDSDVRFLLSESGSGKGAAMVTAVAYRLAEQHRQIEETLAHFHLTKDMLLEVKKRMRAEMELGLRKQTHNNAVVKMLPSFVRRTPDGTENGDFLALDLGGTNFRVLLVKIRSGKKRTVEMHNKIYAIPIEIMQGTGEELFDHIVSCISDFLDYMGIKGPRMPLGFTFSFPCQQTSLDAGILITWTKGFKATDCVGHDVVTLLRDAIKRREEFDLDVVAVVNDTVGTMMTCAYEEPTCEVGLIVGTGSNACYMEEMKNVEMVEGDQGQMCINMEWGAFGDNGCLDDIRTHYDRLVDEYSLNAGKQRYEKMISGMYLGEIVRNILIDFTKKGFLFRGQISETLKTRGIFETKFLSQIESDRLALLQVRAILQQLGLNSTCDDSILVKTVCGVVSRRAAQLCGAGMAAVVDKIRENRGLDRLNVTVGVDGTLYKLHPHFSRIMHQTVKELSPKCNVSFLLSEDGSGKGAALITAVGVRLRTEASS

SEQ ID NO: 40920 - protein, 318 aa, Homo sapiens
MECADEPCDAYEVEQTPQGFRSTLRAPSLLYKHIVGKRGDTRKKIEMETKTSISIPKPGQDGEIVITGQHRNGVISARTRIDVLLDTFRRKQPFTHFLAFFLNEVEVQEGFLRFQEEVLAKCSMDHGVDSSIFQNPKKLHLTIGMLVLLSEEEIQQTCEMLQQCKEEFINDISGGKPLEVEMAGIEYMNDDPGMVDVLYAKVHMKDGSNRLQELVDRVLERFQASGLIVKEWNSVKLHATVMNTLFRKDPNAEGRYNLYTAEGKYIFKERESFDGRNILKLFENFYFGSLKLNSIHISQRFTVDSFGNYASCGQIDFS

SEQ ID NO: 40921 - protein, 278 aa, Homo sapiens
MECADEPCDAYEVEQTPQGFRSTLRAPSLLYKHIVGKRGDTRKKIEMETKTSISIPKPGQDGEIVITGQHRNGVISARTRIDVLLDTFRRKQPFTHFLAFFLNEVEVQEGFLRFQEEVLAKCSMDHGVDSSIFQNPKKLHLTIGMLVLLSEEEIQQTCEMLQQCKEEFIKLQELVDRVLERFQASGLIVKEWNSVKLHATVMNTLFRKDPNAEGRYNLYTAEGKYIFKERESFDGRNILKLFENFYFGSLKLNSIHISQRFTVDSFGNYASCGQIDFS

SEQ ID NO: 40922 - protein, 19 aa, Homo sapiens
MIQTGFFLALWNLLQLLRI

SEQ ID NO: 40923 - protein, 295 aa, Homo sapiens [sequence omitted]

SEQ ID NO: 40924 - protein, 279 aa, Homo sapiens
MERAEWRRRGYAPLLYLQSHCDVPADRDRYVRELMRHIPVDSYGKCLQNRELPTARLQDTATATTEDPELLAFLSRYKFHLALENAICNDYMTEKLWRPMHLGAVPVYRGSPSVRDWMPNNHSVILIDDFESPQKLAEFIDFLDKNDEEYMKYLAYKQPGGITNQFLLDSLKHREWGVNDPLLPNYLNGFECFVCDYELARLDAEKAHAASPGDSPVFEPHIAQPSHMDCPVPTPGFGNVEEIPENDSSLVQVRDHCICLRFLWPHSEKGRTHNYAAVP

SEQ ID NO: 40925 - protein, 823 aa, Homo sapiens
MNRHVHVKDDFVRSVSETQNIESQKIHSSRLSDITSSNMQICGFKSTVPHFTEEEKYQKLLSENKIRDEQPKHQPDICGKNFNTNLFQLGHKCAAVLDLVCSTEKINIGPEVVQRECVPTEYHEIQNQCLGLFSSNAVDKSRSEAAVRKVSDLKISTDTEFLSIITSSQVAFLAQKKDKRRSPVNKGNVNMETEPKASYGEIRIPEENSIQLDGFTEAYESGQNQAYSLELFSPVCPKTENSRIHINSDKGLEEHTGSQELFSSEDELPPNEIRIELCSSGILCSQLNTFHKSAIKRSCTSEDKVGQSEALSRVLQVAKKMKLISNGGDSAVEMDRRNVSEFKSIKKTSLIKNCDSKSQKYNCLVMVLSPCHVKEINIKFGPNSGSKVPLATVTVIDQSETKKKVFLWRTAAFWAFTVFLGDIILLTDVVIHEDQWIGETVLQSTFSSQLLNLGSYSSIQPEEYSSVVSEVVLQDLLAYVSSKHSYLRDLPPRQPQRVNSIDFVELEHLQPDVLVHAVLRVVDFTILTEAVYSYRGQKQKKVMLTVEQAQDQHYALVLWGPGAAWYPQLQRKKGYIWEFKYLFVQCNYTLENLELHTTPWSSCECLFDDDIRAITFKAKFQKSAPSFVKISDLATHLEDKCSGVVLIKAQISELAFPITASQKIALNAHSSLKSIFSSLPNIVYTGCAKCGLELETDENRIYKQCFSCLPFTMKKIYYRPALMTAIDGRHDVCIRVESKLIEKILLNISADCLNRVIVPSSEITYGMVVADLFHSLLAVSAEPCVLKIQSLFVLDENSYPLQQDFSLLDFYPDIVKHGANARL

SEQ ID NO: 40926 - protein, 4 aa, Homo sapiens
MMEV

SEQ ID NO: 40927 - protein, 822 aa, Homo sapiens
MVEQLDTAVITPAMLEEEEQLEAAGLERERKMLEKARMSWDRESTEIRYRRLQHLLEKSNIYSKFLLTKMEQQQLEEQKKKEKLERKKESLKVKKGKNSIDASEEKPVMRKKRGREDESYNISEVMSKEEILSVAKKNKKENEDENSSSTNLCVEDLQKNKDSNSIIKDRLSETVRQNTKFFFDPVRKCNGQPVPFQQPKHFTGGVMRWYQVEGMEWLRMLWENGINGILADEMGLGKTVQCIATIALMIQRGVPGPFLVCGPLSTLPNWMAEFKRFTPDIPTMLYHGTQEERQKLVRNIYKRKGTLQIHPVVITSFEIAMRDRNALQHCYWKYLIVDEGHRIKNMKCRLIRELKRFNADNKLLLTGTPLQNNLSELWSLLNFLLPDVFDDLKSFESWFDITSLSETAEDIIAKEREQNVLHMLHQILTPFLLRRLKSDVALEVPPKREVVVYAPLSKKQEIFYTAIVNRTIANMFGSSEKETIELSPTGRPKRRTRKSINYSKIDDFPNELEKLISQIQPEVDRERAVVEVNIPVESEVNLKLQNIMMLLRKCCNHPYLIEYPIDPVTQEFKIDEELVTNSGKFLILDRMLPELKKRGHKVLLFSQMTSMLDILMDYCHLRDFNFSRLDGSMSYSEREKNMHSFNTDPEVFIFLVSTRAGGLGINLTAADTVIIYDSDWNPQSDLQAQDRCHRIGQTKPVVVYRLVTANTIDQKIVERAAAKRKLEKLIIHKNHFKGGQSGLNLSKNFLDPKELMELLKSRDYEREIKGSREKVISDKDLELLLDRSDLIDQMNASGPIKEKMGIFKILENSEDSSPECLF

SEQ ID NO: 40928 - protein, 640 aa, Homo sapiens
MLEKLSDTYTCFSTENGNFLYVLHLFGECLFIAINGDHTESEGDLRRKLYVLKYLFEVHFGLVTVDGHLIRKELRPPDLAQRVQLWEHFQSLLWTYSRLREQEQCFAVEALERLIHPQLCELCIEALERHVIQAVNTSPERGGEEALHAFLLVHSKLLAFYSSHSASSLRPADLLALILLVQDLYPSESTAEDDIQPSPRRARSSQNIPVQQAWSPHSTGPTGGSSAETETDSFSLPEEYFTPAPSPGDQSSGSTIWLEGGTPPMDALQIAEDTLQTLVPHCPVPSGPRRIFLDANVKESYCPLVPHTMYCLPLWQGINLVLLTRSPSAPLALVLSQLMDGFSMLEKKLKEGPEPGASLRSQPLVGDLRQRMDKFVKNRGAQEIQSTWLEFKAKAFSKSEPGSSWELLQACGKLKRQLCAIYRLNFLTTAPSRGGPHLPQHLQDQVQRLMREKLTDWKDFLLVKSRRNITMVSYLEDFPGLVHFIYVDRTTGQMVAPSLNCSQKTSSELGKGPLAAFVKTKVWSLIQLARRYLQKGYTTLLFQEGDFYCSYFLWFENDMGYKLQMIEVPVLSDDSVPIGMLGGDYYRKLLRYYSKNRPTEAVRCYELLALHLSVIPTDLLVQQAGQLARRLWEASRIPLL

SEQ ID NO: 40929 - protein, 346 aa, Homo sapiens
MTQARVLVAAVVGLVAVLLYASIHKIEEGHLAVYYRGGALLTSPSGPGYHIMLPFITTFRSVQTTLQTDEVKNVPCGTSGGVMIYIDRIEVVNMLAPYAVFDIVRNYTADYDKTLIFNKIHHELNQFCSAHTLQEVYIELFDQIDENLKQALQKDLNLMAPGLTIQAVRVTKPKIPEAIRRNFELMEAEKTKLLIAAQKQKVVEKEAETERKKAVIEAEKIAQVAKIRFQQKVMEKETEKRISEIEDAAFLAREKAKADAEYYAAHKYATSNKHKLTPEYLELKKYQAIASNSKIYFGSNIPNMFVDSSCALKYSDIRTGRESSLPSKEALEPSGENVIQNKESTG

SEQ ID NO: 40930 - protein, 1082 aa, Homo sapiens
MQLLDKFPIEGGQKDPKQRIIPFLPGKILFRRSHIRDVAVKRLKPIDEYCRALVRLPPHISQCDEVFRFFEARPEDVNPPKEDYGSSKRKSVWLSSWAESPKKDVTGADATAEPMILEQYVVVSNYKKQENSELSLQAGEVVDVIEKNESGWWFVSTSEEQGWVPATYLEAQNGTRDDSDINTSKTGEVSKRRKAHLRRLDRRWTLGGMVNRQHSREEKYVTVQPYTSQSKDEIGFEKGVTVEVIRKNLEGWWYIRYLGKEGWAPASYLKKAKDDLPTRKKNLAGPVEIIGNIMEISNLLNKKASGDKETPPAEGEGHEAPIAKKEISLPILCNASNGSAVGVPDRTVSRLAQGSPAVARIAPQRAQISSPNLRTRPPPRRESSLGFQLPKPPEPPSVEVEYYTIAEFQSCISDGISFRGGQKAEVIDKNSGGWWYVQIGEKEGWAPASYIDKRKKPNLSRRTSTLTRPKVPPPAPPSKPKEAEEGPTGASESQDSPRKLKYEEPEYDIPAFGFDSEPELSEEPVEDRASGERRPAQPHRPSPASSLQRARFKVGESSEDVALEEETIYENEGFRPYAEDTLSARGSSGDSDSPGSSSLSLTRKNSPKSGSPKSSSLLKLKAEKNAQAEMGKNHSSASFSSSITINTTCCSSSSSSSSSLSKTSGDLKPRSASDAGIRGTPKVRAKKDADANAGLTSCPRAKPSVRPKPFLNRAESQSQEKMDISTLRRQLRPTGQLRGGLKGSKSEDSELPPQTASEAPSEGSRRSSSDLITLPATTPPCPTKKEWEGPATSYMTCSAYQKVQDSEISFPAGVEVQVLEKQESGWWYVRFGELEGWAPSHYLVLDENEQPDPSGKELDTVPAKGRQNEGKSDSLEKIERRVQALNTVNQSKKATPPIPSKPPGGFGKTSGTPAVKMRNGVRQVAVRPQSVFVSPPPKDNNLSCALRRNESLTATDGLRGVRRNSSFSTARSAAAEAKGRLAERAASQGSDSPLLPAQRNSIPVSPVRPKPIEKSQFIHNNLKDVYVSIADYEGDEETAGFQEGVSMEVLERNPNGWWYCQILDGVKPFKGWVPSNYLEKKN

SEQ ID NO: 40931 - protein, 10 aa, Homo sapiens
MKQKNFHPST

SEQ ID NO: 40932 - protein, 383 aa, Homo sapiens
MIPDLTSPYLPNGSLSPTARTYLQMKWPLLDVQAGSLQSRQALKDARSPSPAHIVSPLPCCTQGHDCQHFYPPSDFTVSTQVFRDMKRSHSLQKVGEPWCIESNKVPVVQHPHHVHPLTPLITYSNEHFTPGNPPPHLPADVDPKTGIPRPPHPPDISPYYPLSPGTVGQIPHPLGWLVPQQGQPVYPITTGGFRHPYPTALTVNASMSRFPPHMVPPHHTLHTTGIPHPAIVTPTVKQESSQSDVGSLHSSKHQDSKKEEEKKKPHIKKPLNAFMLYMKEMRAKVVAECTLKESAAINQILGRRWHALSREEQAKYYELARKERQLHMQLYPGWSARDNYGKKKKRKRDKQPGETNGEKKSAFATYKVKAAASAHPLQMEAY

SEQ ID NO: 40933 - protein, 513 aa, Homo sapiens
MIPDLTSPYLPNGSLSPTARTLHFQSGSTHYSAYKTIEHQIAVQYLQMKWPLLDVQAGSLQSRQALKDARSPSPAHIVSNKVPVVQHPHHVHPLTPLITYSNEHFTPGNPPPHLPADVDPKTGIPRPPHPPDISPYYPLSPGTVGQIPHPLGWLVPQQGQPVYPITTGGFRHPYPTALTVNASMSRFPPHMVPPHHTLHTTGIPHPAIVTPTVKQESSQSDVGSLHSSKHQDSKKEEEKKKPHIKKPLNAFMLYMKEMRAKVVAECTLKESAAINQILGRRWHALSREEQAKYYELARKERQLHMQLYPGWSARDNYGKKKKRKRDKQPGETNEHSECFLNPCLSLPPITDLSAPKKCRARFGLDQQNNWCGPCRRKKKCVRYIQGEGSCLSPPSSDGSLLDSPPPSPNLLGSPPRDAKSQTEQTQPLSLSLKPDPLAHLSMMPPPPALLLAEATHKASALCPNGALDLPPAALQPAAPSSSIAQPSTSSLHSHSSLAGTQPQPLSLVTKSLE

SEQ ID NO: 40934 - protein, 165 aa, Homo sapiens
MQKHKIPLDASVLDIGTGNGVFLVELAKFGFSNITGIDYSPSAIQLSGSIIEKEGLSNIKLKVEDFLNLSTQLSGFHICIDKGTFDAISLNPDNAIEKRKQYVKSLSRVLKVKGFFLITSCNWTKEELLNEFSEGFELLEELPTPKFSFGGRSGNSVAALVFQKM

SEQ ID NO: 40935 - protein, 220 aa, Homo sapiens
MQKHKIPLDASVLDIGTGNGVFLVELAKFGFSNITGIDYSPSAIQLSGSIIEKEGLSNIKLKVEDFLNLSTQLSGFHICIDKGTFDAISLNPDNAIEKRKQYVKSLSRVLKVKGFFLITSCNWTKEELLNEFSEGWSTVAGFWLTAALTSWAQAIFSTSASRVGGTTGTHHHAWIIFVFLAETRFCHVVQAGLELLGSSDSPTWPPKVLGLYHARPSLAF

SEQ ID NO: 40936 - protein, 178 aa, Homo sapiens [sequence omitted]

SEQ ID NO: 40937 - protein, 403 aa, Homo sapiens
MLPVELGSVTTLKALNLRHCPLEFPPQLVVQKGLVAIQRFLRMWAVEHSLPRNPTSQEAPPVREMTLRDLPSPGLELSGDHASNQGAVNAQDPEGAVMKEKASFLPPVEKPDLSELRKSADSSENWPSEEEIRRFWKLRQEIVEHVKADVLGDQLLTRELPPNLKAALNIEKELPKPRHVFRRKTASSRSILPDLLSPYQMAIRAKRLEESRAAALRELQEKQALMEQQRREKRALQEWRERAQRMRKRKEELSKLLPPRRSMVASKIPSATDLIDNRKVPLNPPGKMKPSKEKSPQASKEMSALQERNLEEKIKQHVLQMREQRRFHGQAPLEEMRKAAEDLEIATELQDEVLKLKLGLTLNKDRRRAALTGNLSLGLPAAQPQNTFFNTKYGESGNVRRYQ

SEQ ID NO: 40938 - protein, 513 aa, Homo sapiens
MQLGSSSPPPARGVQPPETTRPEPPPPLVPPLPAGSLPPYPPYFEGAPFPHPLWLRDTYKLWVPQPPPRTIKRTRRRLSRNRDPGRLILSTIRLRPRQVLCEKCKSTLSPPEASPGPPAAPRARRRLGSGPDRELRKPEEPENGEPTAAATARRSKRERREEDRAPAEQVPRSPVIKISYSTPQGKGEVVKIPSRVHGSLEPFRPQQAPQDDGSQDPEVLDRESRDRPSCAPSASIPKLKLTRPVPAGADLPPPKIRLKPHRLGDSEHEPVYRAELVGELNGYLRDSSPAPCADGPAGGLADLSSGSSGEDDDFKSCPQGPQGREGLAFLVSCPEGRADCASESACSSDSLDEARSSGSEGTPADTGDLSPGHGASAPSVSREARQTVPPLTVRLHTQSVSECITEDGRTVAVGDIVWGKIHGFPWWPARVLDISLGQKEDGEPSWREAKVSWFGSPTTSFLSISKLSPFSEFFKLRFNRKKKGMYRKAITEAANAARHVAPEIRELLTQFET

SEQ ID NO: 40939 - protein, 171 aa, Homo sapiens
MSGLQGPSVGDGCNGGGARAGGSCCRRRCFRGFGRRVQGAAFPGRQPAELGPVPRGLPAAAAPVCPAASAAAAGGILASEHSRGPSAAGGHPGPAASEPVLPPLPGPQRRATPGHTGCLSPGCPDQPARWSEWPGPSGPPGPELQQPGDTAGLCPADARSGCALAVSQLPL

SEQ ID NO: 40940 - protein, 191 aa, Homo sapiens
MSGLQGPSVGDGCNGGGARAGGSCCRRRCFRGFGRRVQGAAFPGRQPAELGPVPRGLPAAAAPVCPAASAAAAGGILASEHSRGPSAAGGHPGPAASEPVLPPLPGPQRVDLGPRTLALRATSASPLPRRATPGHTGCLSPGCPDQPARWSEWPGPSGPPGPELQQPGDTAGLCPADARSGCALAVSQLPL

SEQ ID NO: 40941 - protein, 931 aa, Homo sapiens
MRGLAVFISDIRNCKSKEAEIKRINKELANIRSKFKGDKALDGYSKKKYVCKLLFIFLLGHDIDFGHMEAVNLLSSNRYTEKQIGYLFISVLVNSNSELIRLINNAIKNDLASRNPTFMGLALHCIASVGSREMAEAFAGEIPKVLVAGDTMDSVKQSAALCLLRLYRTSPDLVPMGDWTSRVVHLLNDQHLGVVTAATSLITTLAQKNPEEFKTSVSLAVSRLSRIVTSASTDLQDYTYYFVPAPWLSVKLLRLLQCYPPPEDPAVRGRLTECLETILNKAQEPPKSKKVQHSNAKNAVLFEAISLIIHHDSEPNLLVRACNQLGQFLQHRETNLRYLALESMCTLASSEFSHEAVKTHIETVINALKTERDVSVRQRAVDLLYAMCDRSNAPQIVAEMLSYLETADYSIREEIVLKVAILAEKYAVDYTWYVDTILNLIRIAGDYVSEEVWYRVIQIVINRDDVQGYAAKTVFEALQAPACHENLVKVGGYILGEFGNLIAGDPRSSPLIQFHLLHSKFHLCSVPTRALLLSTYIKFVNLFPEVKPTIQDVLRSDSQLRNADVELQQRAVEYLRLSTVASTDILATVLEEMPPFPERESSILAKLKKKKGPSTVTDLEDTKRDRSVDVNGGPEPAPASTSAVSTPSPSADLLGLGAAPPAPAGPPPSSGGSGLLVDVFSDSASVVAPLAPGSEDNFARFVCKNNGVLFENQLLQIGLKSEFRQNLGRMFIFYGNKTSTQFLNFTPTLICSDDLQPNLNLQTKPVDPTVEGGAQVQQVVNIECVSDFTEAPVLNIQFRYGGTFQNVSVQLPITLNKFFQPTEMASQDFFQRWKQLSNPQQEVQNIFKAKHPMDTEVTKAKIIGFGSALLEEVDPNPANFVGAGIIHTKTTQIGCLLRLEPNLQAQMYRLTLRTSKEAVSQRLCELLSAQF

SEQ ID NO: 40942 - protein, 930 aa, Homo sapiens
MRGLAVFISDIRNCKSKEAEIKRINKELANIRSKFKGDKALDGYSKKKYVCKLLFIFLLGHDIDFGHMEAVNLLSSNRYTEKQIGYLFISVLVNSNSELIRLINNAIKNDLASRNPTFMGLALHCIASVGSREMAEAFAGEIPKVLVAGDTMDSVKQSAALCLLRLYRTSPDLVPMGDWTSRVVHLLNDQHLGVVTAATSLITTLAQKNPEEFKTSVSLAVSRLSRIVTSASTDLQDYTYYFVPAPWLSVKLLRLLQCYPPPDPAVRGRLTECLETILNKAQEPPKSKKVQHSNAKNAVLFEAISLIIHHDSEPNLLVRACNQLGQFLQHRETNLRYLALESMCTLASSEFSHEAVKTHIETVINALKTERDVSVRQRAVDLLYAMCDRSNAPQIVAEMLSYLETADYSIREEIVLKVAILAEKYAVDYTWYVDTILNLIRIAGDYVSEEVWYRVIQIVINRDDVQGYAAKTVFEALQAPACHENLVKVGGYILGEFGNLIAGDPRSSPLIQFHLLHSKFHLCSVPTRALLLSTYIKFVNLFPEVKPTIQDVLRSDSQLRNADVELQQRAVEYLRLSTVASTDILATVLEEMPPFPERESSILAKLKKKKGPSTVTDLEDTKRDRSVDVNGGPEPAPASTSAVSTPSPSADLLGLGAAPPAPAGPPPSSGGSGLLVDVFSDSASVVAPLAPGSEDNFARFVCKNNGVLFENQLLQIGLKSEFRQNLGRMFIFYGNKTSTQFLNFTPTLICSDDLQPNLNLQTKPVDPTVEGGAQVQQVVNIECVSDFTEAPVLNIQFRYGGTFQNVSVQLPITLNKFFQPTEMASQDFFQRWKQLSNPQQEVQNIFKAKHPMDTEVTKAKIIGFGSALLEEVDPNPANFVGAGIIHTKTTQIGCLLRLEPNLQAQMYRLTLRTSKEAVSQRLCELLSAQF

SEQ ID NO: 40943 - protein, 321 aa, Homo sapiens
MGLQACLLGLFALILSGKCSYSPEPDQRRTLPPGWVSLGRADPEEELSLTFALRQQNVERLSELVQAVSDPSSPQYGKYLTLENVADLVRPSPLTLHTVQKWLLAAGAQKCHSVITQDFLTCWLSIRQAELLLPGAEFHHYVGGPTETHVVRSPHPYQLPQALAPHVDFVGGLHRFPPTSSLRQRPEPQVTGTVGLHLGVTPSVIRKRYNLTSQDVGSGTSNNSQACAQFLEQYFHDSDLAQFMRLFGGNFAHQASVARVVGQQGRGRAGIEASLDVQYLMSAGANISTWVYSSPGTTKRTGQWGRGWEMGVDPCSLKGML

SEQ ID NO: 40944 - protein, 588 aa, Homo sapiens
MTNIICLLYVGWVTNYIASVYVRGQEPAPDKKLEEDKGDTLKIIERLDHLENVIKQHIQEAPAKPEEAEAEPFTDSSLFAHWGQELSPEGRRVALKQFQYYGYNAYLSDRLPLDRPLPDLRPSGCRNLSFPDSLPEVSIVFIFVNEALSVLLRSIHSAMERTPPHLLKEIILVDDNSSNEELKEKLTEYVDKVNSQKPGFIKVVRHSKQEGLIRSRVSGWRAATAPVVALFDAHVEFNVGWAEPVLTRIKENRKRIISPSFDNIKYDNFEIEEYPLAAQGFDWELWCRYLNPPKAWWKLENSTAPIRSPALIGCFIVDRQYFQEIGLLDEGMEVYGGENVELGIRVWQCGGSVEVLPCSRIAHIERAHKPYTEDLTAHVRRNALRVAEVWMDEFKSHVYMAWNIPQEDSGIDIGDITARKALRKQLQCKTFRWYLVSVYPEMRMYSDIIAYGVLQNSLKTDLCLDQGPDTENVPIMYICHGMTPQNVYYTSSQQIHVGILSPTVDDDDNRCLVDVNSRPRLIECSYAKAKRMKLHWQFSQGGPIQNRKSKRCLELQENSDLEFGFQLVLQKCSGQHWSITNVLRSLAS

SEQ ID NO: 40945 - protein, 53 aa, Homo sapiens
MRWRTILLQYCFLLITCLLTALEAVPIDIDKTKVQNIHPVESAKIEPPVSEMK

SEQ ID NO: 40946 - protein, 67 aa, Homo sapiens
MATSSEEVLLIVKKVRQKKQDGALYLMAERIAWAPEGKDRFTISHMYADIKCKSAILSSDVFVCHSC

SEQ ID NO: 40947 - protein, 2423 aa, Homo sapiens
MKSGLPKPVHSAAPILHVPPARAGPQPCYLKLGSKVEVSKTTYPSQIPLKSQVLQGLQEPAGEGLPLRKSGSVENGFDTQIYTDWANHYLAKSGHKRLIRDLQQDVTDGVLLAQIIQVVANEKIEDINGCPKNRSQMIENIDACLNFLAAKGINIQGLSAEEIRNGNLKAILGLFFSLSRYKQQQQQPQKQHLSSPLPPAVSQVAGAPSQCQAGTPQQQVPVTPQAPCQPHQPAPHQQSKAQAEMQSRLPGPTARVSAAGSEAKTRGGSTTANNRRSQSFNNYDKSKPVTSPPPPPSSHEKEPLASSASSHPGMSDNAPASLESGSSSTPTNCSTSSAIPQPGAATKPWRSKSLSVKHSATVSMLSVKPPGPEAPRPTPEAMKPAPNNQKSMLEKLKLFNSKGGSKAGEGPGSRDTSCERLETLPSFEESEELEAASRMLTTVGPASSSPKIALKGIAQRTFSRALTNKKSSLKGNEKEKEKQQREKDKEKSKDLAKRASVTERLDLKEEPKEDPSGAAVPEMPKKSSKIASFIPKGGKLNSAKKEPMAPSHSGIPKPGMKSMPGKSPSAPAPSKEGERSRSGKLSSGLPQQKPQLDGRHSSSSSSLASSEGKGPGGTTLNHSISSQTVSGSVGTTQTTGSNTVSVQLPQPQQQYNHPNTATVAPFLYRSQTDTEGNVTAESSSTGVSVEPSHFTKTGQPALEELTGEDPEARRLRTVKNIADLRQNLEETMSSLRGTQVTHSTLETTFDTNVTTEMSGRSILSLTGRPTPLSWRLGQSSPRLQAGDAPSMGNGYPPRANASRFINTESGRYVYSAPLRRQLASRGSSVCHVDVSDKAGDEMDLEGISMDAPGYMSDGDVLSKNIRTDDITSGYMTDGGLGLYTRRLNRLPDGMAVVRETLQRNTSLGLGDADSWDDSSSVSSGISDTIDNLSTDDINTSSSISSYANTPASSRKNLDVQTDAEKHSQVERNSLWSGDDVKKSDGGSDSGIKMEPGSKWRRNPSDVSDESDKSTSGKKNPVISQTGSWRRGMTAQVGITMPRTKPSAPAGALKTPGTGKTDDAKVSEKGRLSPKASQVKRSPSDAGRSSGDESKKPLPSSSRTPTANANSFGFKKQSGSAAGLAMITASGVTVTSRSATLGKIPKSSALVSRSAGRKSSMDGAQNQDDGYLALSSRTNLQYRSLPRPSKSNSRNGAGNRSSTSSIDSNISSKSAGLPVPKLREPSKTALGSSLPGLVNQTDKEKGISSDNESVASCNSVKVNPAAQPVSSPAQTSLQPGAKYPDVASPTLRRLFGGKPTKQVPIATAENMKNSVVISNPHATMTQQGNLDSPSGSGVLSSGSSSPLYSKNVDLNQSPLASSPSSAHSAPSNSLTWGTNASSSSAVSKDGLGFQSVSSLHTSCESIDISLSSGGVPSHNSSTGLIASSKDDSLTPFVRTNSVKTTLSESPLSSPAASPKFCRSTLPRKQDSDPHLDRNTLPKKGLRYTPTSQLRTQEDAKEWLRSHSAGGLQDTAANSPFSSGSSVTSPSGTRFNFSQLASPTTVTQMSLSNPTMLRTHSLSNADGQYDPYTDSRFRNSSMSLDEKSRTMSRSGSFRDGFEEVHGSSLSLVSSTSSVYSTPEEKCQSEIRKLRRELDASQEKVSALTTQLTANAHLVAAFEQSLGNMTIRLQSLTMTAEQKDSELNELRKTIELLKKQNAAAQAAINGVINTPELNCKGNGTAQSADLRIRRQHSSDSVSSINSATSHSSVGSNIESDSKKKKRKNWVNELRSSFKQAFGKKKSPKSASSHSDIEEMTDSSLPSSPKLPHNGSTGSTPLLRNSHSNSLISECMDSEAETVMQLRNELRDKEMKLTDIRLEALSSAHQLDQLREAMNRMQSEIEKLKAENDRLKSESQGSGCSRAPSQVSISASPRQSMGLSQHSLNLTESTSLDMLLDDTGECSARKEGGRHVKIVVSFQEEMKWKEDSRPHLFLIGCIGVSGKTKWDVLDGVVRRLFKEYIIHVDPVSQLGLNSDSVLGYSIGEIKRSNTSETPELLPCGYLVGENTTISVTVKGLAENSLDSLVFESLIPKPILQRYVSLLIEHRRIILSGPSGTGKTYLANRLSEYIVLREGRELTDGVIATFNVDHKSSKELRQYLSNLADQCNSENNAVDMPLVIILDNLHHVSSLGEIFNGLLNCKYHKCPYIIGTMNQATSSTPNLQLHHNFRWVLCANHTEPVKGFLGRFLRRKLMETEISGRVRNMELVKIIDWIPKVWHHLNRFLEAHSSSDVTIGPRLFLSCPIDVDGSRVWFTDLWNYSIIPYLLEAVREGLQLYGRRAPWEDPAKWVMDTYPWAASPQQHEWPPLLQLRPEDVGFDGYSMPREGSTSKQMPPSDAEGDPLMNMLMRLQEAANYSSPQSYDSDSNSNSHHDDILDSSLESTL

SEQ ID NO: 40948 - protein, 433 aa, Homo sapiens [sequence omitted]

SEQ ID NO: 40949 - protein, 2061 aa, Homo sapiens
MNVTRTPESFPPGKLLPISPTWPFTEVRSSSAADRIKTVLGQSSDNTSLPQSARTPASKTHHRTRAHADFSSSLYQGSGHSASLEPSKDSTESLVQPGPKGGQEAADVSGLPLTSMLPSLSTVPSGTSFSAVPPSQPVWAGTSSISKHPPRSDIPPLLPLPPSSSLAPDSPHSIISEPAEQSPKVLLVPQTAPADPSLGQNIANPLIPFSDEMDHTASQNAQDLIGIPHLGVSGSSTKWHSELSPTEGPHSAGSSTPGFLSPMAELSHPSPPPPALGSLLQLPDGSPSWSMLEVASGPASTQQIKAGVPGRVHNGVSLPTFKNTETATHEAEPPLFQTAESGAIEMTSRKLASATANDSANPLHLSAAPENSRGPALSAEHTSSLVPSLHITTLGQEQAILSGAVPASPSTGTADFPSILTFLQPTENHASPSPVPEMPTLPAEGSDGSPPATRDLLLSSKVPNLLSTSWTFPRWKKDSVTAILGKNEEANVTIPLQAFPRKEVLSLHTVNGFVSDFSTGSVSSPIITAPRTNPLPSGPPLPSILSIQATQTVFPSLGFSSTKPEAYAAAVDHSGLPASASKQVRASPSSMDVYDSLTIGDMKKPATTDVFWSSLSAETGSLSTESIISGLQQQTNYDLNGHTISTTSWETHLAPTAPPNGLTSAADAIKSQDFKDTAGHSVTAEGFSIQDLVLGTSIEQPVQQSDMTMVGSHIDLWPTSNNNHSRDFQTAEVAYYSPTTRHSVSHPQLQLPNQPAHPLLLTSPGPTSTGSLQEMLSDGTDTGSEISSDINSSPERNASTPFQNILGYHSAAESSISTSVFPRTSSRVLRASQHPKKWTADTVSSKVQPTAAAAVTLFLRKSSPPALSAALVAKGTSSSPLAVASGPAKSSSMTTLAKNVTNKAASGPKRTPGAVHTAFPFTPTYMYARTGHTTSTHTAMQGNMDTASGLLSTTYLPRKPQAMHTGLPNPTNLEMPRASTPRPLTVTAALTSITASVKATRLPPLRAENTDAVLPAASAAVVTTGKMASNLECQMSSKLLVKTVLFLTQRRVQISESLKFSIAKGLTQALRKAFHQNDVSAHVDILEYSHNVTVGYYATKGKLVYLPAVVIEMLGVYGVSNVTADLKQHTPHLQSVAVLASPWNPQPAGYFQLKTVLQFVSQADNIQSCKFAQTMEQRLQKAFQDAERKVLNTKSNLTIQIVSTSNASQAVTLVYVVGNQSTFLNGTVASSLLSQLSAELVGFYLTYPPLTIAEPLEYPNLDISETTRDYWVITVLQGVDNSLVGLHNQSFARVMEQRLAQLFMMSQQQGRRFKRATTLGSYTVQMVKMQRVPGPKDPAELTYYTLYNGKPLLGTAAAKILSTIDSQRMALTLHHVVLLQADPVVKNPPNNLWIIAAVLAPIAVVTVIIIIITAVLCRKNKNDFKPDTMINLPQRAKPVQGFDYAKQHLGQQGADEEVIPVTQETVVLPLPIRDAPQERDVAQDGSTIKTAKSTETRKSRSPSENGSVISNESGKPSSGRRSPQNVMAQQKVTKEEARKRNVPASDEEEGAVLFDNSSKVAAEPFDTSSGSVQLIAIKPTALPMVPPTSDRSQESSAVLNGEVNKALKQKSDIEHYRNKLRLKAKRKGYYDFPAVETSKGLTERKKMYEKAPKEMEHVLDPDSELCAPFTESKNRQQMKNSVYRSRQSLNSPSPGETEMDLLVTRERPRRGIRNSGYDTEPEIIEETNIDRVPEPRGYSRSRQVKGHSETSTLSSQPSIDEVRQQMHMLLEEAFSLASAGHAGQSRHQEAYGSAQHLPYSEVVTSAPGTMTRPRAGVQWVPTYRPEMYQYSLPRPAYRFSQLPEMVMGSPPPPVPPRTGPVAVASLRRSTSDIGSKTRMAESTGPEPAQLHDSASFTQMSRGPVSVTQLDQSALNYSGNTVPAVFAIPAANRPGFTGYFIPTPPSSYRNQAWMSYAGENELPSQWADSVPLPGYIEAYPRSRYPQSSPSRLPRQYSQPANLHPSLEQAPAPSTAASQQSLAENDPSDAPLTNISTAALVKAIREEVAKLAKKQTDMFEFQV

SEQ ID NO: 40950 - protein, 433 aa, Homo sapiens [sequence omitted]

SEQ ID NO: 40951 - protein, 120 aa, Homo sapiens
MLSISADIETVGETLKKIIPTLEEYHHYKGSNFDCELRLLTHQSLAGGIIEVKDAKIKELQGNTQTTIKLFRECCPHSTDGVVLTGERLWSCRVHKIILDLISESPTEDVHRLIIPIFMM

SEQ ID NO: 40952 - protein, 1173 aa, Homo sapiens
MKECLAQTNAAVGDMVTVVKTEVCSPLRDQEYGQPCSRRPDSSAMEVEPKKLKGKRDLIVPKSFQQVDFWFCESCQEYFVDECPNHGPPVFVSDTPVPVGIPDRAALTIPQGMEVVKDTSGESDVRCVNEVIPKGHIFGPYEGQISTQDKSAGFFSWLIVDKNNRYKSIDGSDETKANWMRYVVISREEREQNLLAFQHSERIYFRACRDIRPGEWLRVWYSEDYMKRLHSMSQETIHRNLARGEKRLQREKSEQVLDNPEDLRGPIHLSVLRQGKSPYKRGFDEGDVHPQAKKKKIDLIFKDVLEASLESAKVEAHQLALSTSLVIRKVPKYQDDAYSQCATTMTHGVQNIGQTQGEGDWKVPQGVSKEPGQLEDEEEEPSSFKADSPAEASLASDPHELPTTSFCPNCIRLKKKVRELQAELDMLKSGKLPEPPVLPPQVLELPEFSDPAASESMVSGPAIMEDDDQEVDSADESVSNDMMTATDEPSKMSSATGRRIRRFKQEWLKKFWFLRYSPTLNEMWCHVCRQYTVQSSRTSAFIIGSKQFKIHTIKLHSQSNLHKKCLQLYKLRMHPEKTEEMCRNMTLLFNTAYHLALEGRPYLDFRPLAELLRKCELKVVDQYMNEGDCQILIHHIARALREDLVERIRQSPCLSVILDGQSDDLLADTVAVYVQYTSSDGPPATEFLSLQELGFSSTESYLQALDRAFSALGIRLQDEKPTVGLGVDGANITASLRASMFMTIRKTLPWLLCLPFMVHRPHLEILDAISGKELPCLEELENNLKQLLSFYRYSPRLMCELRSTAATLCEETEFLGDIRAVRWIIGEQNVLNALIKDYLEVVAHLKEVSSQTQRADASAIALALLQFLMDYQSIKLIYFLLDVIAVLSRLAYIFQGEYLLVSQVDDKIEEAIQEISRLADSPGEYLQEFEENFRESFNGIAMKNLRVAEAKFQSIREKICQKTQVILAQRFDSRSRIFVKACQVFDLAAWPRSSEELMSYGKEDMVQIFDHLEAIPTFSRDVCREGLDPRGSLLMEWRELKADYYTKNGFKDLISHICKYKQRFPLLNKIIQVLKVLPTSTACCEKGRNALQRVRKNHRSRLTLEQLSDLLTIAVNGPPITNFDAKRALDSWFEEKSGNSYALSAEVLSRMSALEQKPALQTMDHGTEFYPDI

SEQ ID NO: 40953 - protein, 618 aa, Homo sapiens
MDLIDATGDTPGAEDDEEDDDEERAARRPGAGPPKAESGQEPASRGQGQSQGQSQGPGSGDTYRPKRPTTLNLFPQVPRSQDTLNNNSLGKKHSWQDRVSRSSSPLKTGEQTPPHEHICLSDELPPQSGPAPTTDRGTSTDSPCRRSTATQMAPPGGPPAAPPGGRGHSHRDRIHYQADVRLEATEEIYLTPVQRPPDAAEPTSAFLPPTESRMSVSSDPDPAAYPSTAGRPHPSISEEEEGFDCLSSPERAEPPGGGWRGSLGEPPPPPRASLSSDTSALSYDSVKYTLVVDEHAQLELVSLRPCFGDYSDESDSATVYDNCASVSSPYESAIGEEYEEAPRPQPPACLSEDSTPDEPDVHFSKKFLNVFMSGRSRSSSAESFGLFSCIINGEEQEQTHRAIFRFVPRHEDELELEVDDPLLVELQAEDYWYEAYNMRTGARGVFPAYYAIEVTKEPEHMAALAKNSDWVDQFRVKFLGSVQVPYHKGNDVLCAAMQKIATTRRLTVHFNPPSSCVLEISVRGVKIGVKADDSQEAKGNKCSHFFQLKNISFCGYHPKNNKYFGFITKHPADHRFACHVFVSEDSTKALAESVGRAFQQFYKQFVEYTCPTEDIYLE

SEQ ID NO: 40954 - protein, 137 aa, Homo sapiens
MPKHPELADKNVPNLHVMKAMQSLKSRGYVKEQFAWRHFYWYLTNEGIQYLRDYLHLPPEIVPAILRRSRPETGRPRPKGLEGERPARLTRGEADRDTYRRSAVPPGADKKAEAGAGSATEFQFRGGFGRGRGQPPQ

SEQ ID NO: 40955 - protein, 170 aa, Homo sapiens
MKEYHCLLQLLCPDFPLELTQKAARIVLMDDAMDCLMSFSDFLFAFQIQFYYSEFLDSVAAIYEDLLSGKNPNTVIVPTSSSGQHRQRPALGGAGTLEGVEASLFYQCLENLCDRHKYSCPPPALVKEALSNVQRLTFYGFLMALSKHRGINQALAATRKEKPISNWVTA

SEQ ID NO: 40956 - protein, 85 aa, Homo sapiens
MLSLSLSLSNTRDWGNRENRSRCPQRSQSASEVGELLPEEKRQTPVSFIPLARRAIPQVSSVLQPKCWIPRDWKGKSLKITSSGV

SEQ ID NO: 40957 - protein, 695 aa, Homo sapiens
MDLLGDHEENLAERLSKMVIENELEDPAIMRAVQTRPVLQPQPGSLNSSIWDGSEVLRRIRGPLLAQEMPTVSVLEYALPQRPPQGPEDDRDLSERALPRRSTSPIIGSPPVRAVPIGTPPKQMAVPSFTQQILCPKPVHVRPPMPPRYPAPYGERMSPNQLCSVPNSSLLGHPFPPSVPPVLSPLQRAQLLGGAQLQPGRMSPSQFARVPGFVGSPLAAMNPKLLQGRVGQMLPPAPGFRAFFSAPPSATPPPQQHPPGPGPHLQNLRSQAPMFRPDTTHLHPQHRRLLHQRQQQNRSQHRNLNGAGDRGSHRSSHQDHLRKDPYANLMLQREKDWVSKIQMMQLQSTDPYLDDFYYQNYFEKLEKLSAAEEIQGDGPKKERTKLITPQVAKLEHAYKPVQFEGSLGKLTVSSVNNPRKMIDAVVTSRSEDDETKEKQVRDKRRKTLVIIEKTYSLLLDVEDYERRYLLSLEEERPALMDDRKHKICSMYDNLRGKLPGQERPSDDHFVQIMCIRKGKRMVARILPFLSTEQAADILMTTARNLPFLIKKDAQDEVLPCLLSPFSLLLYHLPSVSITSLLRQLMNLPQSAATPALSNPHLTAVLQNKFGLSLLLILLSRGEDLQSSDPATESTQNNQWTEVMFMATRELLRIPQAALAKPISIPTNLVSLFSRYVDRQKLNLLETKLQLVQGIR

SEQ ID NO: 40958 - protein, 315 aa, Homo sapiens
MALATNRSLAERNLEFQGPLEISRSNLSDRYQELRKLVERCQEQKAKLEKFSSALQPGTLLDLLQVEGMKIEEESEAMAEKFLEGEVPLETFLENFSSMRMLSHLRRVRVEKLQEVVRKPRASQELAGDAPPPRPPPPVRPVPQGTPPVVEEQPQPPLAMPPYPLPYSPSPSLPVGPTAHGALPPAPFPVVSQPSFYSGPLGPTYPAAQLGPRGAAGYSWSPQRSMPPRPGYPGTPMGASGPGYPLRGGRAPSPGYPQQSPYPATGGKPPYPIQPQLPSFPGQPQPSVPLQPPYPPGPAPPYGFPPPPGPAWPGY

SEQ ID NO: 40959 - protein, 243 aa, Homo sapiens
MAFSVVSMSTLYVLSLRTEEDLVDTDGSSQSFGTTQLRQSPLTTGLPGIQPSLLLVTTSLTSSAPGSAVRTLDMCSSHPCPVICCSSPTTNPTTGPSLGPSFNPGHVLSPSPSPSTNRSGPSQMALLPVTNIRAKSWGLSVNGIGHSKHHKSLEPLASPAVPFPGGQGKAKNSPSLGFHGRARRGALQSSVGPAEPTWAQGQSGTCCTPDTTQPSLARLTGQGPPQPSHVTVWVQTCQSIDVC

SEQ ID NO: 40960 - protein, 444 aa, Homo sapiens
MAPDPVAAETAAQGPTPRYFTWDEVAQRSGCEERWLVIDRKVYNISEFTRRHPGGSRVISHYAGQDATDPFVAFHINKGLVKKYMNSLLIGELSPEQPSFEPTKNKELTDEFRELRATVERMGLMKANHVFFLLYLLHILLLDGAAWLTLWVFGTSFLPFLLCAVLLSAVQAQAGWLQHDFGHLSVFSTSKWNHLLHHFVIGHLKGAPASWWNHMHFQHHAKPNCFRKDPDINMHPFFFALGKILSVELGKQKKKYMPYNHQHKYFFLIGPPALLPLYFQWYIFYFVIQRKKWVDLAWMITFYVRFFLTYVPLLGLKAFLGLFFIVRFLESNWFVWVTQMNHIPMHIDHDRNMDWVSTQLQATCNVHKSAFNDWFSGHLNFQIEHHLFPTMPRHNYHKVAPLVQSLCAKHGIEYQSKPLLSAFADIIHSLKESGQLWLDAYLHQ

SEQ ID NO: 40961 - protein, 298 aa, Homo sapiens
MYGQPYRVTLELELPESPVNQDLGMFLVTISCYTRGGRIISTSSRSVMLHYRSDLLQMLDTLVFSSLLLFGFAEQKQLLEVELYADYRENSYVPTTGAIIEIHSKRIQLYGAYLRIHAHFTGLRYLLYNFPMTCAFIGVASNFTFLSVIVLFSYMQWVWGGIWPRHRFSLQVNIRKRDNSRKEVQRRISAHQPGPEGQEESTPQSDVTEDGESPEDPSGTEGQLSEEEKPDQQPLSGEEELEPEASDGSGSWEDAALLTEANLPAPAPASASAPVLETLGSSEPAGGALRQRPTCSSS

SEQ ID NO: 40962 - protein, 31 aa, Homo sapiens
MGQDPSLCKASVTVMFQHLIIYPGEFSCLPG

SEQ ID NO: 40963 - protein, 40 aa, Homo sapiens
MGQDPSLCKASVTVMFQVGVHGLCSYRGDLVDNHSMMNTK

SEQ ID NO: 40964 - protein, 621 aa, Homo sapiens
MGGAGALGGAGGVQGAAGRAAGGCPRALRPAARDPAREPAAANPAGRGPCGKELDSLRHQVDQLAEENVELELELQRSLEPPPGSPGEAPLAGAAPSLQDEVREAEAGRLRTLERENRELRGLLQVLQGQPGGQHPLLEAPREDPVLPVLEEAPQTPVAFDHSPQGLVQKARDGGPQALDLAPPALDSVLEASAECPQAPDSDPQEAESPLQAAAMDPQASDWSPQESGSPVETQESPEKAGRRSSLQSPASVAPPQGPGTKIQAPQLLGGETEGREAPQGELVPEAWGLRQEGPEHKPGPSEPSSVQLEEQEGPNQGLDLATGQAEAREHDQRLEGTVRDPAWQKPQQKSEGALEVQVWEGPIPGESLASGVAEQEALREEVAQLRRKAEALGDELEAQARKLEAQNTEAARLSKELAQARRAEAEAHREAEAQAWEQARLREAVEAAGQELESASQEREALVEALAAAGRERRQWEREGSRLRAQSEAAEERMQVLESEGRQHLEEAERERREKEALQAELEKAVVRGKELGDRLEHLQRELEQAALERQEFLREKESQHQRYQGLEQRLEAELQAAATSKEEALMELKTRALQLEEELFQVMPARLGAGGHATLPSIP

SEQ ID NO: 40965 - protein, 129 aa, Homo sapiens
MEPNHPFYSNISKDRRYADLTEDLLPSCESLKDTIARALTFWNEEIVPQIKEGKRVLIAAHGNSLRGIAKHLEGLSEEAIMELNLPTGIPIVYEWDKNLKPIKPMQFLGDEEMVRKAMEAVAAQGKAKK

SEQ ID NO: 40966 - protein, 620 aa, Homo sapiens [sequence omitted]

SEQ ID NO: 40967 - protein, 224 aa, Homo sapiens [sequence omitted]

SEQ ID NO: 40968 - protein, 162 aa, Homo sapiens
MPLHLAATSALRRLPATGPRHHCPTAPMLSMPPAPFAGPGLPASMAASASFSRARWIRLPGAPCCCAHLPTQVPTSCSPEGALHVGHSLLAQPHQMDMLDGLCPSPQLWPPKEVPKISTPVMLMGPSAPALSWVDGGKPSPMALPFLGHPTSCRRHCVPLGE

SEQ ID NO: 40969 - protein, 258 aa, Homo sapiens
MGAPLIKLMKASSLPFYHRCCDKRLWTKIDLSRCKAIVPQALSGIIKRQPVSLDLSWTNISKKQLTWLVNRLPGLKDLLLAGCSWSAVSALSTSSCPLLRTLDLRWAVGIKDPQIRDLLTPPADKPGQDNRSKLRNMTDFRLAGLDITDATLRLIIRHMPLLSRLDLSHCSHLTDQSSNLLTAVGSSTRYSLTELNMAGCNKLTDQTLIYLRRIANVTLIDLRGCKQITRKACEHFISDLSINSLYCLSDEKLIQKIS

SEQ ID NO: 40970 - protein, 219 aa, Homo sapiens [sequence omitted]

SEQ ID NO: 40971 - protein, 192 aa, Homo sapiens
MRHNWTPDLSPLWVLLLCAHVVTLLVRATPVSQTTTAATASVRSTKDPCPSQPPVFPAAKQCPALEVTWPEVEVPLNGTLSLSCVACSRFPNFSILYWLGNGSFIEHLPGRLWEGSTSRERGSTGTQLCKALVLEQLTPALHSTNFSCVLVDPEQVVQRHVVLAQLWAGLRATLPPTQEALPSSHSSPQQQG

SEQ ID NO: 40972 - protein, 197 aa, Homo sapiens
MRHNWTPDLSPLWVLLLCAHVVTLLVRATPVSQTTTAATASVRSTKDPCPSQPPVFPAAKQCPALEVTWPEVEVPLNGTLSLSCVACSRFPNFSILYWLGNGSFIEHLPGRLWEGSTSRERGSTGTQLCKALVLEQLTPALHSTNFSCVLVDPEQVVQRHVVLAQLWVRSPRRGLQEQEELCFHMWGGKGGLCQSSL

SEQ ID NO: 40973 - protein, 196 aa, Homo sapiens
MATLELRTQNVLGEKGRRIRELTAVVQKRFGFPEGSVELYAEKVATRGLCAIAQAESLRYKLLGGLAVRRACYGVLRFIMESGAKGCEVVVSGKLRGQRAKSMKFVDGLMIHSGDPVNYYVDTAVRHVLLRQGVLGIKVKIMLPWDPTGKIGPKKPLPDHVSIVEPKDEILPTTPISEQKGGKPEPPAMPQPVPTA

SEQ ID NO: 40974 - protein, 572 aa, Homo sapiens
MNKWVQSICQICGFNQAEESTDSLRNVSSAGHGPRSSPAELSSSSQHLLRERKSSAPSHSSQPTLFTFEPPVSNHMQPTLSTSAPQEYLYLHQCISRRAENARSASFSQGTRASFLMRSDTAVQKLAQGNGHCVNGISGQVHGFYSLPKPSRHNTEFRDSTYDLPRSLASHGHTKGSLTGSETDNEDVYTFKTPSNTLCREFGDLLVDNMDVPATPLSAYQIPRTFTLDKNHNAMTVATPGDSAIAPPPRPPKPSQAETPRWGSPQQRPPISENSRSVAATIPRRNTLPAMDNSRLHRASSCETYEYPQRGGESAGRSAESMSDGVGSFLPGKMIVGRSDSTNSEDNYVPMNPGSSTLLAMERAGDNSQSVYIPMSPGAHHFDSLGYPSTTLPVHRGPSRGSEIQPPPVNRNLKPDRKAKPTPLDLRNNTVIDELPFKSPITKSWSRANHTFNSSSSQYCRPISTQSITSTDSGDSEENYVPMQNPVSASPVPSGTNSPAPKKSTGSVDYLALDFQPSSPSPHRKPSTSSVTSDEKVDYVQVDKEKTQALQNTMQEWTDVRQSSEPSKGAKL

SEQ ID NO: 40975 - protein, 296 aa, Homo sapiens [sequence omitted]

SEQ ID NO: 40976 - protein, 585 aa, Homo sapiens
MHQTSAKDIVDGNLKSIMRLVLALAAHFKPGSSRTVNQGRDSRAPLQSHRPHCATAVAQGAAAALADVCHDMSRSGRDVFRYRQRNSSMDEEIENPYWSVRALVQQYEGQQRSPSESSCSSLTSPSPIHSAKSESIITQSEEKADFVIIPAEGIENRTEGTDSPLSRDWRPGSPGTYLETSWEEQLLEQQEYLEKEMEEAKKMISGLQALLLNGSLPEDEQERPLALCEPGVNPEEQLIIIQSRLDQSMEENQDLKKELLKCKQEARNLQGIKDALQQRLTQQDTSVLQLKQELLRANMDKDELHNQNVDLQRKLDERNRLLGEYKKELGQKDRLLQQHQAKLEEALRKLSDVSYHQVDLERELEHKDVLLAHCMKREADEATNYNSHNSQSNGFLLPTAGKGATSVSNRGTSDLQLVRDALRSLRNSFSGHDPQHHTIDSLEQGISSLMERLHVMETQKKQERKVRVKSPRTQVGSEYRESWPPNSKLPHSQSSPTVSSTCTKVLYFTDRSLTPFMVNIPKRLEEVTLKDFKAAIDREGNHRYHFKALDPEFGTVKEEIFHDDDAIPGWEGKIVAWVEEDHGEN

SEQ ID NO: 40977 - protein, 731 aa, Homo sapiens
MFQRKYLYQKVERTLCQPPTKNESEIQFFYVDVSTLSPVNTTYQLRVSRMDDFVLRTGEQFSFNTTAAQPQYFKYEFPEGVDSVIVKVTSNKAFPCSVISIQDVLCPVYDLDNNVAFIGMYQTMTKKAAITVQRKDFPSNSFYVVVVVKTEDQACGGSLPFYPFAEDEPVDQGHRQKTLSVLVSQAVTSEAYVSGMLFCLGIFLSFYLLTVLLACWENWRQKKKTLLVAIDRACPESGHPRVLADSFPGSSPYEGYNYGSFENVSGSTDGLVDSAGTGDLSYGYQGRSFEPVGTRPRVDSMSSVEEDDYDTLTDIDSDKNVIRTKQYLYVADLARKDKRVLRKKYQIYFWNIATIAVFYALPVVQLVITYQTVVNVTGNQDICYYNFLCAHPLGNLSAFNNILSNLGYILLGLLFLLIILQREINHNRALLRNDLCALECGIPKHFGLFYAMGTALMMEGLLSACYHVCPNYTNFQFDTSFMYMIAGLCMLKLYQKRHPDINASAYSAYACLAIVIFFSVLGVVFGKGNTAFWIVFSIIHIIATLLLSTQLYYMGRWKLDSGIFRRILHVLYTDCIRQCSGPLYVDRMVLLVMGNVINWSLAAYGLIMRPNDFASYLLAIGICNLLLYFAFYIIMKLRSGERIKLIPLLCIVCTSVVWGFALFFFFQGLSTWQKTPAESREHNRDCILLDFFDDHDIWHFLSSIAMFGSFLVLLTLDDDLDTVQRDKIYVF

SEQ ID NO: 40978 - protein, 728 aa, Homo sapiens
MFQRKYLYQKVERTLCQPPTKNESEIQFFYVDVSTLSPVNTTYQLRVSRMDDFVLRTGEQFSFNTTAAQPQYFKYEFPEGVDSVIVKVTSNKAFPCSVISIQDVLCPVYDLDNNVAFIGMYQTMTKKAAITVQRKDFPSNSFYVVVVVKTEDQACGGSLPFYPFAEDEPVDQGHRQKTLSVLVSQAVTSEAYVSGMLFCLGIFLSFYLLTVLLACWENWRQKKKTLLVAIDRACPESASLLGHPRVLADSFPGSSPYEGYNYGSFENVSGSTDGLVDSAGTGDLSYGYQGTRPRVDSMSSVEEDDYDTLTDIDSDKNVIRTKQYLYVADLARKDKRVLRKKYQIYFWNIATIAVFYALPVVQLVITYQTVVNVTGNQDICYYNFLCAHPLGNLSAFNNILSNLGYILLGLLFLLIILQREINHNRALLRNDLCALECGIPKHFGLFYAMGTALMMEGLLSACYHVCPNYTNFQFDTSFMYMIAGLCMLKLYQKRHPDINASAYSAYACLAIVIFFSVLGVVFGKGNTAFWIVFSIIHIIATLLLSTQLYYMGRWKLDSGIFRRILHVLYTDCIRQCSGPLYVDRMVLLVMGNVINWSLAAYGLIMRPNDFASYLLAIGICNLLLYFAFYIIMKLRSGERIKLIPLLCIVCTSVVWGFALFFFFQGLSTWQKTPAESREHNRDCILLDFFDDHDIWHFLSSIAMFGSFLVLLTLDDDLDTVQRDKIYVF

SEQ ID NO: 40979 - protein, 509 aa, Homo sapiens
MQVLCEKYSPENFPYRRGPGMGVHVPATPQGSPMKDRLNLPSVLVLNSCGITCAGDEKEIAAFCAHVSELDLSDNKLEDWHEVSKIVSNVPQLEFLNLSSNPLNLSVLERTCAGSFSGVRKLVLNNSKASWETVHMILQELPDLEELFLCLNDYETVSCPSICCHSLKLLHITDNNLQDWTEIRKLGVMFPSLDTLVLANNHLNAIEEPDDSLARLFPNLRSISLHKSGLQSWEDIDKLNSFPKLEEVRLLGIPLLQPYTTEERRKLVIARLPSVSKLNGSVVTDGEREDSERFFIRYYVDVPQEEVPFRMNYSSFLRIWVSFIFALVQHQAQPRELMYPFWQNDTKTPKVDDGSSSEIKLAIPVFFFGVPYRTVYVNNNGVVSFNVLVSQFTPESFPLTDGRAFVAPFWADVHNGIRGEIYYRETMEPAILKRATKDIRKYFKDMATFSATWVFIVTWEEVTFYGGSSTTPVIIQIFCFPLHNLTSNSCPSSLPRRSLIIRAKECQFP

SEQ ID NO: 40980 - protein, 603 aa, Homo sapiens [sequence omitted]

SEQ ID NO: 40981 - protein, 830 aa, Homo sapiens
MKNVQEQSLEAGLARDLPAVLAPGKEFLQLPSIEITPSSDEDTPWSNCSTPSASPRRKRFLLRKWLRVRERKECSESSSQQSSQQSSHDDDSSRFLSPRAREESTASNSNRSTPACSPILRKRSRSPTPQNQDGDTMVEKGSDHSSDKSPSTPEQGVQRSCSSQSGRSGGKNSKKSQSWYNVLSPTYKQRNEDFRKLFKQLPDTERLIVDYSCALQRDILLQGRLYLSENWICFYSNIFRWETLLTVRLKDICSMTKEKTARLIPNAIQVCTDSEKHFFTSFGARDRTYMMMFRLWQNALLEKPLCPKELWHFVHQCYGNELGLTSDDEDYVPPDDDFNTMGYCEEIPVEENEVNDSSSKSSIETKPDASPQLPKKSITNSTLTSTGSSEAPVSFDGLPLEEEALEGDGSLEKELAIDNIMGEKIEMIAPVNSPSLDFNDNEDIPTELSDSSDTHDEGEVQAFYEDLSGRQYVNEVFNFSVDKLYDLLFTNSPFQRDFMEQRRFSDIIFHPWKKEENGNQSRVILYTITLTNPLAPKTATVRETQTMYKASQESECYVIDAEVLTHDVPYHDYFYTINRYTLTRVARNKSRLRVSTELRYRKQPWGLVKTFIEKNFWSGLEDYFRHLESELAKTESTYLAEMHRQSPKEKASKTTTVRRRKRPHAHLRVPHLEEVMSPVTTPTDEDVGHRIKHVAGSTQTRHIPEDTPNGFHLQSVSKLLLVISCVLVLLVILNMMLFYKLWMLEYTTQTLTAWQGLRLQERLPQSQTEWAQLLESQQKYHDTELQKWREIIKSSVMLLDQMKDSLINLQNGIRSRDYTSESEEKRNRYH

SEQ ID NO: 40982 - protein, 1311 aa, Homo sapiens
MDSLDHMLTDPLELGPCGDGHGTRIMEDCLLGGTRVSLPEDLLEDPEIFFDVVSLSTWQEVLSDSQREHLQQFLPQFPEDSAEQQNELILALFSGENFRFGNPLHIAQKLFRDGHFNPEVVKYRQLCFKSQYKRYLNSQQQYFHRLLKQILASRSDLLEMARRSGPALPFRQKRPSPSRTPEEREWRTQQRYLKVLREVKEECGDTALSSDEEATLDLQEQFSFEDLSSWLPSSPARSPSPAVPLRVVPTLSTTDMKTADKVELGDSDLKIMLKKHHEKRKHQPDHPDLLTGDLTLNDIMTRVNAGRKGSLAALYDLAVLKKKVKEKEEKKKKKIKTIKSEAEDLAEPLSSTEGVAPLSQAPSPLAIPAIKEEPLEDLKPCLGINEISSSFFSLLLEILLLESQASLPMLEERVLDWQSSPASSLNSWFSAAPNWAELVLPALQYLAGESRAVPSSFSPFVEFKEKTQQWKLLGQSQDNEKELAALFQLWLETKDQAFCKQENEDSSDATTPVPRVRTDYVVRPSTGEEKRVFQEQERYRYSQPHKAFTFRMHGFESVVGPVKGVFDKETSLNKAREHSLLRSDRPAYVTILSLVRDAAARLPNGEGTRAEICELLKDSQFLAPDVTSTQVNTVVSGALDRLHYEKDPCVKYDIGRKLWIYLHRDRSEEEFERIHQAQAAAAKARKALQQKPKPPSKVKSSSKESSIKVLSSGPSEQSQMSLSDSSMPPTPVTPVTPTTPALPAIPISPPPVSAVNKSGPSTVSEPAKSSSGVLLVSSPTMPHLGTMLSPASSQTAPSSQAAARVVSHSGSAGLSQVRVVAQPSLPAVPQQSGGPAQTLPQMPAGPQIRVPATATQTKVVPQTVMATVPVKAQTTAATVQRPGPGQTGLTVTSLPATASPVSKPATSSPGTSAPSASTAAVIQNVTGQNIIKQVAITGQLGVKPQTGNSIPLTATNFRIQGKDVLRLPPSSITTDAKGQTVLRITPDMMATLAKSQVTTVKLTQDLFGTGGNTTGKGISATLHVTSNPVHAADSPAKASSASAPSSTPTGTTVVKVTPDLKPTEASSSAFRLMPALGVSVADQKGKSTVASSEAKPAATIRIVQGLGVMPPKAGQTITVATHAKQGASVASGSGTVHTSAVSLPSMNAAVSKTVAVASGAASTPISISTGAPTVRQVPVSTTVVSTSQAGKLPTRITVPLSVISQPMKGKSVVTAPIIKGNLGANLSGLGRNIILTTMPAGTKLIAGNKPVSFLTAQQLQQLQQQGQATQVRIQTVPASHLQQGTASGSSKAVSTVVVTTAPSPKQAPEQQ

SEQ ID NO: 40983 - protein, 240 aa, Homo sapiens
MVSQPGCAYAILLCTWKKDTGSPPASEGPTDGSRETPAARDVVLHQTSGRIHNKNVSTHLIGNIKQGHGTESSGSGLFALCTLDGTLKLMEEMEEADKLLWSVQVDHQLFALEKLDVTGNGHEEVVACAWDGQTYIIDHNRTVVRFQVDENIRAFCAGLYACKEGRNSPCLVYVTFNQKIYVYWEVQLERMESTNLVKLLETKPEYHSLLQELGVGESQKSQWPECPGDPQHAAGAGRGS

SEQ ID NO: 40984 - protein, 72 aa, Homo sapiens
MGWNWSLSPNPKANSIMWLLTVPHSPVDASQKKTPPAFPESPAAVPPTTTGGPQTQLCIYTASHHSHSTGIT

SEQ ID NO: 40985 - protein, 1887 aa, Homo sapiens
MDALLNNSLPPPHPENEEDPEEDLSETETPKLKKKKKPKKPRDPKIPKSKRQKKELGDSSGEGPEFVEEEEEVALRSDSEGSDYTPGKKKKKKLGPKKEKKSKSKRKEEEEEEDDDDDSKEPKSSAQLLEDWGMEDIDHVFSEEDYRTLTNYKAFSQFVRPLIAAKNPKIAVSKMMMVLGAKWREFSTNNPFKGSSGASVAAAAAAAVAVVESMVTATEVAPPPPPVEVPIRKAKTKEGKGPNARRKPKGSPRVPDAKKPKPKKVAPLKIKLGGFGSKRKRSSSEDDDLDVESDFDDASINSYSVSDGSTSRSSRSRKKLRTTKKKKKGEEEVTAVDGYETDHQDYCEVCQQGGEIILCDTCPRAYHMVCLDPDMEKAPEGKWSCPHCEKEGIQWEAKEDNSEGEEILEEVGGDLEEEDDHHMEFCRVCKDGGELLCCDTCPSSYHIHCLNPPLPEIPNGEWLCPRCTCPALKGKVQKILIWKWGQPPSPTPVPRPPDADPNTPSPKPLEGRPERQFFVKWQGMSYWHCSWVSELQLELHCQVMFRNYQRKNDMDEPPSGDFGGDEEKSRKRKNKDPKFAEMEERFYRYGIKPEWMMIHRILNHSVDKKGHVHYLIKWRDLPYDQASWESEDVEIQDYDLFKQSYWNHRELMRGEEGRPGKKLKKVKLRKLERPPETPTVDPTVKYERQPEYLDATGGTLHPYQMEGLNWLRFSWAQGTDTILADEMGLGKTVQTAVFLYSLYKEGHSKGPFLVSAPLSTIINWEREFEMWAPDMYVVTYVGDKDSRAIIRENEFSFEDNAIRGGKKASRMKKEASVKFHVLLTSYELITIDMAILGSIDWACLIVDEAHRLKNNQSKFFRVLNGYSLQHKLLLTGTPLQNNLEELFHLLNFLTPERFHNLEGFLEEFADIAKEDQIKKLHDMLGPHMLRRLKADVFKNMPSKTELIVRVELSPMQKKYYKYILTRNFEALNARGGGNQVSLLNVVMDLKKCCNHPYLFPVAAMEAPKMPNGMYDGSALIRASGKLLLLQKMLKNLKEGGHRVLIFSQMTKMLDLLEDFLEHEGYKYERIDGGITGNMRQEAIDRFNAPGAQQFCFLLSTRAGGLGINLATADTVIIYDSDWNPHNDIQAFSRAHRIGQNKKVMIYRFVTRASVEERITQVAKKKMMLTHLVVRPGLGSKTGSMSKQELDDILKFGTEELFKDEATDGGGDNKEGEDSSVIHYDDKAIERLLDRNQDETEDTELQGMNEYLSSFKVAQYVVREEEMGEEEEVEREIIKQEESVDPDYWEKLLRHHYEQQQEDLARNLGKGKRIRKQVNYNDGSQEDRDWQDDQSDNQSDYSVASEEGDEDFDERSEAPRRPSRKGLRNDKDKPLPPLLARVGGNIEVLGFNARQRKAFLNAIMRYGMPPQDAFTTQWLVRDLRGKSEKEFKAYVSLFMRHLCEPGADGAETFADGVPREGLSRQHVLTRIGVMSLIRKKVQEFEHVNGRWSMPELAEVEENKKMSQPGSPSPKTPTPSTPGDTQPNTPAPVPPAEDGIKIEENSLKEEESIEGEKEVKSTAPETAIECTQAPAPASEDEKVVVEPPEGEEKVEKAEVKERTEEPMETEPKGAADVEKVEEKSAIDLTPIVVEDKEEKKEEEEKKEVMLQNGETPKDLNDEKQKKNIKQRFMFNIADGGFTELHSLWQNEERAATVTKKTYEIWHRRHDYWLLAGIINHGYARWQDIQNDPRYAILNEPFKGEMNRGNFLEIKNKFLARRFKLLEQALVIEEQLRRAAYLNMSEDPSHPSMALNTRFAEVECLAESHQHLSKESMAGNKPANAVLHKGILKQLEELLSDMKADVTRLPATIARIPPVAVRLQMSERNILSRLANRAPEPTPQQVAQQQ

SEQ ID NO: 40986 - protein, 272 aa, Homo sapiens [sequence omitted]

SEQ ID NO: 40987 - protein, 581 aa, Homo sapiens
MCAPTQDLSRSLPSCLYSCTDWPHRLVPCRVGDQVTHIRIQNSGDFYDLYGGEKFATLTELVEYYTQQQGVLQDRDGTIIHLKYPLNCSDPTSERWYHGHMSGGQAETLLQAKGEPWTFLVRESLSQPGDFVLSVLSDQPKAGPGSPLRVTHIKVMCEGGRYTVGGLETFDSLTDLVEHFKKTGIEEASGAFVYLRQPYYATRVNAADIENRVLELNKKQESEDTAKAGFWEEFESLQKQEVKNLHQRLEGQRPENKGKNRYKNILPFDHSRVILQGRDSNIPGSDYINANYIKNQLLGPDENAKTYIASQGCLEATVNDFWQMAWQENSRVIVMTTREVEKGRNKCVPYWPEVGMQRAYGPYSVTNCGEHDTTEYKLRTLQVSPLDNGDLIREIWHYQYLSWPDHGVPSEPGGVLSFLDQINQRQESLPHAGPIIVHCSAGIGRTGTIIVIDMLMENISTKGLDCDIDIQKTIQMVRAQRSGMVQTEAQYKFIYVAIAQFIETTKKKLEVLQSQKGQESEYGNITYPPAMKNAHAKASRTSSKHKEDVYENLHTKNKREEKVKKQRSADKEKSKGSLKRK

SEQ ID NO: 40988 - protein, 95 aa, Homo sapiens [sequence omitted]

SEQ ID NO: 40989 - protein, 33 aa, Homo sapiens
MCVLAFLTTPLLCISFFQACSKFSSVRPFAGLV

SEQ ID NO: 40990 - protein, 1088 aa, Homo sapiens
MRVSDRQQLEAVYKVKEELLKTDVKLLNGNHENGDLDPTSPLENMDYIKDKEEVNGIEEICFDPEGSKAEWKETPCILSVNVKNKQDDDLNCEPLSPHNITPEPVSKLPAEPVSGDPAPGDLDAGDPASGVLASGDSTSGDPTSSEPSSSDAASGDATSGDAPSGDVSPGDATSGDATADDLSSGDPTSSDPIPGEPVPVEPISGDCAADDIASSEITSVDLASGAPASTDPASDDLASGDLSSSELASDDLATGELASDELTSESTFDRTFEPKSVPVCEPVPEIDNIEPSSNKDDDFLEKNGADEKLEQIQSKDSLDEKNKADNNIDANEETLETDDTTICSDRPPENEKKVEEDIITELALGEDAISSSMEIDQGEKNEDETSADLVETINENVIEDNKSENILENTDSMETDEIIPILEKLAPSEDELTCFSKTSLLPIDETNPDLEEKMESSFGSPSKQESSESLPKEAFLVLSDEEDISGEKDESEVISQNETCSPEVESNEKDNKPEEEEQVIHEDDERPSEKNEFSRRKRSKSEDMDNVQSKRRRYMEEEYEAEFQVKITAKGDINQKLQKVIQWLLEEKLCALQCAVFDKTLAELKTRVEKIECNKRHKTVLTELQAKIARLTKRFEAAKEDLKKRHEHPPNPPVSPGKTVNDVNSNNNMSYRNAGTVRQMLESKRNVSESAPPSFQTPVNTVSSTNLVTPPAVVSSQPKLQTPVTSGSLTATSVLPAPNTATVVATTQVPSGNPQPTISLQPLPVILHVPVAVSSQPQLLQSHPGTLVTNQPSGNVEFISVQSPPTVSGLTKNPVSLPSLPNPTKPNNVPSVPSPSIQRNPTASAAPLGTTLAVQAVPTAHSIVQATRTSLPTVGPSGLYSPSTNRGPIQMKIPISAFSTSSAAEQNSNTTPRIENQTNKTIDASVSKKAADSTSQCGKATGSDSSGVIDLTMDDEESGASQDPKKLNHTPVSTMSSSQPVSRPLQPIQPAPPLQPSGVPTSGPSQTTIHLLPTAPTTVNVTHRPVTQVTTRLPVPRAPANHQVVYTTLPAPPAQAPLRGTVMQAPAVRQVNPQNSKRFFLYMAPRYM

SEQ ID NO: 40991 - protein, 983 aa, Homo sapiens
MDRASDLTDAFVEVKFGNTTFKTDVYLKSLNPQWNSEWFKFEVDDEDLQDEPLQITVLDHDTYSANDAIGKVYIDIDPLLYSEAATVISGWFPIYDTIHGIRGEINVVVKVDLFNDLNRFRQSSCGVKFFCTTSIPKCYRAVIIHGFVEELVVNEDPEYQWIDRIRTPRASNEARQRLISLMSGELQRKIGLKVLEMRGNAVVGYLQCFDLEGESGLVVRAIGTACTLDKLSSPAAFLPACNSPSKEMKEIPFNEDPNPNTHSSGPSTPLKNQTYSFSPSKSYSRQSSSSDTDLSLTPKTGMGSGSAGKEGGPFKALLRQQTQSALEQREFPFFTLTAFPPGFLVHVGGVVSARSVKLLDRIHNPDEPETRDAWWAEIRQEIKSHAKALGCHAVVGYSESTSICEEVCILSASGTAAVLNPRFLQDGTVEGCLEQRLEENLPTRCGFCHIPYDELNMPFPAHLTYCYNCRKQKVPDVLFTTIDLPTDATVIGKGCLIQARLCRLKKKAQAEANATAISNLLPFMEYEVHTQLMNKLKLKGMNALFGLRIQITVGENMLMGLASATGVYLAALPTPGGIQIAGKTPNDGSYEQHISHMQKKINDTIAKNKELYEINPPEISEEIIGSPIPEPRQRSRLLRSQSESSDEVTELDLSHGKKDAFVLEIDDTDAMEDVHSLLTDVPPPSGFYSCNTEIMPGINNWTSEIQMFTSVRVIRLSSLNLTNQALNKNFNDLCENLLKSLYFKLRSMIPCCLCHVNFTVSLPEDELIQVTVTAVAITFDKNQALQTTKTPVEKSLQRASTDNEELLQFPLELCSDSLPSHPFPPAKAMTVEKASPVGDGNFRNRSAPPCANSTVGVVKMTPLSFIPGAKITKYLGIINMFFIRETTSLREEGGVSGFLHAFIAEVFAMVRAHVAALGGNAVVSYIMKQCVFMENPNKNQAQCLINVSGDAVVFVRESDLEVVSSQQPTTNCQSSCTEGEVTT

SEQ ID NO: 40992 - protein, 1034 aa, Homo sapiens
MDRASDLTDAFVEVKFGNTTFKTDVYLKSLNPQWNSEWFKFEVDDEDLQDEPLQITVLDHDTYSANDAIGKVYIDIDPLLYSEAATVISGWFPIYDTIHGIRGEINVVVKVDLFNDLNRFRQSSCGVKFFCTTSIPKCYRAVIIHGFVEELVVNEDPEYQWIDRIRTPRASNEARQRLISLMSGELQRKIGLKVLEMRGNAVVGYLQCFDLEGESGLVVRAIGTACTLDKLSSPAAFLPACNSPSKEMKEIPFNEDPNPNTHSSGPSTPLKNQTYSFSPSKSYSRQSSSSDTDLSLTPKTGMGSGSAGKEGGPFKALLRQQTQSALEQREFPFFTLTAFPPGFLVHVGGVVSARSVKLLDRIHNPDEPETRDAWWAEIRQEIKSHAKALGCHAVVGYSESTSICEEVCILSASGTAAVLNPRFLQDGTVEGCLEQRLEENLPTRCGFCHIPYDELNMPFPAHLTYCYNCRKQKVPDVLFTTIDLPTDATVIGKGCLIQARLCRLKKKAQAEANATAISNLLPFMEYEVHTQLMNKLKLKGMNALFGLRIQITVGENMLMGLASATGVYLAALPTPGGIQIAGKTPNDGSYEQHISHMQKKINDTIAKNKELYEINPPEISEEIIGSPIPEPRQRSRLLRSQSESSDEVTELDLSHGKKDAFVLEIDDTDAMEDVHSLLTDVPPPSGFYSCNTEIMPGINNWTSEIQMFTSVRVIRLSSLNLTNQALNKNFNDLCENLLKSLYFKLRSMIPCCLCHVNFTVSLPEDELIQVTVTAVAITFDKNQALQTTKTPVEKSLQRASTDNEELLQFPLELCSDSLPSHPFPPAKEHLESASSNSGIPAAQRATSVDYSSFADRCSSWIELIKLKAQTIRRGSIKTTMTVEKASPVGDGNFRNRSAPPCANSTVGVVKMTPLSFIPGAKITKYLGIINMFFIRETTSLREEGGVSGFLHAFIAEVFAMVRAHVAALGGNAVVSYIMKQCVFMENPNKNQAQCLINVSGDAVVFVRESDLEVVSSQQPTTNCQSSCTEGEVTT

SEQ ID NO: 40993 - protein, 46 aa, Homo sapiens
MRSQHPRGTAPFLLRQSPRRGRNRDHAREAEGENRGRAPFASDGPC

SEQ ID NO: 40994 - protein, 168 aa, Homo sapiens
MTGTPVLVALGDFLGGPLAPHPYQGEPPSMLRYEEMTERWFPLANNLPPDLVNVRGYGSAILDNYLFIVGGYRITSQEISAAHSYNPSTNEWLQVASMNQKRSNFKLVAVNSKLYAIGGQAVSNVECYNPEQDAWNFVAPLPNPLAEFSACECKGKIYVIGGYTTRGK

SEQ ID NO: 40995 - protein, 713 aa, Homo sapiens
MPSTEPRHCYRRMEEDTDYRIRFSSLCFFNDHVGFHGTIKSSPSDFIVIEIDEQGQLVNKTIDEPIFKISEIQLEPNNFPKKPKLDLQNLSLEDGRNQEVHTLIKYTDGDQNHQSGSEKEDTIVDGTSKCEEKADVLSSFLDEKTHELLNNFACDVREKWLSKTELIGLPPEFSIGRILDKNQRASLHSAIRQKFPFLVTVGKNSEIVVKPNLEYKELCHLVSEEEAFDFFKYLDAKKENSKFTFKPDTNKDHRKAVHHFVNKKFGNLVETKSFSKMNCSAGNPNVVVTVRFREKAHKRGKRPLSECQEGKVIYTAFTLRKENLEMFEAIGFLAIKLGVIPSDFSYAGLKDKKAITYQAMVVRKVTPERLKNIEKEIEKKRMNVFNIRSVDDSLRLGQLKGNHFDIVIRNLKKQINDSANLRERIMEAIENVKKKGFVNYYGPQRFGKGRKVHTDQIGLALLKNEMMKAIKLFLTPEDLDDPVNRAKKYFLQTEDAKGTLSLMPEFKVRERALLEALHRFGMTEEGCIQAWFSLPHSMRIFYVHAYTSKIWNEAVSYRLETYGARVVQGDLVCLDEDIDDENFPNSKIHLVTEEEGSANMYAIHQVVLPVLGYNIQYPKNKVGQWYHDILSRDGLQTCRFKVPTLKLNIPGCYRQILKHPCNLSYQLMEDHDIDVKTKGSHIDETALSLLISFDLDASCYATVCLKEIMKHDV

SEQ ID NO: 40996 - protein, 495 aa, Homo sapiens [sequence omitted]

SEQ ID NO: 40997 - protein, 915 aa, Homo sapiens
MDLRVGQRPPVEPPPEPTLLALQRPQRLHHHLFLAGLQQQRSVEPMRLSMDTPMPELQVGPQEQELRQLLHKDKSKRSAVASSVVKQKLAEVILKKQQAALERTVHPNSPGIPYRTLEPLETEGATRSMLSSFLPPVPSLPSDPPEHFPLRKTVSEPNLKLRYKPKKSLERRKNPLLRKESAPPSLRRRPAETLGDSSPSSSSTPASGCSSPNDSEHGPNPILGSEADSDRRTHPTLGPRGPILGSPHTPLFLPHGLEPEAGGTLPSRLQPILLLDPSGSHAPLLTVPGLGPLPFHFAQSLMTTERLSGSGLHWPLSRTRSEPLPPSATAPPPPGPMQPRLEQLKTHVQVIKRSAKPSEKPRLRQIPSAEDLETDGGGPGQVVDDGLEHRELGHGQPEARGPAPLQQHPQVLLWEQQRLAGRLPRGSTGDTVLLPLAQGGHRPLSRAQSSPAAPASLSAPEPASQARVLSSSETPARTLPFTTGLIYDSVMLKHQCSCGDNSRHPEHAGRIQSIWSRLQERGLRSQCECLRGRKASLEELQSVHSERHVLLYGTNPLSRLKLDNGKLAGLLAQRMFVMLPCGGVGVDTDTIWNELHSSNAARWAAGSVTDLAFKVASRELKNGFAVVRPPGHHADHSTAMGFCFFNSVAIACRQLQQQSKASKILIVDWDVHHGNGTQQTFYQDPSVLYISLHRHDDGNFFPGSGAVDEVGAGSGEGFNVNVAWAGGLDPPMGDPEYLAAFRIVVMPIAREFSPDLVLVSAGFDAAEGHPAPLGGYHVSAKCFGYMTQQLMNLAGGAVVLALEGGHDLTAICDASEACVAALLGNRVDPLSEEGWKQKPNLNAIRSLEAVIRVHSKYWGCMQRLASCPDSWVPRVPGADKEEVEAVTALASLSVGILAEDRPSEQLVEEEEPMNL

SEQ ID NO: 40998 - protein, 465 aa, Homo sapiens
MWVPAVAVLACSLQPRPWGVRTPWVPALTLAPAGLIYDSVMLKHQCSCGDNSRHPEHAGRIQSIWSRLQERGLRSQCECLRGRKASLEELQSVHSERHVLLYGTNPLSRLKLDNGKLAGLLAQRMFVMLPCGGVGVDTDTIWNELHSSNAARWAAGSVTDLAFKVASRELKNGFAVVRPPGHHADHSTAMGFCFFNSVAIACRQLQQQSKASKILIVDWDVHHGNGTQQTFYQDPSVLYISLHRHDDGNFFPGSGAVDEVGAGSGEGFNVNVAWAGGLDPPMGDPEYLAAFRIVVMPIAREFSPDLVLVSAGFDAAEGHPAPLGGYHVSAKCFGYMTQQLMNLAGGAVVLALEGGHDLTAICDASEACVAALLGNRVDPLSEEGWKQKPNLNAIRSLEAVIRVHSKYWGCMQRLASCPDSWVPRVPGADKEEVEAVTALASLSVGILAEDRPSEQLVEEEEPMNL

SEQ ID NO: 40999 - protein, 424 aa, Homo sapiens
MAASTSLPDPGDFDRNVPRICGVCGDRATGFHFNAMTCEGCKGFFRRSMKRKALFTCPFNGDCRITKDNRRHCQACRLKRCVDIGMMKEFILTDEEVQRKREMILKRKEEEALKDSLRPKLSEEQQRIIAILLDAHHKTYDPTYSDFCQFRPPVRVNDGGGSHPSRPNSRHTPSFSGDSSSSCSDHCITSSDMMDSSSFSNLDLSEEDSDDPSVTLELSQLSMLPHLADLVSYSIQKVIGFAKMIPGFRDLTSEDQIVLLKSSAIEVIMLRSNESFTMDDMSWTCGNQDYKYRVSDVTKAGHSLELIEPLIKFQVGLKKLNLHEEEHVLLMAICIVSPDRPGVQDAALIEAIQDRLSNTLQTYIRCRHPPPGSHLLYAKMIQKLADLRSLNEEHSKQYRCLSFQPECSMKLTPLVLEVFGNEIS

SEQ ID NO: 41000 - protein, 106 aa, Homo sapiens
MTLRPSLLPLHLLLLLLLSAAVCRAEAGLETESPVRTLQVETLVEPPEPCAEPAAFGDTLHIHYTGSLVDGRIIDTSLTRDPLVIELGQKQVIPGLEQSLLDMCVG

SEQ ID NO: 41001 - protein, 264 aa, Homo sapiens [sequence omitted]

SEQ ID NO: 41002 - protein, 80 aa, Homo sapiens [sequence omitted]

SEQ ID NO: 41003 - protein, 439 aa, Homo sapiens
METFAPGPRRLYGAAGPGAGLLRRATGGSCFAGLESFAWPQPASLQSVETQSTSSEEMVPSSPSPPPPPRVYKPCFVCNDKSSGYHYGVSSCEGCKGFFRRSIQKNMVYTCHRDKNCIINKVTRNRCQYCRLQKCFEVGMSKEAVRNDRNKKKKEVKEEGSPDSYELSPQLEELITKVSKAHQETFPSLCQLGKYTTNSSADHRVQLDLGLWDKFSELATKCIIKIVEFAKRLPGFTGLSIADQITLLKAACLDILMLRICTRYTPEQDTMTFSDGLTLNRTQMHNAGFGPLTDLVFAFAGQLLPLEMDDTETGLLSAICLICGDRMDLEEPEKVDKLQEPLLEALRLYARRRRPSQPYMFPRMLMKITDLRGISTKGAERAITLKMEIPGPMPPLIREMLENPEMFEDDSSQPGPHPNASSEDEVPGGQGKGGLKSPA

SEQ ID NO: 41004 - protein, 301 aa, Homo sapiens
MDTGVIEGGLNVTLTIRLLMHGKEVGSIIGKKGESVKKMREESGARINISEGNCPERIITLAGPTNAIFKAFAMIIDKLEEDISSSMTNSTAASRPPVTLRLVVPASQCGSLIGKGGCKIKEIRESTGAQVQVAGDMLPNSTERAITIAGIPQSIIECVKQICVVMLESPPKGVTIPYRPKPSSSPVIFAGGQDRYSTGSDSASFPHTTPSMCLNPDLEGPPLEAYTIQGQYAIPQPDLTKLHQLAMQQSHFPMTHGNTGFSGMDTSVFISVRCSARERPVPRSQLDICLKQTSLSSILLV

SEQ ID NO: 41005 - protein, 451 aa, Homo sapiens
MTLKFGPARTDSVIIADQTPTPTRFLKNCEEVGLFNELASSFEHEFKKAADEDEKKAAAGPLDMSLPSTPDIKIKEEEPVEVDSSPPDSPASSPCSPPLKEKEVTPKPVLISTPTPTIVRPGSLPLHLGYDPLHPTLPSPTSVITQAPPSNRQMGSPTGSLPLVMHLANGQTMPVLPGPPVQMPSVISLARPVSMVPNIPGIPGPPVNSSGSISPSGHPIPSEAKMRLKATLTHQVSSINGGCGMVVGTASTMVTARPEQSQILIQHPDAPSPAQPQVSPAQPTPSTGGRRRRTVDEDPDERRQRFLERNRAAASRCRQKRKLWVSSLEKKAEELTSQNIQLSNEVTLLRNEVAQLKQLLLAHKDCPVTALQKKTQGYLESPKESSEPTGSPAPVIQHSSATAPSNGLSVRSAAEAVATSVLTQMASQRTELSMPIQSHVIMTPQSQSAGR

SEQ ID NO: 41006 - protein, 85 aa, Homo sapiens [sequence omitted]

SEQ ID NO: 41007 - protein, 15 aa, Homo sapiens
MATETVELHKLKSTS

SEQ ID NO: 41008 - protein, 137 aa, Homo sapiens [sequence omitted]

SEQ ID NO: 41009 - protein, 32 aa, Homo sapiens
MGSFRINPDGSQSVVEVTVTVPPNKVAHSGFG

SEQ ID NO: 41010 - protein, 7 aa, Homo sapiens
MGPGSAR

SEQ ID NO: 41011 - protein, 65 aa, Homo sapiens [sequence omitted]

SEQ ID NO: 41012 - protein, 693 aa, Homo sapiens
MDTFPNNFPPGGDSGLTGSQSEFQKMLIDERLRCEHHKANYQTLKAEHTRLQNEHVKLQNELKHLFNEKQTQQEKLQLLLEELRGELVEKTKDLEEMKLQILTPQKLELLRAQIQQELETPMRERFRNLDEEVEKYRAVYNKLRYEHTFLKSEFEHQKEEYARILDEGKIKYESEIARLEEDKEELRNQLLNVDLTKDSKRVEQLAREKVYLCQKLKGLEAEVAELKAEKENSEAQVENAQRIQVRQLAEMQATVRSLEAEKQSANLRAERLEKELQSSSEQNTFLINKLHKAEREINTLSSKVKELKHSNKLEITDIKLETARAKSELERERNKIQSELDGLQSDNEILKAAVEHHKVLLVEKDRELIRKVQAAKEEGYQKLVVLQDEKLELENRLADLEKMKVEHDVWRQSEKDQYEEKLRASQMAEEITRKELQSVRLKLQQQIVTIENAEKEKNENSDLKQQISSLQIQVTSLAQSENDLLNSNQMLKEMVERLKQECRNFRSQAEKAQLEAEKTLEEKQIQWLEEKHKLHERITDREEKYNQAKEKLQRAAIAQKKRKSLHENKLKRLQEKVEVLEAKKEELETENQVLNRQNVPFEDYTRLQKRLKDIQRRHNEFRSLILVPNMPPTASINPVSFQSSAMVPSMELPFPPHMQEEQHQRELSLLRKRLEELETTQRKQLEELGSSGE

SEQ ID NO: 41013 - protein, 621 aa, Homo sapiens
MLPTWWIVSSWLVWGVILFVYLVIRALRLWRTAKLQVTLKKYSVHLEDMATNSRAFTNLVRKALRLIQETEVISRGFTLVSAACPFNKAGQHPSQHLIGLRKAVYRTLRANFQAARLATLYMLKNYPLNSESDNVTNYICVVPFKELGLGLSEEQISEEEAHNFTDGFSLPALKVLFQLWVAQSSEFFRRLALLLSTANSPPGPLLTPALLPHRILSDVTQGLPHAHSACLEELKRSYEFYRYFETQHQSVPQCLSKTQQKSRELNNVHTAVRSLQLHLKALLNEVIILEDELEKLVCTKETQELVSEAYPILEQKLKLIQPHVQASNNCWEEAISQVDKLLRRNTDKKGKPEIACENPHCTVVPLKQPTLHIADKDPIPEEQELEAYVDDIDIDSDFRKDDFYYLSQEDKERQKREHEESKRVLQELKSVLGFKASEAERQKWKQLLFSDHAVLKSLSPVDPVEPISNSEPSMNSDMGKVSKNDTEEESNKSATTDNEISRTEYLCENSLEGKNKDNSSNEVFPQGAEERMCYQCESEDEPQADGSGLTTAPPTPRDSLQPSIKQRLARLQLSPDFTFTAGLAAEVAARSLSFTTMQEQTFGGEEEEQIIEENKNEIEEK

SEQ ID NO: 41014 - protein, 1416 aa, Homo sapiens
MLDLPTWLAINKVFCNKASIRIPWTKLKTHPICLSLDKVIMEMSTCEEPRSPNGPSPIATASGQSEYGFAEKVVEGISVSVNSIVIRIGAKAFNASFELSQLRIYSVNAHWEHGDLRFTRIQDPQRGEVLTFKEINWQMIRIEADATQSSHLEIMCAPVRLITNQSKIRVTLKRRLKDCNVIATKLVLILDDLLWVLTDSQLKAMVQYAKSLSEAIEKSTEQRKSMAPEPTQSSTVVASAQQVKTTQTSNAPDVNDAIVKLFNDFDVKETSHHLVISHLDLHICDDIHAKEKESNRRITGGAMQLSFTQLTIDYYPYHKAGDSCNHWMYFSDATKTKNGWANELLHEFECNVEMLKQAVKDHNVGSPPKSPTHASPQHTQTEKDYPLKGTCRTPSVLSQQSKAKLMSSSVVVRLADFNIYQVSTAEQCRSSPKSMICCNKKSLYLPQEMSAVYIEFTEYYYPDGKDFPIPSPNLYSQLNALQFTVDERSILWLNQFLLDLKQSLNQFMAVYKLNDNSKSDEHVDVRVDGLMLKFVIPSEVKSECHQDQPRAISIQSSEMIATNTRHCPNCRHSDLEALFQDFKDCDFFSKTYTSFPKSCDNFNLLHPIFQRHAHEQDTKMHEIYKGNITPQLNKNTLKTSAATDVWAVYFSQFWIDYEGMKSGKGRPISFVDSFPLSIWICQPTRYAESQKEPQTCNQVSLNTSQSESSDLAGRLKRKKLLKEYYSTESEPLTNGGQKPSSSDTFFRFSPSSSEADIHLLVHVHKHVSMQINHYQYLLLLFLHESLILLSENLRKDVEAVTGSPASQTSICIGILLRSAELALLLHPVDQANTLKSPVSESVSPVVPDYLPTENGDFLSSKRKQISRDINRIRSVTVNHMSDNRSMSVDLSHIPLKDPLLFKSASDTNLQKGISFMDYLSDKHLGKISEDESSGLVYKSGSGEIGSETSDKKDSFYTDSSSILNYREDSNILSFDSDGNQNILSSTLTSKGNETIESIFKAEDLLPEAASLSENLDISKEETPPVRTLKSQSSLSGKPKERCPPNLAPLCVSYKNMKRSSSQMSLDTISLDSMILEEQLLESDGSDSHMFLEKGNKKNSTTNYRGTAESVNAGANLQNYGETSPDAISTNSEGAQENHDDLMSVVVFKITGVNGEIDIRGEDTEICLQVNQVTPDQLGNISLRHYLCNRPVGSDQKAVIHSKSSPEISLRFESGPGAVIHSLLAEKNGFLQCHIENFSTEFLTSSLMNIQHFLEDETVATVMPMKIQVSNTKINLKDDSPRSSTVSLEPAPVTVHIDHLVVERSDDGSFHIRDSHMLNTGNDLKENVKSDSVLLTSGKYDLKKQRSVTQATQTSPGVPWPSQSANFPEFSFDFTREQLMEENESLKQELAKAKMALAEAHLEKDALLHHIKKMTVE

SEQ ID NO: 41015 - protein, 259 aa, Homo sapiens [sequence omitted]

SEQ ID NO: 41016 - protein, 529 aa, Homo sapiens
MVPVIYQKNQEDRHKKANGIWQDGLSTAVQTFSNRSEQHMEYHSFSEQSFHANNGHASSSCSQKYDDYANYNYCDGRETSETTAMLQDEDISSDGDEDAIVEVTPKLPKESSGIMALQILVPFLLAGFGTVSAGMVLDIVQHWEVFRKVTEVFILVPALLGLKGNLEMTLASRLSTAVNIGKMDSPIEKWNLIIGNLALKQVQATVVGFLAAVAAIILGWIPEGKYYLDHSILLCSSSVATAFIASLLQGIIMVGVIVGSKKTGINPDNVATPIAASFGDLITLAILAWISQGLYSCLETYYYISPLVGVFFLALTPIWIIIAAKHPATRTVLHSGWEPVITAMVISSIGGLILDTTVSDPNLVGIVVYTPVINGIGGNLVAIQASRISTYLHLHSIPGELPDEPKGCYYPFRTFFGPGVNNKSAQVLLLLVIPGHLIFLYTIHLMKSGHTSLTIIFIVVYLFGAVLQVFTLLWIADWMVHHFWRKGKDPDSFSIPYLTALGDLLGTALLALSFHFLWLIGDRDGDVGD

SEQ ID NO: 41017 - protein, 416 aa, Homo sapiens
MAGAMPLQLLLLLILLGPGNSLQLWDTWADEAEKALGPLLARDRRQATEYEYLDYDFLPETEPPEMLRNSTDTTPLTGPGTPESTTVEPAARRSTGLDAGGAVTELTTELANMGNLSTDSAAMEIQTTQPAATEAQTTQPVPTEAQTTPLAATEAQTTRLTATEAQTTPLAATEAQTTPPAATEAQTTQPTGLEAQTTAPAAMEAQTTAPAAMEAQTTPPAAMEAQTTQTTAMEAQTTAPEATEAQTTQPTATEAQTTPLAAMEALSTEPSATEALSMEPTTKRGLFIPFSVSSVTHKGIPMAASNLSVNYPVGAPDHISVKQCLLAILILALVATIFFVCTVVLAVRLSRKGHMYPVRNYSPTEMVCISSLLPDGGEGPSATANGGLSKAKSPGLTPEPREDREGDDLTLHSFLP

SEQ ID NO: 41018 - protein, 962 aa, Homo sapiens
MDAENEPKVWYVSLACSKDLTLLWIQQIKNILWYCCDFLKQLKPEILQDSRLITLYLTMLVTFTDTSTWKILRGKGESLRPAMNHICANIMGHLNQHGFYSVLQILLTRGLARPRPCLSKGTLTAAFSLALRPVIAAQFSDNLIRPFLIHIMSVPALVTHLSTVTPERLTVLESHDMLRKFIIFLRDQDRCRDVCESLEGCHTLCLMGNLLHLGSLSPRVLEEETDGFVSLLTQTLCYCRKYVSQKKSNLTHWHPVLGWFSQSVDYGLNESMHLITKQLQFLWGVPLIRIFFCDILSKKLLESQEPAHAQPASPQNVLPVKSLLKRAFQKSASVRNILRPVGGKRVDSAEVQKVCNICVLYQTSLTTLTQIRLQILTGLTYLDDLLPKLWAFICELGPHGGLKLFLECLNNDTEESKQLLAMLMLFCDCSRHLITILDDIEVYEEQISFKLEELVTISSFLNSFVFKMIWDGIVENAKGETLELFQSVHGWLMVLYERDCRRRFTPEDHWLRKDLKPSVLFQELDRDRKRAQLILQYIPHVIPHKNRVLLFRTMVTKEKEKLGLVETSSASPHVTHITIRRSRMLEDGYEQLRQLSQHAMKGVIRVKFVNDLGVDEAGIDQDGVFKEFLEEIIKRVFDPALNLFKTTSGDERLYPSPTSYIHENYLQLFEFVGKMLGKAVYEGIVVDVPFASFFLSQLLGHHHSVFYSSVDELPSLDSEFYKNLTSIKRYDGDITDLGLTLSYDEDVMGQLVCHELIPGGKTIPVTNENKISYIHLMAHFRMHTQIKNQTAALISGFRSIIKPEWIRMFSTPELQRLISGDNAEIDLEDLKKHTVYYGGFHGSHRVIIWLWDILASDFTPDERAMFLKFVTSCSRPPLLGFAYLKPPFSIRCVEVSDDQDTGDTLGSVLRGFFTIRKREPGGRLPTSSTCFNLLKLPNYSKKSVLREKLRYAISMNTGFELS

SEQ ID NO: 41019 - protein, 944 aa, Homo sapiens
MAIQQADKLLKKHKDLHCAKVLKAIGLQRTGKQEEAFTLAQEVAALEPTDDNSLQALTILYREMHRPELVTKLYEAAVKKVPNSEEYHSHLFMAYARVGEYKKMQQAGMALYKIVPKNPYYFWSVMSLIMQSISAQDENLSKTMFLPLAERMVEKMVKEDKIEAEAEVELYYMILERLGKYQEALDVIRGKLGEKLTSEIQSRENKCMAMYKKLSRWPECNALSRRLLLKNSDDWQFYLTYFDSVFRLIEEAWSPPAEGEHSLEGEVHYSAEKAVKFIEDRITEESKSSRHLRGPHLAKLELIRRLRSQGCNDEYKLGDPEELMFQYFKKFGDKPCCFTDLKVFVDLLPATQCTKFINQLLGVVPLSTPTEDKLALPADIRALQQHLCVVQLTRLLGLYHTMDKNQKLSVVRELMLRYQHGLEFGKTCLKTELQFSDYYCLLAVHALIDVWRETGDETTVWQALTLLEEGLTHSPSNAQFKLLLVRIYCMLGAFEPVVDLYSSLDAKHIQHDTIGYLLTRYAESLGQYAAASQSCNFALRFFHSNQKDTSEYIIQAYKYGAFEKIPEFIAFRNRLNNSLHFAQVRTERMLLDLLLEANISTSLAESIKSMNLRPEEDDIPWEDLRDNRDLNVFFSWDPKDRDVSEEHKKLSLEEETLWLRIRSLTLRLISGLPSLNHPVEPKNSEKTAENGVSSRIDILRLLLQQLEATLETGKRFIEKDIQYPFLGPVPTRMGGFFNSGCSQCQISSFYLVNDIYELDTSGLEDTMEIQERIENSFKSLLDQLKDVFSKCKGDLLEVKDGNLKTHPTLLENLVFFVETISVILWVSSYCESVLRPYKLNLQKKKKKKKETSIIMPPVFTSFQDYVTGLQTLISNVVDHIKGLETHLIALKLEELILEDTSLSPEERKFSKTVQGKVQSSYLHSLLEMGELLKKRLETTKKLKI

SEQ ID NO: 41020 - protein, 712 aa, Homo sapiens
MLWTCSNDYIDQWCNPGNQAFHYVCQRLGVSHIITEPKEEAITTNEVINQLLHHVGAMCIHQLNLLATNPNLPITSVLGKQHPIEAHHLSSICDIMEKAMVNGDTCIIRCILVVFQVVFKFFFSPQTERNRDIIRRSGLLLWQLLMAPKDQICPEIQKEVCLAISSGLNILYPGETEINNLLKLVLTEGERNSGLSQLRDVILTNLAEQLQNNRFGSDEDDHYRLNDELLHYILKIVVRESCILITKCQTVSKDDFQKLLSTVPAASSCLRYLMAVQNHLLSNTILIKPDENDDSDSSLQGETLKVQELKVSILALATQILTGCDEVLEMLQQVTTALINSDIADREQRLKGLEQVTKATMLGHLLPVLLTSLMHPNLQTLIMADALMPQLVQLVLYTSQTALLLKTQCPVFAEVGCSPCGAPDQKCRLFPDERMLEEKEEPGFLTGLKIPAPWAAGKTVETVHPVRDNYKFKETVHIPGARCLYLRFDSRCSSQYDYDKLVIYAGPNTNSRKVAEYGGNTLGYGSRSVLGTGWPKDLVKVEGDTVTFSFEMRSGREHNTPDKAMWGFACTVRAQESSEDVSGGLPFLVDLALGLSVLACSMLRILYNGPEITKEEEACQELLRSKLLQRCQWQVEANGVISPALTPSPSPLPLTIEEDREFTYPSDVLVPPVGNYFDLPRIRLPPGIMIKLREISGRARPQFRPSIKYVAV

SEQ ID NO: 41021 - protein, 211 aa, Homo sapiens
MPREDRATWKSNYFLKIIQLLDDYPKCFIVGADNVGSKQMQQIRMSLRGKAVVLMGKNTMMRKAIRGHLENNPALEKLLPHIRGNVGFVFTKEDLTEIRDMLLANKVRGQLGWLKRLCCCSLKQNGPFSGCVSGEAFLTVCCLCQVPAAARAGAIAPCEVTVPAQNTGLGPEKTSFFQALGITTKISRGTIEILVSGPGLPVLTRQMGSCF

SEQ ID NO: 41022 - protein, 312 aa, Homo sapiens [sequence omitted]

SEQ ID NO: 41023 - protein, 86 aa, Homo sapiens
MKAENRCRRRPPPALNAMSLGPRRARSAPTAVAAEAPVDAAELPQRRRHRLRHGQEQRLQQLLRLFGQQQRATAAPLRLGGASRRV

SEQ ID NO: 41024 - protein, 837 aa, Homo sapiens [sequence omitted]

SEQ ID NO: 41025 - protein, 315 aa, Homo sapiens
MPRPARKFRRLVALRGRYSLCPKPRPLSPCLPNPDCFLGWGRGYGARRSQVEAVPRSALTKLRHFRRVRLASARCTMAALKSWLSRSVTSFFRYRQCLCVPVVANFKKRCFSELIRPWHKTVTIGFGVTLCAVPIAQKSEPHSLSSEALMRRAVSLVTDSTSTFLSQTTYALIEAITEYTKAVYTLTSLYRQYTSLLGKMNSEEEDEVWQVIIGARAEMTSKHQEYLKLETTWMTAVGLSEMAAEAAYQTGADQASITARNHIQLVKLQVEEVHQLSRKAETKLAEAQIEELRQKTQEEGEERAESEQEAYLRED

SEQ ID NO: 41026 - protein, 479 aa, Homo sapiens
MVPSLIKQQVLKNVRIDPSSLSFNMWKEIPIPFYLSVYFFDVMNPSEILKGEKPQVRERGPYVYREFRHKSNITFNNNDTVSFLEYRTFQFQPSKSHGSESDYIVMPNILVLGAAVMMENKPMTLKLIMTLAFTTLGERAFMNRTVGEIMWGYKDPLVNLINKYFPGMFPFKDKFGLFAELNNSDSGLFTVFTGVQNISRIHLVDKWNGLSKVDFWHSDQCNMINGTSGQMWPPFMTPESSLEFYSPEACRSMKLMYKESGVFEGIPTYRFVAPKTLFANGSIYPPNEGFCPCLESGIQNVSTCRFSAPLFLSHPHFLNADPVLAEAVTGLHPNQEAHSLFLDIHPVTGIPMNCSVKLQLSLYMKSVAGIGQTGKIEPVVLPLLWFAESGAMEGETLHTFYTQLVLMPKVMHYAQYVLLALGCVLLLVPVICQIRSQEKCYLFWSSSKKGSKDKEAIQAYSESLMTSAPKGSVLQEAKL

SEQ ID NO: 41027 - protein, 207 aa, Homo sapiens
MKPVETHSLQMLHTILSTGSPLKAQSYEYVYRCIKSSILLGSISGGTDIISCFMGHNFSLPVYKGEIQARNLGMAVEAWNEEGKAVWGESGELVCTKPIPCQPTHFWNDENGNKYRKAYFSKFPGIWAHGDYCRINPKTGGIVMLGRSDGTLNPNGVRFGSSEIYNIVYAQRQESGSCRQTDHRWKSRGARRCFLEPRDPGSVPGHP

SEQ ID NO: 41028 - protein, 260 aa, Homo sapiens
MDDFFHQVEEIRNSIDKITQYVEEVKKNHSIILSAPNPEGKIKEELEDLNKEIKKTANKIRAKLKAIEQSFDQDESGNRTSVDLRIRRTQHSVLSRKFVEAMAEYNEAQTLFRERSKGRIQRQLEITGRTTTDDELEEMLESGKPSIFTSDIISDSQITRQALNEIESRHKDIMKLETSIRELHEMFMDMAMFVETQGEMINNIERNVMNATDYVEHAKEETKKAIKYQSKARRKKWIIIAVSVVLVAIIALIIGLSVGK

SEQ ID NO: 41029 - protein, 236 aa, Homo sapiens
MGCGAARALASVLCLRRNAAMAAQGEPQVQFKLVLVGDGGTGKTTFVKRHLTGEFEKKYVATLGVEVHPLVFHTNRGPIKFNVWDTAGQEKFGGLRDGYYIQAQCAIIMFDVTSRVTYKNVPNWHRDLVRVCENIPIVLCGNKVDIKDRKVKAKSIVFHRKKNLQYYDISAKSNYNFEKPFLWLARKLIGDPNLEFVAMPALAPPEVVMDPALAAQYEHDLEVAQTTALPDEDDDL

SEQ ID NO: 41030 - protein, 440 aa, Homo sapiens
MEQEPQNGEPAEIKIIREAYKKAFLFVNKGLNTDELGQKEEAKNYYKQGIGHLLRGISISSKESEHTGPGWESARQMQQKMKETLQNVRTRLEILEKGLATSLQNDLQEVPKLYPEFPPKDMCEKLPEPQSFSSAPQHAEVNGNTSTPSAGAVAAPASLSLPSQSCPAEAPPAYTPQAAEGHYTVSYGTDSGEFSSVGEEFYRNHSQPPPLETLGLDADELILIPNGVQIFFVNPAGEVSAPSYPGYLRIVRFLDNSLDTVLNRPPGFLQVCDWLYPLVPDRSPVLKCTAGAYMFPDTMLQAAGCFVGVVLSSELPEDDRELFEDLLRQMSDLRLQANWNRAEEENEFQIPGRTRPSSDQLKEASGTDVKQLDQGNKDVRHKGKRGKRAKDTSSEEVNLSHIVPCEPVPEEKPKELPEWSEKVAHNILSGITVMLIFFPV

SEQ ID NO: 41031 - protein, 134 aa, Homo sapiens
MDLGVYQLRHFSISFLSSLLGTENASVRLDNSSSGASVVAIDNKIEQAMDLVKSHLMYAVREEVEVLKEQIKELIEKNSQLEQENNLLKTLASPEQLAQFQAQLQTGSPPATTQPQGTTQPPAQPASQGSGPTA

SEQ ID NO: 41032 - protein, 191 aa, Homo sapiens
MPAKGPVNYNVTTEFEKRAQRMKEKLTKGDDDSSKPIVRESWMTELPPEMKDFGLGPRTFKRRADDTSGDRSIWTDTPADRERKAKETQEARKSSSKKDEEHILSGRDKRLAEQVSSYNESKRSESLMDIHHKKLKSKAAEDKNKPQERIPFDRDKDLKVNRFDEAQKKALIKKSRELNTRFSHGKGNMFL

SEQ ID NO: 41033 - protein, 80 aa, Homo sapiens
MHFLQITLCVCELYGCWMTFLPEWLTRSPNLNTSNWLYCWLYLFFFNGVWVLIPGLLLWQSWLELKKMHQKETSSVKKFQ

SEQ ID NO: 41034 - protein, 277 aa, Homo sapiens [sequence omitted]

SEQ ID NO: 41035 - protein, 372 aa, Homo sapiens [sequence omitted]

SEQ ID NO: 41036 - protein, 173 aa, Homo sapiens [sequence omitted]

SEQ ID NO: 41037 - protein, 337 aa, Homo sapiens
MNQTEHNLTVSQIPSPQTWHVFYADKYTCQDDKENSQVEDIPFEMVLLNPDAEGNPFDHFSAGESGLHEFFFLLVLVYFVIACIYAQSLWQAIKKGGPMHMILKVLTTALLLQAGSALANYIHFSSYSKDGIGVPFMGSLAEFFDIASQIQMLYLLLSLCMGWTIVRMKKSQSRPLQWDSTPASTGIAVFIVMTQSVLLLWEQFEDISHHSYHSHHNLAGILLIVLRICLALSLGCGLYQIITVERSTLKREFYITFAKGCILWFLCHPVLACISVIFSDYQRDKVITIGVILCQSVSMVILYRLFLSHSLYWEVSSLSSVTLPLTISSGHKSRPHF

SEQ ID NO: 41038 - protein, 1000 aa, Homo sapiens [sequence omitted]

SEQ ID NO: 41039 - protein, 634 aa, Homo sapiens
MQSRQWVRDSCRKLSGLLRQKNAVLNKLKTAIGAVEKDVGLSDEEKLFQVHTFEIFQKELNESENSVFQAVYGLQRALQGDYKDVVNMKESSRQRLEALREAAIKEETEYMELLAAEKHQVEALKNMQHQNQSLSMLDEILEDVRKAADRLEEEIEEHAFDDNKSVKGVNFEAVLRVEEEEANSKQNITKREVEDDLGLSMLIDSQNNQYILTKPRDSTIPRADHHFIKDIVTIGMLSLPCGWLCTAIGLPTMFGYIICGVLLGPSGLNSIKSIVQVETLGEFGVFFTLFLVGLEFSPEKLRKVWKISLQGPCYMTLLMIAFGLLWGHLLRIKPTQSVFISTCLSLSSTPLVSRFLMGSARGDKEGDIDYSTVLLGMLVTQDVQLGLFMAVMPTLIQAGASASSSIVVEVLRILVLIGQILFSLAAVFLLCLVIKKYLIGPYYRKLHMESKGNKEILILGISAFIFLMLTVTELLDVSMELGCFLAGALVSSQGPVVTEEIATSIEPIRDFLAIVFFASIGLHVFPTFVAYELTVLVFLTLSVVVMKFLLAALVLSLILPRSSQYIKWIVSAGLAQVSEFSFVLGSRARRAGVISREVYLLILSVTTLSLLLAPVLWRAAITRCVPRPERRSSL

SEQ ID NO: 41040 - protein, 113 aa, Homo sapiens
MLIDSQNNQYILTKPRDSTIPRADHHFIKDIVTIGMLSLPCGWLCTAIGLPTMFGYIICGVLLGPSGLNSIKSIVQVETLGEFGVFFTLFLVGLEFSPEKLRKVRTSSTCYCS

SEQ ID NO: 41041 - protein, 21 aa, Homo sapiens
MGWCLLTFSLSLPTVLIDNFK

SEQ ID NO: 41042 - protein, 145 aa, Homo sapiens
MGLGVLLLVFVLGLGLTPPTLAQDNSRYTHFLTQHYDAKPQGRDDRYCESIMRRRGLTSPCKDINTFIHGNKRSIKAICENKNGNPHRENLRISKSSFQVTTCKLHGGSPWPPCQYRATAGFRNVVVACENGLPVHLDQSIFRRP

SEQ ID NO: 41043 - protein, 155 aa, Homo sapiens
MVLVFLLVGFVAVILMRVLRNDLARYNLDEETTSAGSGDDFDQGDNGWKIIHTDVFRFPPYRGLLCAVLGVGAQFLALGTGIIVMALLGMFNVHRHGAINSAAILLYALTCCISGYVSSHFYRQIGGERWVWNIILTTSLFSGEDFPFPGGPFWT

SEQ ID NO: 41044 - protein, 1501 aa, Homo sapiens
MAKNKEPRPPSYTISIVGLSGTEKDKGNCGVGKSCLCNRFVRSKADEYYPEHTSVLSTIDFGGRVVNNDHFLYWGDIIQNSEDGVECKIHVIEQTEFIDDQTFLPHRSTNLQPYIKRAAASKLQSAEKLMYICTDQLGLEQDFEQKQMPEGKLNVDGFLLCIDVSQGCNRKFDDQLKFVNNLFVQLSKSKKPVIIAATKCDECVDHYLREVQAFASNKKNLLVVETSARFNVNIETCFTALVQMLDKTRSKPKIIPYLDAYKTQRQLVVTATDKFEKLVQTVRDYHATWKTVSNKLKNHPDYEEYINLEGTRKARNTFSKHIEQLKQEHIRKRREEYINTLPRAFNTLLPNLEEIEHLNWSEALKLMEKRADFQLCFVVLEKTPWDETDHIDKINDRRIPFDLLSTLEAEKVYQNHVQHLISEKRRVEMKEKFKKTLEKIQFISPGQPWEEVMCFVMEDEAYKYITEADSKEVYGRHQREIVEKAKEEFQEMLFEHSELFYDLDLNATPSSDKMSEIHTVLSEEPRYKALQKLAPDRESLLLKHIGFVYHPTKETCLSGQNCTDIKVEQLLASSLLQLDHGRLRLYHDSTNIDKVNLFILGKDGLAQELANEIRTQSTDDEYALDGKIYELDLRPVDAKSPYFLSQLWTAAFKPHGCFCVFNSIESLSFIGEFIGKIRTEASQIRKDKYMANLPFTLILANQRDSISKNLPILRHQGQQLANKLQCPFVDVPAGTYPRKFNETQIKQALRGVLESVKHNLDVVSPIPANKDLSEADLRIVMCAMCGDPFSVDLILSPFLDSHSCSAAQAGQNNSLMLDKIIGEKRRRIQITILSYHSSIGVRKDELVHGYILVYSAKRKASMGMLRAFLSEVQDTIPVQLVAVTDSQADFFENEAIKELMTEGEHIATEITAKFTALYSLSQYHRQTEVFTLFFSDVLEKKNMIENSYLSDNTRESTHQSEDVFLPSPRDCFPYNNYPDSDDDTEAPPPYSPIGDDVQLLPTPSDRSRYRLDLEGNEYPIHSTPNCHDHERNHKVPPPIKPKPVVPKTNVKKLDPNLLKTIEAGIGKNPRKQTSRVPLAHPEDMDPSDNYAEPIDTIFKQKGYSDEIYVVPDDSQNRIKIRNSFVNNTQGDEENGFSDRTSKSHGERRPSKYKYKSKTLFSKAKSYYRRTHSDASDDEAFTTSKTKRKGRHRGSEEDPLLSPVETWKGGIDNPAITSDQELDDKKMKKKTHKVKEDKKQKKKTKNFNPPTRRNWESNYFGMPLQDLVTAEKPIPLFVEKCVEFIEDTGLCTEGLYRVSGNKTDQDNIQKQFDQDHNINLVSMEVTVNAVAGALKAFFADLPDPLIPYSLHPELLEAAKIPDKTERLHALKEIVKKFHPVNYDVFRYVITHLNRVSQQHKINLMTADNLSICFWPTLMRPDFENREFLSTTKIHQSVVETFIQQCQFFFYNGEIVETTNIVAPPPPSNPGQLVEPMVPLQLPPPLQPQLIQPQLQTDPLGII

SEQ ID NO: 41045 - protein, 1891 aa, Homo sapiens
MGIPQSHMAEMTGSTQASTRKEIWCSKRVLFLTPQVMVNDLSRGACPAAEIKCLVIDEAHKALGNYAYCQVVRELVKYTNHFRILALSATPGSDIKAVQQVITNLLIGQIELRSEDSPDILTYSHERKVEKLIVPLGEELAAIQKTYIQILESFARSLIQRNVLMRRDIPNLTKYQIILARDQFRKNPSPNIVGIQQGIIEGEFAICISLYHGYELLQQMGMRSLYFFLCGIMDGTKGMTRSKNELGRNEDFMKLYNHLECMFARTRSTSANGISAIQQGDKNKKFVYSHPKLKKLEEVVIEHFKSWNAENTTEKKRDETRVMIFSSFRDSVQEIAEMLSQHQPIIRVMTFVGHASGKSTKGFTQKEQLEVVKQFRDGGYNTLVSTCVGEEGLDIGEVDLIICFDSQKSPIRLVQRMGRTGRKRQGRIVIILSEGREERIYNQSQSNKRSIYKAISSNRQVLHFYQRSPRMVPDGINPKLHKMFITHGVYEPEKPSRNLQRKSSIFSYRDGMRQSSLKKDWFLSEEEFKLWNRLYRLRDSDEIKEITLPQVQFSSLQNEENKPAQESTTGIHQLSLSEWRLWQDHPLPTHQVDHSDRCRHFIGLMQMIEGMRHEEGECSYELEVESYLQMEDVTSTFIAPRNESNNLASDTFITHKKSSFIKNINQGSSSSVIESDEECAEIVKQTHIKPTKIVSLKKKVSKEIKKDQLKKENNHGIIDSVDNDRNSTVENIFQEDLPNDKRTSDTDEIAATCTINENVIKEPCVLLTECQFTNKSTSSLAGNVLDSGYNSFNDEKSVSSNLFLPFEEELYIVRTDDQFYNCHSLTKEVLANVERFLSYSPPPLSGLSDLEYEIAKGTALENLLFLPCAEHLRSDKCTCLLSHSAVNSQQNLELNSLKCINYPSEKSCLYDIPNDNISDEPSLCDCDVHKHNQNENLVPNNRVQIHRSPAQNLVGENNHDVDNSDLPVLSTDQDESLLLFEDVNTEFDDVSLSPLNSKSESLPVSDKTAISETPLVSQFLISDELLLDNNSELQDQITRDANSFKSRDQRGVQEEKVKNHEDIFDCSRDLFSVTFDLGFCSPDSDDEILEHTSDSNRPLDDLYGRYLEIKEISDANYVSNQALIPRDHSKNFTSGTVIIPSNEDMQNPNYVHLPLSAAKNEELLSPGYSQFSLPVQKKVMSTPLSKSNTLNSFSKIRKEILKTPDSSKEKVNLQRFKEALNSTFDYSEFSLEKSKSSGPMYLHKSCHSVEDGQLLTSNESEDDEIFRRKVKRAKGNVLNSPEDQKNSEVDSPLHAVKKRRFPINRSELSSSDESENFPKPCSQLEDFKVCNGNARRGIKVPKRQSHLKHVARKFLDDEAELSEEDAEYVSSDENDESENEQDSSLLDFLNDETQLSQAINDSEMRAIYMKSLRSPMMNNKYKMIHKTHKNINIFSQIPEQDETYLEDSFCVDEEESCKGQSSEEEVCVDFNLITDDCFANSKKYKTRRAVMLKEMMEQNCAHSKKKLSRIILPDDSSEEENNVNDKRESNIAVNPSTVKKNKQQDHCLNSVPSGSSAQSKVRSTPRVNPLAKQSKQTSLNLKDTISEVSDFKPQNHNEVQSTTPPFTTVDSQKDCRKFPVPQKDGSALEDSSTSGASCSKSRPHLAGTHTSLRLPQEGKGTCILVGGHEITSGLEVISSLRAIHGLQVEVCPLNGCDYIVSNRMVVERRSQSEMLNSVNKNKFIEQIQHLQSMFERICVIVEKDREKTGDTSRMFRRTKSYDSLLTTLIGAGIRILFSSCQEETADLLKELSLVEQRKNVGIHVPTVVNSNKSEALQFYLSIPNISYITALNMCHQFSSVKRMANSSLQEISMYAQVTHQKAEEIYRYIHYVFDIQMLPNDLNQDRLKSDI

SEQ ID NO: 41046 - protein, 402 aa, Homo sapiens
MARPAVALHFQSIADGFKEAVRYVLPRLMLVPVYHCWHYFELLKQLKACSEEQEDRECLNQAITALMNLQGSMDRIYKQYSPRRRPGDPVCPFYSHQLRSKHLAIKKMNEIQKNIDGWEGKDIGQCCNEFIMEGPLTRIGAKHERHIFLFDGLMISCKPNHGQTRLPGYSSAEYRLKEKFVMRKIQICDKEDTCEHKHAFELVSKDENSIIFAAKSAEEKNNWMAALISLHYRSTLDRMLDSVLLKEENEQPLRLPSPEVYRFVVKDSEENIVFEDNLQSRSGIPIIKGGTVVKLIERLTYHMYADPNFVRTFLTTYRSFCKPQELLSLLIERFEIPEPEPTDADKLAIEKGEQPISADLKRFRKEYVQPVQLRFGLNIFYIYIYTHIYTHTHTFYVSVFNI

SEQ ID NO: 41047 - protein, 87 aa, Homo sapiens
MLLLEILHEIKSFPLHFDENSFFAGDKKEAHKLKEDFRLHFRNISRIMDCVGCFKCRLWGKLQNFYKCERIRKLQELVTEYSLKKTS

SEQ ID NO: 41048 - protein, 32 aa, Homo sapiens
MLSRSFWAHDGRYIQKVPRRNFLLEKMKKQYL

SEQ ID NO: 41049 - protein, 469 aa, Homo sapiens [sequence omitted]

SEQ ID NO: 41050 - protein, 76 aa, Homo sapiens
MLITNKSLKEEDGEEIVTYDHLCKNCHHVIARHEYTFSIMDEFQVAIQIAMPGGLKQWKYLRTVKDLEEDVFLFYF

SEQ ID NO: 41051 - protein, 662 aa, Homo sapiens
MVVPSKTKIVCHFSTLVLTCGQPHTLQIVPRDEYDNPTNNSMSLRDEHNYTLSIHELGPQEEESTGVSFEKSVTSNRQTFQVFLRLTLHSRGCFHACISYQNQPINNGEFDIIVLSEDEKNIVERNVSTSGVSIYFEAYLYNATNCSSTPWHLPPMHMTSSQRRPSTAVDEEDEDSPSECHTPEKVKKPKKVYCYVSPKQFSVKEFYLKIIPWRLYTFRVCPGTKFSYLGPDPVHKLLTLVVDDGIQPPVELSCKERNILAATFIRSLHKNIGGSETFQDKVNFFQRELRQVHMKRPHSKVTLKVSRHALLESSLKATRNFSISDWSKNFEVVFQDEEALDWGGPRREWFELICKALFDTTNQLFTRFSDNNQALVHPNPNRPAHLRLKMYEFAGRLVGKCLYESSLGGAYKQLVRARFTRSFLAQIIGLRMHYKYFETDDPEFYKSKVCFILNNDMSEMELVFAEEKYNKSGQLDKVVELMTGGAQTPVTNANKIFYLNLLAQYRLASQVKEEVEHFLKGLNELVPENLLAIFDENELELLMCGTGDISVSDFKAHAVVVGGSWHFREKVMRWFWTVVSSLTQEELARLLQFTTGSSQLPPGGFAALCPSFQIIAAPTHSTLPTAHTCFNQLCLPTYDSYEEVHRMLQLAISEGCEGFGML

SEQ ID NO: 41052 - protein, 1183 aa, Homo sapiens
MWTGSHLKPFLLRTLSEAQKVNHFPRSYELTRKDRLYKNIIRMQHTHGFKAFHILPQTFLLPAEYAEFCNSYSKDRGPWIVKPVASSRGRGVYLINNPNQISLEENILVSRYINNPLLIDDFKFDVRLYVLVTSYDPLVIYLYEEGLARFATVRYDQGAKNIRNQFMHLTNYSVNKKSGDYVSCDDPEVEDYGNKWSMSAMLRYLKQEGRDTTALMAHVEDLIIKTIISAELAIATACKTFVPHRSSCFELYGFDVLIDSTLKPWLLEVNLSPSLACDAPLDLKIKASMISDMFTVVGFVCQDPAQRASTRPIYPTFESSRRNPFQKPQRCRPLSASDAEMKNLVGSAREKGPGKLGGSVLGLSMEEIKVLRRVKEENDRRGGFIRIFPTSETWEIYGSYLEHKTSMNYMLATRLFQDRMTADGAPELKIESLNSKAKLHAALYERKLLSLEVRKRRRRSSRLRAMRPKYPVITQPAEMNVKTETESEEEEEVALDNEDEEQEASQEESAGFLRENQAKYTPSLTALVENTPKENSMKVREWNNKGGHCCKLETQELEPKFNLMQILQDNGNLSKMQARIAFSAYLQHVQIRLMKDSGGQTFSASWAAKEDEQMELVVRFLKRASNNLQHSLRMVLPSRRLALLERRRILAHQLGDFIIVYNKETEQMAEKKSKKKVEEEEEDGVNMENFQEFIRQASEAELEEVLTFYTQKNKSASVFLGTHSKISKNNNNYSDSGAKGDHPETIMEEVKIKPPKQQQTTEIHSDKLSRFTTSAEKEAKLVYSNSSSGPTATLQKIPNTHLSSVTTSDLSPGPCHHSSLSQIPSAIPSMPHQPTILLNTVSASASPCLHPGAQNIPSPTGLPRCRSGSHTIGPFSSFQSAAHIYSQKLSRPSSAKAGSCYLNKHHSGIAKTQKEGEDASLYSKRYNQSMVTAELQRLAEKQAARQYSPSSHINLLTQQVTNLNLATGIINRSSASAPPTLRPIISPSGPTWSTQSDPQAPENHSSSPGSRSLQTGGFAWEGEVENNVYSQATGVVPQHKYHPTAGSYQLQFALQQLEQQKLQSRQLLDQSRARHQAIFGSQTLPNSNLWTMNNGAGCRISSATASGQKPTTLPQKVVPPPSSCASLVPKPPPNHEQVLRRATSQKASKGSSAEGQLNGLQSSLNPAAFVPITSSTDPAHTKI

SEQ ID NO: 41053 - protein, 771 aa, Homo sapiens
MIWDFSEPVCRGCVNYEGADRIEFVIETARQLKRAHGCFQDGRSPGPPPPVGVKTVALSAKEAAAAAAAAAAAAAAAQQQQQQQQQQQQQQQQQQQQQQQQQLNHVDGSSKPAVLAAPSGLERYGLSAAAAAAAAAAAAVEQRSRFEYPPPPVSLGSSSHTARLPNGLGGPNGFPKPTPEEGPPELNRQSPNSSSAAASVASRRGTHGGLVTGLPNPGGGGGPQLTVPPNLLPQTLLNGPASAAVLPPPPPHALGSRGPPTPAPPGAPGGPACLGGTPGVSATSSSASSSTSSSVAEVGVGAGGKRPGSVSSTDQERELKEKQRNAEALAELSESLRNRAEEWASKPKMVRDTLLTLAGCTPYEVRFKKDHSLLGRVFAFDAVSKPGMDYELKLFIEYPTGSGNVYSSASGVAKQMYQDCMKDFGRGLSSGFKYLEYEKKHGSGDWRLLGDLLPEAVRFFKEGVPGADMLPQPYLDASCPMLPTALVSLSRAPSAPPGTGALPPAAPSGRGAAASLRKRKASPEPPDSAEGALKLGEEQQRQQWMANQSEALKLTMSAGGFAAPGHAAGGPPPPPPPLGPHSNRTTPPESAPQNGPSPMAALMSVADTLGTAHSPKDGSSVHSTTASARRNSSSPVSPASVPGQRRLASRNGDLNLQVAPPPPSAHPGMDQVHPQNIPDSPMANSGPLCCTICHERLEDTHFVQCPSVPSHKFCFPCSRESIKAQGATGEVYCPSGEKCPLVGSNVPWAFMQGEIATILAGDVKVKKERDP

SEQ ID NO: 41054 - protein, 69 aa, Homo sapiens [sequence omitted]

SEQ ID NO: 41055 - protein, 934 aa, Homo sapiens
MALLEVLSGRNLLHEYKSSSHRIFRLNNIAKALKFLEDSNVKLVSIDAAEIADGNPSLVLGLIWNIILFFQIKELTGNLSRNSPSSSLSPGSGGTDSDSSFPPTPTAERSVAISVKDQRKAIKALLAWVQRKTRKYGVAVQDFAGSWRSGLAFLAVIKAIDPSLVDMKQALENSTRENLEKAFSIAQDALHIPRLLEPEDIMVDTPDEQSIMTYVAQFLERFPELEAEDIFDSDKEVPIESTFVRIKETPSEQESKVFVLTENGERTYTVNHETSHPPPSKVFVCDKPESMKEFRLDGVSSHALSDSSTEFMHQIIDQVLQGGPGKTSDISEPSPESSILSSRKENGRSNSLPIKKTVHFEADTYKDPFCSKNLSLCFEGSPRVAKESLRQDGHVLAVEVAEEKEQKQESSKIPESSSDKVAGDIFLVEGTNNNSQSSSCNGALESTARHDEESHSLSPPGENTVMADSFQIKVNLMTVEALEEGDYFEAIPLKASKFNSDLIDFASTSQAFNKVPSPHETKPDEDAEAFENHAEKLGKRSIKSAHKKKDSPEPQVKMDKHEPHQDSGEEAEGCPSAPEETPVDKKPEVHEKAKRKSTRPHYEEEGEDDDLQGVGEELSSSPPSSCVSLETLGSHSEEGLDFKPSPPLSKVSVIPHDLFYFPHYEVPLAAVLEAYVEDPEDLKNEEMDLEEPEGYMPDLDSREEEADGSQSSSSSSVPGESLPSASDQVLYLSRGGVGTTPASEPAPLAPHEDHQQRETKENDPMDSHQSQESPNLENIANPLEENVTKESISSKKKEKRKHVDHVESSLFVAPGSVQSSDDLEEDSSDYSIPSRTSHSDSSIYLRRHTHRSSESDHFSYVQLRNAADLDDRRNRILTRKANSSGEAMSLGSHSPQSDSLTQLVQQPDMMYFILFLWLLVYCLLLFPQLDVSRL

SEQ ID NO: 41056 - protein, 569 aa, Homo sapiens
MSTMVYIKEDKLEKLTQDEIISKTKQVIQGLEALKNEHNSILQSLLETLKCLKKDDESNLVEEKSNMIRKSLEMLELGLSEAQVMMALSNHLNAVESEKQKLRAQVRRLCQENQWLRDELANTQQKLQKSEQSVAQLEEEKKHLEFMNQLKKYDDDISPSEDKDTDSTKEPLDDLFPNDEDDPGQGIQQQHSSAAAAAQQGGYEIPARLRTLHNLVIQYASQGRYEVAVPLCKQALEDLEKTSGHDHPDVATMLNILALVYRDQNKYKDAANLLNDALAIREKTLGKDHPAVAATLNNLAVLYGKRGKYKEAEPLCKRALEIREKVLGKDHPDVAKQLNNLALLCQNQGKYEEVEYYYQRALEIYQTKLGPDDPNVAKTKNNLASCYLKQGKFKQAETLYKEILTRAHEREFGSVDDENKPIWMHAEEREECKGKQKDGTSFGEYGGWYKACKVDSPTVTTTLKNLGALYRRQGKFEAAETLEEAAMRSRKQGLDNVHKQRVAEVLNDPENMEKRRSRESLNVDVVKYESGPDGGEEVSMSVEWNGGVSGRASFCGKRQQQQWPGRRHR

SEQ ID NO: 41057 - protein, 572 aa, Homo sapiens
MSTMVYIKEDKLEKLTQDEIISKTKQVIQGLEALKNEHNSILQSLLETLKCLKKDDESNLVEEKSNMIRKSLEMLELGLSEAQVMMALSNHLNAVESEKQKLRAQVRRLCQENQWLRDELANTQQKLQKSEQSVAQLEEEKKHLEFMNQLKKYDDDISPSEDKDTDSTKEPLDDLFPNDEDDPGQGIQQQHSSAAAAAQQGGYEIPARLRTLHNLVIQYASQGRYEVAVPLCKQALEDLEKTSGHDHPDVATMLNILALVYRDQNKYKDAANLLNDALAIREKTLGKDHPAVAATLNNLAVLYGKRGKYKEAEPLCKRALEIREKVLGKDHPDVAKQLNNLALLCQNQGKYEEVEYYYQRALEIYQTKLGPDDPNVAKTKNNLASCYLKQGKFKQAETLYKEILTRAHEREFGSVDDENKPIWMHAEEREECKGKQKDGTSFGEYGGWYKACKVDSPTVTTTLKNLGALYRRQGKFEAAETLEEAAMRSRKQRSISEIPKKILSANGSNHFPLPGSQGLDNVHKQRVAEVLNDPENMEKRRSRESLNVDVVKYESGPDGGEEMRKMKLGLVN

SEQ ID NO: 41058 - protein, 560 aa, Homo sapiens
MSTMVYIKEDKLEKLTQDEIISKTKQVIQGLEALKNEHNSILQSLLETLKCLKKDDESNLVEEKSNMIRKSLEMLELGLSEAQVMMALSNHLNAVESEKQKLRAQVRRLCQENQWLRDELANTQQKLQKSEQSVAQLEEEKKHLEFMNQLKKYDDDISPSEDKDTDSTKEPLDDLFPNDEDDPGQGIQQQHSSAAAAAQQGGYEIPARLRTLHNLVIQYASQGRYEVAVPLCKQALEDLEKTSGHDHPDVATMLNILALVYRDQNKYKDAANLLNDALAIREKTLGKDHPAVAATLNNLAVLYGKRGKYKEAEPLCKRALEIREKVLGKDHPDVAKQLNNLALLCQNQGKYEEVEYYYQRALEIYQTKLGPDDPNVAKTKNNLASCYLKQGKFKQAETLYKEILTRAHEREFGSVDDENKPIWMHAEEREECKGKQKDGTSFGEYGGWYKACKVDSPTVTTTLKNLGALYRRQGKFEAAETLEEAAMRSRKQGLDNVHKQRVAEVLNDPENMEKRRSRESLNVDVVKYESGPDGGEEGVSGRASFCGKRQQQQWPGRRHR

SEQ ID NO: 41059 - protein, 711 aa, Homo sapiens
MYRVGDYVYFENSSSNPYLIRRIEELNKTANGNVEAKVVCFYRRRDISSTLIALADKHATLSVCYKAGPGADNGEEGEIEEEMENPEMVDLPEKLKHQLRHRELFLSRQLESLPATHIRGKCSVTLLNETESLKSYLEREDFFFYSLVYDPQQKTLLADKGEIRVGNRYQADITDLLKEGEEDGRDQSRLETQVWEAHNPLTDKQIDQFLVVARSVGTFARALDCSSSVRQPSLHMSAAAASRDITLFHAMDTLHKNIYDISKAISALVPQGGPVLCRDEMEEWSASEANLFEEALEKYGKDFTDIQQDFLPWKSLTSIIEYYYMWKTTDRYVQQKRLKAAEAESKLKQVYIPNYNKPNPNQISVNNVKAGVVNGTGAPGQSPGAGRACESCYTTQSYQWYSWGPPNMQCRLCASCWTYWKKYGGLKMPTRLDGERPGPNRSNMSPHGLPARSSGSPKFAMKTRQAFYLHTTKLTRIARRLCREILRPWHAARHPYLPINSAAIKAECTARLPEASQSPLVLKQAVRKPLEAVLRYLETHPRPPKPDPVKSVSSVLSSLTPAKVAPVINNGSPTILGKRSYEQHNGVDGNMKKRLLMPSRGLANHGQARHMGPSRNLLLNGKSYPTKVRLIRGGSLPPVKRRRMNWIDAPDDVFYMATEETRKIRKLLSSSETKRAARRPYKPIALRQSQALPPRPPPPAPVNDEPIVIED

SEQ ID NO: 41060 - protein, 54 aa, Homo sapiens [sequence omitted]

SEQ ID NO: 41061 - protein, 716 aa, Homo sapiens
MLDHRVRPGPVPHSQEPESEDMELPLEGYVPEGLELAALRPESPAPEEQECHNHSPDGDSSSDYVNNTSEEEDYDEGLPEEEEGITYYIRYCPEDDSYLEGMDCNGEEYLAHSAHPVDTDECQEAVEEWTDSAGPHPHGHEAEGSQDYPDGQLPIPEDEPSVLEAHDQEEDGHYCASKEGYQDYYPEEANGNTGASPYRLRRGDGDLEDQEEDIDQIVAEIKMSLSMTSITSASEASPEHGPEPGPEDSVEACPPIKASCSPSRHEARPKSLNLLPEAKHPGDPQRGFKPKTRTPEERLKWPHEQVCNGLEQPRKQQRSDLNGPVDNNNIPETKKVASFPSFVAVPGPCEPEDLIDGIIFAANYLGSTQLLSERNPSKNIRMMQAQEAVSRVKNSEGDAQTLTEVDLFISTQRIKVLNADTQETMMDHALRTISYIADIGNIVVLMARRRMPRSASQDCIETTPGAQEGKKQYKMICHVFESEDAQLIAQSIGQAFSVAYQEFLRANGINPEDLSQKEYSDIINTQEMYNDDLIHFSNSENCKELQLEKHKGEILGVVVVESGWGSILPTVILANMMNGGPAARSGKLSIGDQIMSINGTSLVGLPLATCQGIIKGLKNQTQVKLNIVSCPPVTTVLIKRPDLKYQLGFSVQNGIVSSPSCSGPPPPLQGPGRGSSSRPMGQAMSGSLVGPGLWLQLPTARPPGAGTFHGSLGGPG

SEQ ID NO: 41062 - protein, 106 aa, Homo sapiens
MAQALGIPATECEFVGSLPVIVVGRLKVALEPQLWELGKVLRKAGLSAGYVDAGAEPGRSRMISQEEFARQLQLSDPQTVAGAFGYFQQVKELEQRAEQNPGFPPG

SEQ ID NO: 41063 - protein, 190 aa, Homo sapiens
MQAVLDHTIPYLHVREAFGQKIGHFQLMQGKMADMYTRLMACRQYVYNVAKACDEGHCTAKDCAGVILYSAECATQVALDGIQCFGQTFSAQHPPGREGETRGQTSLEQVSTARELRCKILLPELTPRVLLPQLASWISDQKLPFLKILLCSPTSLGQSSLAGFTKLRWPYPLLQPHLLPHPYTTALHLC

SEQ ID NO: 41064 - protein, 1465 aa, Homo sapiens [sequence omitted]

SEQ ID NO: 41065 - protein, 670 aa, Homo sapiens
MVKKRKGRVVIDSDTEDSGSDENLDQELLSLAKRKRSDSEEKEPPVSQPAASSDSETSDSDDEWTFGSNKNKKKGKARKIEKKGTMKKQANKTASSGSSDKDSSAESSAPEEGEVSDSDSNSSSSSSDSDSSSEDEEFHDGYGEDLMGDEEDRARLEQMTEKEREQELFNRIEKREVLKRRFEIKKKLKTAKKKEKKEKKKKQEEEQEKKKLTQIQESQVTSHNKERRSKRDEKLDKKSQAMEELKAEREKRKNRTAELLAKKQPLKTSEVYSDDEEEEEDDKSSEKSDRSSRTSSSDEEEEKEEIPPKSQPVSLPEELNRVRLSRHKLERWCHMPFFAKTVTGCFVRIGIGNHNSKPVYRVAEITGVVETAKVYQLGGTRTNKGLQLRHGNDQRVFRLEFVSNQEFTESEFMKWKEAMFSAGMQLPTLDEINKKELSIKEALNYKFNDQDIEEIVKEKERFRKAPPNYAMKKTQLLKEKAMAEDLGDQDKAKQIQDQLNELEERAEALDRQRTKNISAISYINQRNREWNIVESEKALVAESHNMKNQQMDPFTRRQCKPTIVSNSRDPAVQAAILAQLNAKYGSGVLPDAPKEMSKGQGKDKDLNSKSASDLSEDLFKVHDFDVKIDLQVPSSESKALAITSKAPPAKDGAPRRSLNLEDYKKRRGLI

SEQ ID NO: 41066 - protein, 8 aa, Homo sapiens
MAVLLKGL

SEQ ID NO: 41067 - protein, 623 aa, Homo sapiens
MLLEHYGLAGQPSPLPRPAPPRRPHPAPGPGDSNIFWGLQISDIHLSRFRDPGRAVDLEKFCSETIDIIQPALVLATGDLTDAKTKEQLGSRQHEVEWQTYQGILKKTRVMEKTKWLDIKGNHDAFNIPSLDSIKNYYRKYSAVRRDGSFHYVHSTPFGNYSFICVDATVNPGPKRPYNFFGILDKKKMEELLLLAKESSRSNHTIWFGHFTTSTILSPSPGIRSIMSSAIAYLCGHLHTLGGLMPVLHTRHFQGTLELEVGDWKDNRRYRIFAFDHDLFSFADLIFGKWPVVLITNPKSLLYSCGEHEPLERLLHSTHIRVLAFSLSSITSVTVKIDGVHLGQAVHVSGPIFVLKWNPRNYSSGTHNIEVIVQDSAGRSKSVHHIFSVQENNHLSFDPLASFILRTDHYIMARVLFVLIVLSQLTILIIFRYRGYPELKEPSGFINLTSFSLHVLSKINIFYYSVLLLTLYTVLGPWFFGEIIDGKFGCCFSFGIFVNGHFLQGSITFIIGILQLAFFNIPLMAYMCWSLLQRCFGHNFRSHLHQRKYLKIMPVHLLMLLLYIWQVYSCYFLYATYGTLAFLFSPLRTWLTLLTPVLIRYVWTLNSTKFGIFMVQLKSHLSS

SEQ ID NO: 41068 - protein, 207 aa, Homo sapiens
MNCLVDGNIPPSSGLSSSSALVCCAGLVTLTVLGRNLSKVELAEICAKSERYIGTEGGGMDQSISFLAEEGTAKLIEFSPLRATDVKLPSGAVFVIANSCVEMNKAATSHFNIRVMECRLAAKLLAKYKSLQWDKVLRLEEVQAKLGISLEEMLLVTEDALHPEPYNPEEICRCLGISLEELRTQILSPNTQDDGVVLYRPGWSATA

SEQ ID NO: 41069 - protein, 370 aa, Homo sapiens
MANGAPFTTDWLGTSPLHLAAQYGHYSTTEVLLRAGVSRDARTKVDRTPLHMAASEGHASIVEVLLKHGADVNAKDMLKMTALHWATEHNHQEVVELLIKYGADVHTQSKFCKTAFDISIDNGNEDLAEILQIAMQNQINTNPESPDTVTIHAATPQFIIGPGGVVNLTGLVSSENSSKATDETGVSAVQFGNSSTSVLATLAALAEASAPLSNSSETPVVATEEVVTAESVDGAIQQVVSSGGQQVITIVTDGIQLGNLHSIPTSGIGQPIIVTMPDGQQVLTVPATDIAEETVISEEPPAKRQCIEIIENRVESAEIEEREALQKQLDEANREAQKYRQQLLKKEQEAEAYRQKLEAMTRLQTNKEAV

SEQ ID NO: 41070 - protein, 358 aa, Homo sapiens [sequence omitted]

SEQ ID NO: 41071 - protein, 323 aa, Homo sapiens
MANGAPFTTDWLGTSPLHLAAQYGHYSTTEVLLRAGVSRDARTKVDRTPLHMAASEGHASIVEVLLKHGADVNAKDMLKMTALHWATEHNHQEVVELLIKYGADVHTQSKFCKTAFDISIDNGNEDLAEILQIAMQNQINTNPESPDTVTIHAATPQFIIGPGGVVNLTDETGVSAVQFGNSSTSVLATLAALAEASAPLSNSSETPVVATEEVVTAESVDGAIQQVVSSGGQQVITIVTDGIQLGNLHSIPTSGIGQPIIVTMPDGQQVLTVPATDIAEETVISEEPPAKRQCIEIIENRVESAEIEVRSLLPGVLCRSHPK

SEQ ID NO: 41072 - protein, 335 aa, Homo sapiens
MANGAPFTTDWLGTSPLHLAAQYGHYSTTEVLLRAGVSRDARTKVDRTPLHMAASEGHASIVEVLLKHGADVNAKDMLKMTALHWATEHNHQEVVELLIKYGADVHTQSKFCKTAFDISIDNGNEDLAEILQIAMQNQINTNPESPDTVTIHAATPQFIIGPGGVVNLTGLVSSENSSKATDETGVSAVQFGNSSTSVLATLAALAEASAPLSNSSETPVVATEEVVTAESVDGAIQQVVSSGGQQVITIVTDGIQLGNLHSIPTSGIGQPIIVTMPDGQQVLTVPATDIAEETVISEEPPAKRQCIEIIENRVESAEIEVRSLLPGVLCRSHPK

SEQ ID NO: 41073 - protein, 1057 aa, Homo sapiens
MVRLIYCEMLGYDASFGYIHAIKLAQQGNLLEKRVGYLAVSLFLHESHELLLLLVNTVVKDLQSTNLVEVCMALTVVSQIFPCEMIPAVLPLIEDKLQHSKEIVRRKAVLALYKFHLIAPNQVQHIHIKFRKALCDRDVGVMAASLHIYLRMIKENSSGYKDLTGSFVTILKQVVGGKLPVEFNYHSVPAPWLQIQLLRILGLLGKDDQRTSELMYDVLDESLRRAELNHNVTYAILFECVHTVYSIYPKSELLEKAAKCIGKFVLSPKINLKYLGLKALTYVIQQDPTLALQHQMTIIECLDHPDPIIKRETLELLYRITNAQNITVIVQKMLEYLHQSKEEYVIVNLVGKIAELAEKYAPDNAWFIQTMNAVFSVGGDVMHPDIPNNFLRLLAEGFDDETEDQQLRLYAVQSYLTLLDMENVFYPQRFLQVMSWVLGEYSYLLDKETPEEVIAKLYKLLMNDSVSSETKAWLIAAVTKLTSQAHSSNTVERLIHEFTISLDTCMRQHAFELKHLHENVELMKSLLPVDRSCEDLVVDASLSFLDGFVAEGLSQGAAPYKPPHQRQEEKLSQEKVLNFEPYGLSFSSSGFTGRQSPAGISLGSDVSGNSAETGLKETNSLKLEGIKKLWGKEGYLPKKESKTGDESGALPVPQESIMENVDQAITKKDQSQVLTQSKEEKEKQLLASSLFVGLGSESTINLLGKADTVSHKFRRKSKVKEAKSGETTSTHNMTCSSFSSLSNVAYEDDYYSNTLHDTGDKELKKFSLTSELLDSESLTELPLVEKFSYCSLSTPSLFANNNMEIFHPPQSTAASVAKESSLASSFLEETTEYIHSNAMEVCNNETISVSSYKIWKDDCLLMVWSVTNKSGLELKSADLEIFPAENFKVTEQPGCCLPVMEAESTKSFQYSVQIEKPFTEGNLTGFISYHMMDTHSAQLEFSVNLSLLDFIRPLKISSDDFGKLWLSFANDVKQNVKMSESQAALPSALKTLQQKLRLHIIEIIGNEGLLACQLLPSIPCLLHCRVHADVLALWFRSSCSTLPDYLLYQCQKVMEGS

SEQ ID NO: 41074 - protein, 228 aa, Homo sapiens
MKVIESRAQKDEEKMEIQEIQLKEAKHIAEDADRKYEEVARKLVIIESDLERAEERAELSEGQVRQLEEQLRIMDQTLKALMAAEDKVLMARVVFRFNCNPDIFQLPMPPGSFGITTAPSLHPLLFISCLKCFPLVLYAPLFSLHKCSLGSQKRSQIIALQSCWIWSPCLLLLRGWGAVFLENLNILIPDDLATLRQPFVSRTQFSFFPIPLLFLSSFLWLVSHPFCL

SEQ ID NO: 41075 - protein, 70 aa, Homo sapiens
MEEKALEVYDLIRTIRDPEKPNTLEELEVVSESCVEVQEINEEEYLVIIRFTPTVPHCSLATLIVGNLHF

SEQ ID NO: 41076 - protein, 185 aa, Homo sapiens
MFNKATDAVSKMTIKMNESDIWFEEKLQEVECEEQRLRKLHAVVETLVNHRKELALNTAQFAKSLAMLGSSEDNTALSRALSQLAEVEEKIEQLHQEQANNDFFLLAELLSDYIRLLAIVRAAFDQRMKTWQRWQDAQATLQKKREAEARLLWANKPDKLQQAKDEILEVSPLRQPSQGCSAGSK

SEQ ID NO: 41077 - protein, 127 aa, Homo sapiens
MLRLSERNMKVLLAAALIAGSVFFLLLPGPSAADEKKKGPKVTVKVYFDLRIGDEDVGRVIFGLFGKTVPKTVDNFVALATGEKGFGYKNSKFHRVIKDFMIQGGDFTRGDGTGGNHRSSGPRSMSV

SEQ ID NO: 41078 - protein, 15 aa, Homo sapiens
MISLYLLLLLIALGI

SEQ ID NO: 41079 - protein, 2462 aa, Homo sapiens
MLWPRMALENRLSGEDYRFLLREKNLDGSIHYGSLQSWLRVTEERRRMMERGFLPQPQQKDFDDLCSLPDLNEKTLLENLRNRFKHEKIYTYVGSILIVINPFKFLPIYNPKYVKMYDNHQLGKLEPHIYAVADVAYHAMLQRKKNQCIVISGESGSGKTQSTNFLIHHLTALSQKGFASGVEQIILGAGPVLEAFGNAKTAHNNNSSRFGKFIQVNYQETGTVLGAYVEKYLLEKSRLVYQEHNERNYHVFYYLLAGASEDERSAFHLKQPEEYHYLNQITKKPLRQSWDDYCYDSEPDCFTVEGEDLRHDFERLQLAMEMVGFLPKTRRQIFSLLSAILHLGNICYKKKTYRDDSIDICNPEVLPIVSELLEVKEEMLFEALVTRKTVTVGEKLILPYKLAEAVTVRNSMAKSLYSALFDWIVFRINHALLNSKDLEHNTKTLSIGVLDIFGFEDYENNSFEQFCINFANERLQHYFNQHIFKLEQEEYRTEGISWHNIDYIDNTCCINLISKKPTGLLHLLDEESNFPQATNQTLLDKFKHQHEDNSYIEFPAVMEPAFIIKHYAGKVKYGVKDFREKNTDHMRPDIVALLRSSKNAFISGMIGIDPVAVFRWAILRAFFRAMVAFREAGKRNIHRKTGHDDTAPCAILKSMDSFSFLQHPVHQRSLEILQRCKEEKYSITRKNPRTPLSDLQGMNALNEKNQHDTFDIAWNGRTGIRQSRLSSGTSLLDKDGIFANSTSSKLLERAHGILTRNKNFKSKPALPKHLLEVNSLKHLTRLTLQDRITKSLLHLHKKKKPPSISAQFQASLSKLMETLGQAEPYFVKCIRSNAEKLPLRFSDVLVLRQLRYTGMLETVRIRQSGYSSKYSFQDFVSHFHVLLPRNIIPSKFNIQDFFRKINLNPDNYQVGKTMVFLKEQERQHLQDLLHQEVLRRIILLQRWFRVLLCRQHFLHLRQASVIIQRFWRNYLNQKQVRDAAVQKDAFVMASAAALLQASWRAHLERQRYLELRAAAIVIQQKWRDYYRRRHMAAICIQARWKAYRESKRYQEQRKKIILLQSTCRGFRARQRFKALKEQRLRETKPEVGLVNIKGYGSLEIQGSDPSGWEDCSFDNRIKAIEECKSVIESNRISRESSVDCLKESPNKQQERAQSQSGVDLQEDVLVRERPRSLEDLHQKKVGRAKRESRRMRELEQAIFSLELLKVRSLGGISPSEDRRWSTELVPEGLQSPRGTPDSESSQGSLELLSYEESQKSKLESVISDEGDLQFPSPKISSSPKFDSRDNALSASNETSSAEHLKDGTMKEMVVCSSESITCKPQLKDSFISNSLPTFFYIPQQDPLKTNSQLDTSIQRNKLLENEDTAGEALTLDINRETRRYHCSGKDQIVPSLNTESSNPVLKKLEKLNTEKEERQKQLQQQNEKEMMEQIRQQTDILEKERKAFKTIEKPRIGECLVAPSSYQSKQRVERPSSLLSLNTSNKGELNVLGSLSLKDAALAQKDSSSAHLPPKDRPVTVFFERKGSPCQSSTVKELSKTDRMGTQLNVACKLSNNRISKREHFRPTQSYSHNSDDLSREGNARPIFFTPKDNMSIPLVSKEALNSKNPQLHKEDEPAWKPVKLAGPGQRETSQRFSSVDEQAKLHKTMSQGEITKLAVRQKASDSDIRPQRAKMRFWAKGKQGEKKTTRVKPTTQSEVSPLFAGTDVIPAHQFPDELAAYHPTPPLSPELPGSCRKEFKENKEPSPKAKRKRSVKISNVALDSMHWQNDSVQIIASVSDLKSMDEFLLKKVNDLDNEDSKKDTLVDVVFKKALKEFRQNIFSFYSSALAMDDGKSIRYKDLYALFEQILEKTMRLEQRDSLGESPVRVWVNTFKVFLDEYMNEFKTSDCTATKVPKTERKKRRKKETDLVEEHNGHIFKATQYSIPTYCEYCSSLIWIMDRASVCKLCKYACHKKCCLKTTAKCSKKYDPELSSRQFGVELSRLTSEDRTVPLVVEKLINYIEMHGLYTEGIYRKSGSTNKIKELRQGLDTDAESVNLDDYNIHVIASVFKQWLRDLPNPLMTFELYEEFLRAMGLQERKETIRGVYSVIDQLSRTHLNTLERLIFHLVRIALQEDTNRMSANALAIVFAPCILRCPDTTDPLQSVQDISKTTTCVELIVVEQMNKYKARLKDISSLEFAENKAKTRLSLIRRSMGKGRIRRGNYPGPSSPVVVRLPSVSDVSEETLTSEAAMETDITEQQQAAMQQEERVLTEQIENLQKEKEELTFEMLVLEPRASDDETLESEASIGTADSSENLNMESEYAISEKSERSLALSSLKTAGKSEPSSKLRKQLKKQQDSLDVVDSSVSSLCLSNTASSHGTRKLFQIYSKSPFYRAASGNEALGMEGPLGQTKFLEDKPQFISRGTFNPEKGKQKLKNVKNSPQKTKETPEGTVMSGRRKTVDPDCTSNQQLALFGNNEFMV

SEQ ID NO: 41080 - protein, 1343 aa, Homo sapiens
MRELEQAIFSLELLKVRSLGGISPSEDRRWSTELVPEGLQSPRGTPDSESSQGSLELLSYEESQKSKLESVISDEGDLQFPSPKISSSPKFDSRDNALSASNETSSAEHLKDGTMKEMVVCSSESITCKPQLKDSFISNSLPTFFYIPQQDPLKTNSQLDTSIQRNKLLENEDTAGEALTLDINRETRRYHCSGKDQIVPSLNTESSNPVLKKLEKLNTEKEERQKQLQQQNEKEMMEQIRQQTDILEKERKAFKTIEKPRIGECLVAPSSYQSKQRVERPSSLLSLNTSNKGELNVLGSLSLKDAALAQKDSSSAHLPPKDRPVTVFFERKGSPCQSSTVKELSKTDRMGTQLNVACKLSNNRISKREHFRPTQSYSHNSDDLSREGNARPIFFTPKDNMSIPLVSKEALNSKNPQLHKEDEPAWKPVKLAGPGQREVARPAHKKKARMARTRSDFLTRGTFADGEGDTEEDDYDDIIEPLLSLDQASHCELGPAPSLGQASHSDSEMTSQRFSSVDEQAKLHKTMSQGEITKLAVRQKASDSDIRPQRAKMRFWAKGKQGEKKTTRVKPTTQSEVSPLFAGTDVIPAHQFPDELAAYHPTPPLSPELPGSCRKEFKENKEPSPKAKRKRSVKISNVALDSMHWQNDSVQIIASVSDLKSMDEFLLKKVNDLDNEDSKKDTLVDVVFKKALKEFRQNIFSFYSSALAMDDGKSIRYKDLYALFEQILEKTMRLEQRDSLGESPVRVWVNTFKVFLDEYMNEFKTSDCTATKVPKTERKKRRKKETDLVEEHNGHIFKATQYSIPTYCEYCSSLIWIMDRASVCKLCKYACHKKCCLKTTAKCSKKYDPELSSRQFGVELSRLTSEDRTVPLVVEKLINYIEMHGLYTEGIYRKSGSTNKIKELRQGLDTDAESVNLDDYNIHVIASVFKQWLRDLPNPLMTFELYEEFLRAMGLQERKETIRGVYSVIDQLSRTHLNTLERLIFHLVRIALQEDTNRMSANALAIVFAPCILRCPDTTDPLQSVQDISKTTTCVELIVVEQMNKYKARLKDISSLEFAENKAKTRLSLIRRSMGKGRIRRGNYPGPSSPVVVRLPSVSDVSEETLTSEAAMETDITEQQQAAMQQEERVLTEQIENLQKEKEELTFEMLVLEPRASDDETLESEASIGTADSSENLNMESEYAISEKSERSLALSSLKTAGKSEPSSKLRKQLKKQQDSLDVVDSSVSSLCLSNTASSHGTRKLFQIYSKSPFYRAASGNEALGMEGPLGQTKFLEDKPQFISRGTFNPEKGKQKLKNVKNSPQKTKETPEGTVMSGRRKTVDPDCTSNQQLALFGNNEFMV

SEQ ID NO: 41081 - protein, 1226 aa, Homo sapiens
MQSATGIQYSVTPSYQVSAMPQSSGSHGPAIAAVHSSHHHPTAVQPHGGQVVQSHAHPAPPVAPVQGQQQFQRLKVEDALSYLDQVKLQFGSQPQVYNDFLDIMKEFKSQSIDTPGVISRVSQLFKGHPDLIMGFNTFLPPGYKIEVQTNDMVNVTTPGQVHQIPTHGIQPQPQPPPQHPSQPSAQSAPAPAQPAPQPPPAKVSKPSQLQAHTPASQQTPPLPPYASPRSPPVQPHTPVTISLGTAPSLQNNQPVEFNHAINYVNKIKNRFQGQPDIYKAFLEILHTYQKEQRNAKEAGGNYTPALTEQEVYAQVARLFKNQEDLLSEFGQFLPDANSSVLLSKTTAEKVDSVRNDHGGTVKKPQLNNKPQRPSQNGCQIRRHPTGTTPPVKKKPKLLNLKDSSMADASKHGGGTESLFFDKVRKALRSAEAYENFLRCLVIFNQEVISRAELVQLVSPFLGKFPELFNWFKNFLGYKESVHLETYPKERATEGIAMEIDYASCKRLGSSYRALPKSYQQPKCTGRTPLCKEVLNDTWVSFPSWSEDSTFVSSKKTQYEEHIYRCEDERFELDVVLETNLATIRVLEAIQKKLSRLSAEEQAKFRLDNTLGGTSEVIHRKALQRIYADKAADIIDGLRKNPSIAVPIVLKRLKMKEEEWREAQRGFNKVWREQNEKYYLKSLDHQGINFKQNDTKVLRSKSLLNEIESIYDERQEQATEENAGVPVGPHLSLAYEDKQILEDAAALIIHHVKRQTGIQKEDKYKIKQIMHHFIPDLLFAQRGDLSDVEEEEEEEMDVDEATGAVKKHNGVGGSPPKSKLLFSNTAAQKLRGMDEVYNLFYVNNNWYIFMRLHQILCLRLLRICSQAERQIEEENREREWEREVLGIKRDKSDSPAIQLRLKEPMDVDVEDYYPAFLDMVRSLLDGNIDSSQYEDSLREMFTIHAYIAFTMDKLIQSIVRQLQHIVSDEICVQVTDLYLAENNNGATGGQLNTQNSRSLLESTYQRKAEQLMSDENCFKLMFIQSQGQVQLTIELLDTEEENSDDPVEAERWSDYVERYMNSDTTSPELREHLAQKPVFLPRNLRRIRKCQRGREQQEKEGKEGNSKKTMENVDSLDKLECRFKLNSYKMVYVIKSEDYMYRRTALLRAHQSHERVSKRLHQRFQAWVDKWTKEHVPREMAAETSKWLMGEGLEGLVPCTTTCDTETLHFVSINKYRVKYGTVFKAP

SEQ ID NO: 41082 - protein, 297 aa, Homo sapiens
MSKHRKTYSTEEYHHRLQTFASNWRKINAHNNGNHTFKMALNQFSDMSFAEIKHKYLWSEPQNCSATKSNYLRGTGPYPPSVDWRKKGNFVSPVKNQGACGSCWTFSTTGALESAIAIATGKMLSLAEQQLVDCAQDFNNHGCQGGLPSQAFEYILYNKGIMGEDTYPYQGKDGYCKFQPGKAIGFVKDVANITIYDEEAMVEAVALYNPVSFAFEVTQDFMMYRTGIYSSTSCHKTPDKVNHAVLAVGYGEKNGIPYWIVKNSWGPQWGMNGYFLIERGKNMCGLAACASYPIPLV

SEQ ID NO: 41083 - protein, 127 aa, Homo sapiens
MNKRQLYYQVLNFGMIVSSALMIWKGLMVITGSESPIVVVLSGSMEPAFHRGDLLFLTNRVEDPIRVGEIVVFRIEGREIPIVHRVLKIHEKFVPYIGIVTILMNDYPKFKYAVLFLLGLFVLVHRE

SEQ ID NO: 41084 - protein, 951 aa, Homo sapiens
MRFLDTMSMHMAISGLSSFQRSLWIAAKQGKHKVQPPTKQGQKSQRKARRGPAISSWDWLDISSVNSLAEVHRLYVGGPPLEKEPRELFVKGTMKDIRENFQDLMQYCAQDVWATHEVFQQQLPLFLERCPHPVTLAGMLEMGVSYLPVNQNWERYLAEAQGTYEELQREMKKSLMDLANDACQLLSGERYKEDPWLWDLEWDLQEFKQKKAKKVKKEPATASKLPIEGAGAPGDPMDQEDLGPCSEEEEFQQDVMARACLQKLKGTTELLPKRPQHLPGHPGWYRKLCPRLDDPAWTPGPSLLSLQMRVTPKLMALTWDGFPLHYSERHGWGYLVPGRRDNLAKLPTGTTLESAGVVCPYRAIESLYRKHCLEQGKQQLMPQEAGLAEEFLLTDNSAIWQTVEELDYLEVEAEAKMENLRAAVPGQPLALTARGGPKDTQPSYHHGNGPYNDVDIPGCWFFKLPHKDGNSCNVGSPFAKDFLPKMEDGTLQAGPGGASGPRALEINKMISFWRNAHKRISSQMVVWLPRSALPRAVIRHPDYDEEGLYGAILPQVVTAGTITRRAVEPTWLTASNARPDRVGSELKAMVQAPPGYTLVGADVDSQELWIAAVLGDAHFAGMHGCTAFGWMTLQGRKSRGTDLHSKTATTVGISREHAKIFNYGRIYGAGQPFAERLLMQFNHRLTQQEAAEKAQQMYAATKGLRWYRLSDEGEWLVRELNLPVDRTEGGWISLQDLRKVQRETARKSQWKKWEVVAERAWKGGTESEMFNKLESIATSDIPRTPVLGCCISRALEPSAVQEEFMTSRVNWVVQSSAVDYLHLMLVAMKWLFEEFAIDGRFCISIHDEVRYLVREEDRYRAALALQITNLLTRCMFAYKLGLNDLPQSVAFFSAVDIDRCLRKEVTMDCKTPSNPTGMERRYGIPQGEALDIYQIIELTKGSLEKRSQPGP

SEQ ID NO: 41085 - protein, 432 aa, Homo sapiens
MGRGAGRSALGFWPTLAFLLCSFPAATSPCKILKCNSEFWSATSGSHAPASDDTPEFCAALRSYALCTRRTARTCRGDLAYHSAVHGIEDLMSQHNCSKDGPTSQPRLRTLPPAGDSQERSDSPEICHYEKSFHKHSATPNYTHCGLFGDPHLRTFTDRFQTCKVQGAWPLIDNNYLNVQVTNTPVLPGSAATATSKLTIIFKNFQECVDQKVYQAEMDELPAAFVDGSKNGGDKHGANSLKITEKVSGQHVEIQAKYIGTTIVVRQVGRYLTFAVRMPEEVVNAVEDWDSQGLYLCLRGCPLNQQIDFQAFHTNAEGTGARRLAAASPAPTAPETFPYETAVAKCKEKLPVEDLYYQACVFDLLTTGDVNFTLAAYYALEDVKMLHSNKDKLHLYERTRDLPGRAAAGLPLAPRPLLGALVPLLALLPVFC

SEQ ID NO: 41086 - protein, 412 aa, Homo sapiens
MVVSTWRDPQDEVPGSQGSQASQAPPVPGPPPGAPHTPQTPGQGGPASTPAQTAAGGQGGPGGPGSDKQQQQQHIECVVCGDKSSGKHYGQFTCEGCKSFFKRSVRRNLSYTCRANRNCPIDQHHRNQCQYCRLKKCLKVGMRREAVQRGRMPPTQPTHGQFALTNGDPLNCHSYLSGYISLLLRAEPYPTSRFGSQCMQPNNIMGIENICELAARMLFSAVEWARNIPFFPDLQITDQVALLRLTWSELFVLNAAQCSMPLHVAPLLAAAGLHASPMSADRVVAFMDHIRIFQEQVEKLKALHVDSAEYSCLKAIVLFTSDACGLSDVAHVESLQEKSQCALEEYVRSQYPNQPTRFGKLLLRLPSLRTVSSSVIEQLFFVRLVGKTPIETLIRDMLLSGSSFNWPYMAIQ

SEQ ID NO: 41087 - protein, 212 aa, Homo sapiens [sequence omitted]

SEQ ID NO: 41088 - protein, 472 aa, Homo sapiens [sequence omitted]

SEQ ID NO: 41089 - protein, 173 aa, Homo sapiens
MESYDEAIANLQRAYSLAKEQRLNFGDDIPSALRIAKKKRWNSIEERRIHQESELHSYLSRLIAAERERELEECQRNHEGDEDDSHVRAQQACIEAKHDKYMADMDELFSQVDEKRKKRDIPDYLCGKISFELMREPCITPSGITYDRKDIEEHLQVRPAAGGAGPVAWSWAP

SEQ ID NO: 41090 - protein, 94 aa, Homo sapiens
MSFCSFFGGEVFQNHFEPGVYVCAKCGYELFSSRSKYAHSSPWPAFTETIHADSVAKRPEHNRSEALKVSCGKCGNGLGHEFLNDGPKPGQSRF

SEQ ID NO: 41091 - protein, 179 aa, Homo sapiens
MDDLATDARGRGAGRRDAAASASTPAQAPTSDSPVAEDASRRRPCRACVDFKTWMRTQQKRDTKFREDCPPDREELGRHSWAVLHTLAAYYPDLPTPEQQQDMAQFIHLFSKFYPCEECAEDLRKRLCRNHPDTRTRACFTQWLCHLHNEVNRKLGKPDFDCSKVDERWRDGWKDGSCD

SEQ ID NO: 41092 - protein, 891 aa, Homo sapiens
MEAEAAAAPERGGGSCVLCCGDLEATALGRCDHPVCYRCSTKMRVLCEQRYCAVCREELRQVVFGKKLPAFATIPIHQLQHEKKYDIYFADGKVYALYRQLLQHECPRCPELPPFSLFGDLEQHMRRQHELFCCRLCLQHLQIFTYERKWYSRKDLARHRMQGDPDDTSHRGHPLCKFCDERYLDNDELLKHLRRDHYFCHFCDSDGAQDYYSDYAYLREHFREKHFLCEEGRCSTEQFTHAFRTEIDLKAHRTACHSRSRAEARQNRHIDLQFSYAPRHSRRNEGVVGGEDYEEVDRYSRQGRVARAGTRGAQQSRRGSWRYKREEEDREVAAAVRASVAAQQQEEARRSEDQEEGGRPKKEEAAARGPEDPRGPRRSPRTQGEGPGPKETSTNGPVSQEAFSVTGPAAPGCVGVPGALPPPSPKLKDEDFPSLSASTSSSCSTAATPGPVGLALPYAIPARGRSAFQEEDFPALVSSVPKPGTAPTSLVSAWNSSSSSKKVAQPPLSAQATGSGQPTRKAGKGSRGGRKGGPPFTQEEEEDGGPALQELLSTRPTGSVSSTLGLASIQPSKVGKKKKVGSEKPGTTLPQPPPATCPPGALQAPEAPASRAEGPVAVVVNGHMEGPAPARSAPKEPPGLPRPLGSFPCPTPQEDFPALGGPCPPRMPPPPGFSAVVLLKGTPPPPPPGLVPPISKPPPGFSGLLPSPHPACVPSPATTTTTKAPRLLPAPRAYLVPENFRERNLQLIQSIRDFLQSDEARFSEFKSHSGEFRQGLISAAQYYKSCRDLLGENFQKVFNELLVLLPDTAKQQELLSAHTDFCNREKPLSTKSKKNKKSAWQATTQQAGLDCRVCPTCQQVLAHGDASSHQALHAARDDDFPSLQAIARIIT

SEQ ID NO: 41093 - protein, 65 aa, Homo sapiens
MNTSPGTVGSDPVILATAGYDHTVRFWQAHSGICTRTVQHQDSQVNALEVTPDRSMIAAAGICDP

SEQ ID NO: 41094 - protein, 204 aa, Homo sapiens
MAPSPTKRKDRSDEKSKDRSKDKGATKESSEKDRGRDKTRKRRSASSGSSSTRSRSSSTSSSGSSTSTGSSSGSSSSSASSRSGSSSTSRSSSSSSSSGSPSPSRRRHDNRRRSRSKSKPPKRDEKERKRRSPSPKPTKVHIGRLTRNVTKDHIMEIFSTYGKIKMIDMPVERMHPHLSKGYAYVEFENPDEAEKALKHMDGGG

SEQ ID NO: 41095 - protein, 96 aa, Homo sapiens
MHLTRHQRTHTGEKPYKCTLCGENFSHRSNLIRHQRIHTGEKPYTCHECGDSFSHSSNRIRHLRTHTGERPYKCSECGESFSRSSRLMSHQRTHTV

SEQ ID NO: 41096 - protein, 402 aa, Homo sapiens [sequence omitted]

SEQ ID NO: 41097 - protein, 283 aa, Homo sapiens [sequence omitted]

SEQ ID NO: 41098 - protein, 330 aa, Homo sapiens [sequence omitted]

SEQ ID NO: 41099 - protein, 242 aa, Homo sapiens
MEFLLNVTTAPEFRRWEVADLQPQLKIDKAVAFQNPQTHVIENLHAAAYRNALANPLYCPDYRIGKVTSEELHYFVQNHFTSARMALIGLGVSHPVLKQVAEQFLNMRGGLGLSGAKANYRGGEIREQNGDSLVHAAFVAESAVAGSAEANAFSVLQHVLGAGPHVKRGSNTTSHLHQAVAKATQQPFDVSAFNASYSDSGLFGIYTISQATAAGDVIKAAYNQVKTIAQGNLSNTDVQAAK

SEQ ID NO: 41100 - protein, 1288 aa, Homo sapiens
MSRVLKTLSTLSHLSSEGAAPDRGGLRSCFPPGPAAAPTPPPCPPPPASPAPPACAAEPVPGVAGLRNHGNTCFMNATLQCLSNTELFAEYLALGQYRAGRPEPSPDPEQPAGRGAQGQGEVTEQLAHLVRALWTLEYTPQHSRDFKTIVSKNALQYRGNSQHDAQEFLLWLLDRVHEDLNHSVKQSGQPPLKPPSETDMMPEGPSFPVCSTFVQELFQAQYRSSLTCPHCQKQSNTFDPFLCISLPIPLPHTRPLYVTVVYQGKCSHCMRIGVAVPLSGTVARLREAVSMETKIPTDQIVLTEMYYDGFHRSFCDTDDLETVHESDCIFAFETPEIFRPEGILSQRGIHLNNNLNHLKFGLDYHRLSSPTQTAAKQGKMDSPTSRAGSDKIVLLVCNRACTGQQGKRFGLPFVLHLEKTIAWDLLQKEILEKMKYFLRPTVCIQVCPFSLRVVSVVGITYLLPQEEQPLCHPIVERALKSCGPGGTAHVKLVVEWDKETRDFLFVNTEDEYIPDAESVRLQRERHHQPQTCTLSQCFQLYTKEERLAPDDAWRCPHCKQLQQGSITLSLWTLPDVLIIHLKRFRQEGDRRMKLQNMVKFPLTGLDMTPHVVKRSQSSWSLPSHWSPWRRPYGLGRDPEDYIYDLYAVCNHHGTMQGGHYTAYCKNSVDGLWYCFDDSDVQQLSEDEVCTQTAYILFYQRRTAIPSWSANSSVAGSTSSSLCEHWVSRLPGSKPASVTSAASSRRTSLASLSESVEMTGERSEDDGGFSTRPFVRSVQRQSLSSRSSVTSPLAVNENCMRPSWSLSAKLQMRSNSPSRFSGDSPIHSSASTLEKIGEAADDKVSISCFGSLRNLSSSYQEPSDSHSRREHKAVGRAPLAVMEGVFKDESDTRRLNSSVVDTQSKHSAQGDRLPPLSGPFDNNNQIAYVDQSDSVDSSPVKEVKAPSHPGSLAKKPESTTKRSPSSKGTSEPEKSLRKGRPALASQESSLSSTSPSSPLPVKVSLKPSRSRSKADSSSRGSGRHSSPAPAQPKKESSPKSQDSVSSPSPQKQKSASALTYTASSTSAKKASGPATRSPFPPGKSRTSDHSLSREGSRQSLGSDRASATSTSKPNSPRVSQARAGEGRGAGKHVRSSSMASLRSPSTSIKSGLKRDSKSEDKGLSFFKSALRQKETRRSTDLGKTALLSKKAGGSSVKSVCKNTGDDEAERGHQPPASQQPNANTTGKEQLVTKDPASAKHSLLSARKSKSSQLDSGVPSSPGGRQSAEKSSKKLSSSMQTSARPSQKPQ

SEQ ID NO: 41101 - protein, 137 aa, Homo sapiens
MKSDGFPTYHLACVVDDHHMGISHVLRGSEWLVSTAKHLLLYQALGWQPPHFAHLPLLLNRDGSKLSKRQGDVFLEHFAADGFLPDSLLDIITNCGSGFAENQMGRTLPELITQFNLTQVTCHSALLDLEKLPEFNR

SEQ ID NO: 41102 - protein, 405 aa, Homo sapiens
MGFCLSSLLAWCVDCFFSLCSFGVKLMDFQAHRRGGTLNRKHISPAFQPPLPPTDGSTVVPAGPEPPPQSSRAESSSGGGTVPSSAGILEQGPSPGDGSPPKPKDPVSAAVPAPGRNNSQIASGQNQPQAAAGSHQLSMGQPHNAAGPSPHTLRRAVKKPAPAPPKPGNPPPGHPGGQSSSGTSQHPPSLSPKPPTRSPSPPTQHTGQPPGQPSAPSQLSAPRRYSSSLSPIQAPNHPPPQPPTQATPLMHTKPNSQGPPNPMALPSEHGLEQPSHTPPQTPTPPSTPPLGKQNPSLPAPQTLAGGNPETAQPHAGTLPRPRPVPKPRNRPSVPPPPQPPGVHSAGDSSLTNTAPTASKIVTDSNSRVSEPHRSIFPEMHSDSASKDVPGRILLDIDNDTESTAL

SEQ ID NO: 41103 - protein, 179 aa, Homo sapiens
MDTTFWRLKDEDLLPSKYFEVDFPMIVTRKLHSIKLPTLLIAECVLVYMTPEQSANLLKWAANSFERAMFINYEQVNMGDRFGQIMIENLRRRQCDLAGVETCKSLESQKERLLSNGWETASAVDMMELYNRLPRAEVSRIESLEFLDEMELLEQLMRHYCLCWATKGGNELGLKEITY

SEQ ID NO: 41104 - protein, 30 aa, Homo sapiens
MQLLPPTPRLLAASLFVPHRLPLSTSWGPS

SEQ ID NO: 41105 - protein, 513 aa, Homo sapiens [sequence omitted]

SEQ ID NO: 41106 - protein, 152 aa, Homo sapiens
MGPPSLHSPTPSLGPLGALVLSSQHTSPDSCKSPWTLKAVRAARQAADFTLKVEVECSSLQEAVQAAEAGADLVLLDNFKPEELHPTATVLKAQFPSVAVEASGGITLDNLPQFCGPHIDVISMGMLTQAAPALDFSLKLFAKEVAPVPKIH

SEQ ID NO: 41107 - protein, 32 aa, Homo sapiens
MLPTAAGFSIWGQVGAAGSRAQVVRPMRRAGG

SEQ ID NO: 41108 - protein, 196 aa, Homo sapiens
MEKVANSVLFPCKYASSGCEITLPHTEKADHEELCEFRPYSCPCPGASCKWQGSLDAVMPHLMHQHKSITTLQGEDIVFLATDINLPGAVDWVMMQSCFGFHFMLVLEKQEKYDGHQQFFAIVQLIGTRKQAENFAYRLELNGHRRRLTWEATPRSIHEGIATAIMNSDCLVFDTSIAQLFAENGNLGINVTISMC

SEQ ID NO: 41109 - protein, 557 aa, Homo sapiens [sequence omitted]

SEQ ID NO: 41110 - protein, 25 aa, Homo sapiens
MFWVFLFIDYNTFPIKILSCHAEEG

SEQ ID NO: 41111 - protein, 350 aa, Homo sapiens
MKSRKLGIYRRCWLVFRKSSSKGPQRLEKYPDEKSVCLRGCPKVTEISNVKCVTRLPKETKRQAVAIIFTDDSARTFTCDSELEAEEWYKTLSVECLGSRLNDISLGEPDLLAPGVQCEQTDRFNVFLLPCPNLDVYGECKLQITHENIYLWDIHNPRVKLVSWPLCSLRRYGRDATRFTFEAGRMCDAGEGLYTFQTQEGEQIYQRVHSATLAIAEQHKRVLLEMEKNVRLLNKGTEHYSYPCTPTTMLPRSAYWHHITGSQNIAEASSYAGESLPCPTPTCQEALWRMRPIGQGSFDLALSSEPASVPTGEGYGAAQASSETDLLNRFILLKPKPSQGDSSEAKTPSQ

SEQ ID NO: 41112 - protein, 2136 aa, Homo sapiens
MDRILPDSGGVAKTMMESSLADFMQEVGYGFCASIEECRNIIVQFGVREVTAAQVARVLGMMARTHSGLTDGIPLQSISAPGSGIWSDGKDKSDGAQAHTWNVEVLIDVLKELNPSLNFKEVTYELDHPGFQIRDSKGLHNVVYGIQRGLGMEVFPVDLIYRPWKHAEGQLSFIQHSLINPEIFCFADYPCHTVATDILKAPPEDDNREIATWKSLDLIESLLRLAEVGQYEQVKQLFSFPIKHCPDMLVLALLQINTSWHTLRHELISTLMPIFLGNHPNSAIILHYAWHGQGQSPSIRQLIMHAMAEWYMRGEQYDQAKLSRILDVAQDLKALSMLLNGTPFAFVIDLAALASRREYLKLDKWLTDKIREHGEPFIQACMTFLKRRCPSILGGLAPEKDQPKSAQLPPETLATMLACLQACAGSVSQELSETILTMVANCSNVMNKARQPPPGVMPKGRPPSASSLDAISPVQIDPLAGMTSLSIGGSAAPHTQSMQGFPPNLGSAFSTPQSPAKAFPPLSTPNQTTAFSGIGGLSSQLPVGGLGTGSLTGIGTGALGLPAVNNDPFVQRKLGTSGLNQPTFQQTDLSQVWPEANQHFSKEIDDEANSYFQRIYNHPPHPTMSVDEVLEMLQRFKDSTIKREREVFNCMLRNLFEEYRFFPQYPDKELHITACLFGGIIEKGLVTYMALGLALRYVLEALRKPFGSKMYYFGIAALDRFKNRLKDYPQYCQHLASISHFMQFPHHLQEYIEYGQQSRDPPVKMQGSITTPGSIALAQAQAQAQVPAKAPLAGQVSTMVTTSTTTTVAKTVTVTRPTGVSFKKDVPPSINTTNIDTLLVATDQTERIVEPPENIQEKIAFIFNNLSQSNMTQKVEELKETVKEEFMPWVSQYLVMKRVSIEPNFHSLYSNFLDTLKNPEFNKMVLNETYRNIKVLLTSDKAAANFSDRSLLKNLGHWLGMITLAKNKPILHTDLDVKSLLLEAYVKGQQELLYVVPFVAKVLESSIRSVVFRPPNPWTMAIMNVLAELHQEHDLKLNLKFEIEVLCKNLALDINELKPGNLLKDKDRLKNLDEQLSAPKKDVKQPEELPPITTTTTSTTPATNTTCTATVPPQPQYSYHDINVYSLAGLAPHITLNPTIPLFQAHPQLKQCVRQAIERAVQELVHPVVDRSIKIAMTTCEQIVRKDFALDSEESRMRIAAHHMMRNLTAGMAMITCREPLLMSISTNLKNSFASALRTASPQQREMMDQAAAQLAQDNCELACCFIQKTAVEKAGPEMDKRLATEFELRKHARQEGRRYCDPVVLTYQAERMPEQIRLKVGGVDPKQLAVYEEFARNVPGFLPTNDLSQPTGFLAQPMKQAWATDDVAQIYDKCITELEQHLHAIPPTLAMNPQAQALRSLLEVVVLSRNSRDAIAALGLLQKAVEGLLDATSGADADLLLRYRECHLLVLKALQDGRAYGSPWCNKQITRCLIECRDEYKYNVEAVELLIRNHLVNMQQYDLHLAQSMENGLNYMAVAFAMQLVKILLVDERSVAHVTEADLFHTIETLMRINAHSRGNAPEGLPQLMEVVRSNYEAMIDRAHGGPNFMMHSGISQASEYDDPPGLREKAEYLLREWVNLYHSAAAGRDSTKAFSAFVGQMHQQGILKTDDLITRFFRLCTEMCVEISYRAQAEQQHNPAANPTMIRAKCYHNLDAFVRLIALLVKHSGEATNTVTKINLLNKVLGIVVGVLLQDHDVRQSEFQQLPYHRIFIMLLLELNAPEHVLETINFQTLTAFCNTFHILRPTKAPGFVYAWLELISHRIFIARMLAHTPQQKGWPMYAQLLIDLFKYLAPFLRNVELTKPMQILYKGTLRVLLVLLHDFPEFLCDYHYGFCDVIPPNCIQLRNLILSAFPRNMRLPDPFTPNLKVDMLSEINIAPRILTNFTGVMPPQFKKDLDSYLKTRSPVTFLSDLRSNLQVSNEPGNRYNLQLINALVLYVGTQAIAHIHNKGSTPSMSTITHSAHMDIFQNLAVDLDTEGRYLFLNAIANQLRYPNSHTHYFSCTMLYLFAEANTEAIQEQITRVLLERLIVNRPHPWGLLITFIELIKNPAFKFWNHEFVHCAPEIEKLFQSVAQCCMGQKQAQQVMEGTGAS

SEQ ID NO: 41113 - protein, 665 aa, Homo sapiens
MEQLDPTLLQMKTEVMEGTVAPEAEAAVDDTQIITLQVVNMEEQPINIGELQLVQVPVPVTVPVATTSVEELQGAYENEVSKEGLAESEPMICHTLPLPEGFQVVKVGANGEVETLEQGELPPQEDPSWQKDPDYQPPAKKTKKTKKSKLRYTEEGKDVDVSVYDFEEEQQEGLLSEVNAEKVVGNMKPPKPTKIKKKGVKKTFQCELCSYTCPRRSNLDRHMKSHTDERPHKCHLCGRAFRTVTLLRNHLNTHTGTRPHKCPDCDMAFVTSGELVRHRRYKHTHEKPFKCSMCDYASVEVSKLKRHIRSHTGERPFQCSLCSYASRDTYKLKRHMRTHSGEKPYECYICHARFTQSGTMKMHILQKHTENVAKFHCPHCDTVIARKSDLGVHLRKQHSYIEQGKKCRYCDAVFHERYALIQHQKSHKNEKRFKCDQCDYACRQERHMIMHKRTHTGEKPYACSHCDKTFRQKQLLDMHFKRYHDPNFVPAAFVCSKCGKTFTRRNTMARHADNCAGPDGVEGENGGETKKSKRGRKRKMRSKKEDSSDSENAEPDLDDNEDEEEPAVEIEPEPEPQPVTPAPPPAKKRRGRPPGRTNQPKQNQPTAIIQVEDQNTGAIENIIVEVKKEPDAEPAEGEEEEAQPAATDAPNGDLTPEMILSMMDR

SEQ ID NO: 41114 - protein, 663 aa, Homo sapiens
MEQLDPTLLQMKTEVMEGTVAPEAEAAVDDTQIITLQVVNMEEQPINIGELQLVQVPVPVTVPVATTSVEELQGAYENEVSKEGLAESEPMICHTLPLPEGFQVVKVGANGEVETLEQGELPPQEDPSWQKDPDYQPPAKKTKKTKKSKLRYTEEGKDVDVSVYDFEEEQQEGLLSEVNAEKVVGNMKPPKPTKIKKKGVKKTFQCELCSYTCPRRSNLDRHMKSHTDERPHKCHLCGRAFRTVTLLRNHLNTHTGTRPHKCPDCDMAFVTSGELVRHRRYKHTHEKPFKCSMCDYASVEVSKLKRHIRSHTGERPFQCSLCSYASRDTYKLKRHMRTHSGEKPYECYICHARFTQSGTMKMHILQKHTENVAKFHCPHCDTVIARKSDLGVHLRKQHSYIEQGKKCRYCDAVFHERYALIQHQKSHKNEKRFKCDQCDYACRQERHMIMHKRTHTGEKPYACSHCDKTFRQKQLLDMHFKRYHDPNFVPAAFVCSKCGKTFTRRNTMARHADNCAGPDGVEGENGGETKKSKRGRKRKMRSKKEDSSDSENAEPDLDDNEDEEEPAVEIEPEPEPQPVTPAPPPAKKRRGRPPGRTNQPKQNQPIIQVEDQNTGAIENIIVEVKKEPDAEPAEGEEEEAQPAATDAPNGDLTPEMILSMMDR

SEQ ID NO: 41115 - protein, 224 aa, Homo sapiens
MRIHKRGKPYQSSNYSIDFKHSTSLTQDESTLTEVKSYHCNDCGEDFSHITDFTDHQRIHTAENPYDCEQAFSQQAISHPGEKPYQCNVCGKAFKRSTSFIEHHRIHTGEKPYECNECGEAFSRRSSLTQHERTHTGEKPYECIDCGKAFSQSSSLIQHERTHTGEKPYECNECGRAFRKKTNLHDHQRIHTGEKPYSCKECGKNFSRSSALTKHQRIHTRNKL

SEQ ID NO: 41116 - protein, 726 aa, Homo sapiens
MKSSYPIWEDFNSKATKLHSQLRTTVLAAVAFLDAFQKVADMATNTRGATRDIGSALTRMCMRHRSIETKLRQFTNALLESLINPLQERIEDWKKAANQLDKDHAKEYKRARHEIKKKSSDTLKLQKKARKELLGKGDLQPQLDSALQDVNDMYLLLEETEKQAVRRALIEERGRFCTFITFLQPVVNGELTMLGEITHLQGIIDDLVVLTAEPHKLPPASEQVIKDLKGSDYSWSYQTPPSSPSSSSSRKSSMCSAPSSSSSAKGGGAPWPGGAQTYSPSSTCRYRSLAQPATTTARLSSVSSHDSGFVSQDATYSKPPSPMPSDITSQKSSSSASSEASETCQSVSECSSPTSDWSKVGSHEQPSGATLQRRKDRVELLRDTEPGPASGGTLGPSGEEAPRPRMSPATIAAKHGEEVSPAASDLAMVLTRGLSLEHQKSSRDSLQYSSGYSTQTTTPSCSEDTIPSQGSDYDCYSVNGDADSEGPPEFDKSSTIPRNSNIAQNYRRLIQTKRPASTAGLPTAGLPTATGLPSGAPPGVATIRRTPSTKPTVRRALSSAGPIPIRPPIVPVKTPTVPDSPGYMGPTRAGSEECVFYTDETASPLAPDLAKASPKRLSLPNTAWGSPSPEAAGYPGAGAEDEQQQLAANRHSLVEKLGELVAGAHALGEGQFPFPTALSATPTEETPTPPPAATSDPPAEDMLVAIRRGVRLRRTVTNDRSAPRIL

SEQ ID NO: 41117 - protein, 68 aa, Homo sapiens
MALYELFSHPVERSYRAGLCSKAALFLLLAAALTYIPPLLVAFRSHGEPAPAAVPRGSPGALGQGRPP

SEQ ID NO: 41118 - protein, 35 aa, Homo sapiens
MGVMTALVSFVQSAGDAIRAIYAGEQTGGRQNGGQ

SEQ ID NO: 41119 - protein, 309 aa, Homo sapiens
MEALALVGAWYTARKSITVICDFYSLIRLHFIPRLGSRADLIKQYGRWAVVSGATDGIGKAYAEELASRGLNIILISRNEEKLQVVAKDIADTYKVETDIIVADFSSGREIYLPIREALKDKDVGILVNNVGVFYPYPQYFTQLSEDKLWDIINVNIAAASLMVHVVLPGMVERKKGAIVTISSGSCCKPTPQLAAFSASKAYLDHFSRALQYEYASKGIFVQSLIPFYVATSMTAPSNFLHRCSWLVPSPKVYAHHAVSTLGISKRTTGYWSHSIQFLFAQYMPEWLWVWGANILNRSLRKEALSCTA

SEQ ID NO: 41120 - protein, 254 aa, Homo sapiens
MLSRVRGREGTGISTPQVASMNQRRVDFYLASIEDMLVAIGGRNENGALSSVETYSPKTDSWSYVAGLPRFTYGHAGTIYKDFVYISGGHDYQIGPYRKNLLCYDHRTDVWEERRPMTTARGWHSMCSLGDSIYSIGGSDDNIESMERFDVLGVEAYSPQCNQWTRVAPLLHANSESGVAVWEGRIYILGGYSWENTAFSKTVQVYDREADKWSRGVDLPKAIAGGSACVCALEPRPEDKKKKGKGKRHQDRGQ

SEQ ID NO: 41121 - protein, 123 aa, Homo sapiens
MYRERLRTLLVIAVVMSLLNALSTSGGSISWNDFVHEMLAKGEVQRVQVVPESDVVEVYLHPGAVVFGRPRLALMYRMQVANIDKFEEKLRAAEDELNIEAKDRIPVSYKRTGFFGKYVGCIC

SEQ ID NO: 41122 - protein, 289 aa, Homo sapiens
MDKEKDGIPISSLREITLLLRLRHPNIVELKEVVVGNHLESIFLVMGYCEQDLASLLENMPTPFSEAQVKCIVLQVLRGLQYLHRNFIIHRDLKVSNLLMTDKGCVKTADFGLARAYGVPVKPMTPKVVTLWYRAPELLLGTTTQTTSIDMWAVGCILAELLAHRPLLPGTSEIHQIDLIVQLLGTPSENIWPGFSKLPLVGQYSLRKQPYNNLKHKFPWLSEAGLRLLHFLFMYDPKKRATAGDCLESSYFKEKPLPCEPELMPTFPHHRNKRAAPATSEGQSKRCKP

SEQ ID NO: 41123 - protein, 14 aa, Homo sapiens
MLAPGDVSPAAGQD

SEQ ID NO: 41124 - protein, 2826 aa, Homo sapiens
MLEALKNSSGANLQGELSHIIRQLQACSLVPGFTDIFSESKEGLDIHSSMILRFLHRNRLSSAVMPYPMLEHCNNMCTMRSSVLKESLDQLVQKEKESPGDLTRSPEMDKLKSVAKCYAYIETSSNSADIDKMTNGETSSYWQSDGSACSHWIRLKMKPDVVLRHLSIAVAATDQSYMPQQVTVAVGRNASDLQEVRDVHIPSNVTGYVTLLENANVSQLYVQINIKRCLSDGCDTRIHGLRAVGFQRVKKSGVSVSDASAIWYWSLLTSLVTASMETNPAFVQTVLHNTQKALRHMPPLSLSPGSTDFSTFLSPNVLEEVDSFLIRITSCCSTPEVELTLLAFALARGSVAKVMSSLCTITDHLDTQYDASSLILSMASVRQNLLLKYGKPLQLTLQACDVKGKEDKSGPENLLVEPWTRDGFLTETGKTRASTIFSTGTESAFQVTQIRIMVRRGGIGAQCGLVFAYNSSSDKFCAEEHFKRFEKYDKWKLQELRQFVKSRIGCSSDDLGEDDPIGWFELEEEWDEADVKLQQCRVAKYLMVKFLCTRQESAERLGVQGLTISGYLRPARAEAEQSVTCAHCRKDTEESVCGATLLLRTLQFIQQLAHDLVQQKESGLKYKSFLDFAGLDLQIFWNFYSKLKQNPREECVSAQTLLLQLLQSCFSVLQGDVLAASEEEKAPIQSPKGVEAAKELYTHLCDVVDKVDGDSVPMEILKQEVRNTLLNGAAIFFPNRQTRRNHLFTMMNVTEQEHKQSLQLTFRSLCTYFSDKDPGGLLLLPEKNDLAKMNISEVLAVMDTLVSVAARECELLMLSGAPGEVGSVLFSLFWSVQGSLLSWCYLQLKSTDSGAKDLAVDLIEKYVGQFLASMRAILESLFSQYSGKTIVERLCNSVFSMAARQLVIFLLDFCTLDIPHCVLLREFSVLTELLKKLCSGPEGGLRKLDVETWQQEQPVVLHTWTKESAHNYENNCHEVSVFVSPGATYFEVEFDDRCETEKRYDYLEFTDARGRKTRYDTKVGTDKWPKKVTFKAGPRLQFLFHSDSSHNEWGYKFTVTACGLPDVAVSWGLDLQLLVSRLMGRLASQCMALKSVRQLGSNMVVPQAKMALVLSSPLWKPVFRHQVCPELELEASWPTHPHRNSKEVKNIPDDPCRHFLLDFAQSEPAQNFCGPYSELFKGFIQACRKQAPKTDIVAGSTIDQAVNATFAALVYRTPDLYEKLQKYVNSGGKIALSEEFAQVYSLADGIRIWMLEMKQKSLMSLGNEAEEKHSSEATEVNPESLAKECIEKSLLLLKFLPTGISSKESCEKLETADETSHLQPLNKRQRTSSVVEEHFQASVSPTEAAPPATGDQSPGLGTQPKLPSSSGLPAADVSPATAEEPLSPSTPTRRPPFTRGRLRLLSFRSMEEARLVPTVKEKYPVLKDVMDFIKDQSLSHRSVVKVLSLRKAQAQSILEVLKITQHCAESLGQPHCFHPPFILFLLELLTCQKDFTNYFGHLEGCGADLHKEIRDTYYQLVLFLVKAVKGFSSLNDRSLLPALSCVQTALLHLLDMGWEPNDLAFFVDIQLPDLLMKMSQENISVHDSVISQWSEEDELADAKQNSEWMDECQDGMFEAWYEKIAQEDPEKQRKMHMFIARYCDLLNVDISCDGCDEIAPWHRYRCLQCSDMDLCKTCFLGGVKPEGHGDDHEMVNMEFTCDHCQGLIIGRRMNCNVCDDFDLCYGCYAAKKYSYGHLPTHSITAHPMVTIRISDRQRLIQPYIHNYSWLLFAALALYSAHLASAEDVDGEKLDPQTRSSATTLRSQCMQLVGDCLMKAHQGKGLKALALLGVLPDGDSSLEDQALPVTVPTGASEEQLEKKAVQGAELSEAGNGKRAVHEEIRPVDFKQRNKADKGVSLSKDPSCQTQISDSPADASPPTGLPDAEDSEVSSQKPIEEKAVTPSPEQVFAECSQKRILGLLAAMLPPLKSGPTVPLIDLEHVLPLMFQVVISNAGHLNETYHLTLGLLGQLIIRLLPAEVDAAVIKVLSAKHNLFAAGDSSIVPDGWKTTHLLFSLGAVCLDSRVGLDWACSMAEILRSLNSAPLWRDVIATFTDHCIKQLPFQLKHTNIFTLLVLVGFPQVLCVGTRCVYMDNANEPHNVIILKHFTEKNRAVIVDVKTRKRKTVKDYQLVQKGGGQECGDSRAQLSQYSQHFAFIASHLLQSSMDSHCPEAVEATWVLSLALKGLYKTLKAHGFEEIRATFLQTDLLKLLVKKCSKGTGFSKTWLLRDLEILSIMLYSSKKEINALAEHGDLELDERGDREEEVERPVSSPGDPEQKKLDPLEGLDEPTRICFLMAHDALNAPLHILRAIYELQMKKTDYFFLEVQKRFDGDELTTDERIRSLAQRWQPSKSLRLEEQSAKAVDTDMIILPCLSRPARCDQATAESNPVTQKLISSTESELQQSYAKQRRSKSAALLHKELNCKSKRAVRDYLFRVNEATAVLYARHVLASLLAEWPSHVPVSEDILELSGPAHMTYILDMFMQLEEKHEWEKILQKVLQGCREDMLGTMALAACQFMEEPGMEVQVRESKHPYNNNTNFEDKVHIPGAIYLSIKFDSQCNTEEGCDELAMSSSSDFQQDRHSFSGSQQKWKDFELPGDTLYYRFTSDMSNTEWGYRFTVTAGHLGRFQTGFEILKQMLSEERVVPHLPLAKIWEWLVGVACRQTGHQRLKAIHLLLRIVRCCGHSDLCDLALLKPLWQLFTHMEYGLFEDVTQPGILLPLHRALTELFFVTENRAQELGVLQDYLLALTTDDHLLRCAAQALQNIAAISLAINYPNKATRLWNVEC

SEQ ID NO: 41125 - protein, 950 aa, Homo sapiens
MLEALKNSSGANLQGELSHIIRQLQACSLVPGFTDIFSESKEGLDIHSSMILRFLHRNRLSSAVMPYPMLEHCNNMCTMRSSVLKESLDQLVQKEKESPGDLTRSPEMDKLKSVAKCYAYIETSSNSADIDKMTNGETSSYWQSDGSACSHWIRLKMKPDVVLRHLSIAVAATDQSYMPQQVTVAVGRNASDLQEVRDVHIPSNVTGYVTLLENANVSQLYVQINIKRCLSDGCDTRIHGLRAVGFQRVKKSGVSVSDASAIWYWSLLTSLVTASMETNPAFVQTVLHNTQKALRHMPPLSLSPGSTDFSTFLSPNVLEEVDSFLIRITSCCSTPEVELTLLAFALARGSVAKVMSSLCTITDHLDTQYDASSLILSMASVRQNLLLKYGKPLQLTLQACDVKGKEDKSGPENLLVEPWTRDGFLTETGKTRASTIFSTGTESAFQVTQIRIMVRRGGIGAQCGLVFAYNSSSDKFCAEEHFKRFEKYDKWKLQELRQFVKSRIGCSSDDLGEDDPIGWFELEEEWDEADVKLQQCRVAKYLMVKFLCTRQESAERLGVQGLTISGYLRPARAEAEQSVTCAHCRKDTEESVCGATLLLRTLQFIQQLAHDLVQQKESGLKYKSFLDFAGLDLQIFWNFYSKLKQNPREECVSAQTLLLQLLQSCFSVLQGDVLAASEEEKAPIQSPKGVEAAKELYTHLCDVVDKVDGDSVPMEILKQEVRNTLLNGAAIFFPNRQTRRNHLFTMMKNVTEQEHKQSLQLTFRSLCTYFSDKDPGGLLLLPEKNDLAKMNISEVLAVMDTLVSVAARECELLMLSGAPGEVGSVLFSLFWSVQGSLLSWCYLQLKSTDSGAKDLAVDLIEKYVGQFLASMRAILESLFSQYSGKTIVERLCNSVFSMAARQLVIFLLDFCTLDIPHCVLLREFSVLTELLKKLCSGPEGGLRKVTRVST

SEQ ID NO: 41126 - protein, 626 aa, Homo sapiens
MVLELPKRWGKNSEFEGGKSTVNCSTTPVAERFFTSSTSLTLKHAAWYPSEILDPHVVLLTSDNVIRIYSLREPQTPTNVIILSEAEEESLVLNKGRAYTASLGETAVAFDFGPLAAVPKTLFGQNGKDEVVAYPLYILYENGETFLTYISLLHSPGNIGKLLGPLPMHPAAEDNYGYDACAVLCLPCVPNILVIATESGMLYHCVVLEGEEEDDHTSEKSWDSRIDLIPSLYVFECVELELALKLASGEDDPFDSDFSCPVKLHRDPKCPSRYHCTHEAGVHSVGLTWIHKLHKFLGSDEEDKDSLQELSTEQKCFVEHILCTKPLPCRQPAPIRGFWIVPDILGPTMICITSTYECLIWPLLSTVHPASPPLLCTREDVEVAESPLRVLAETPDSFEKHIRSILQRSVANPAFLNCFTQLRKIKVETLFLRASEKDIAPPPEECLQLLSRATQVFREQYILKQDLAKEEIQRRVKLLCDQKKKQLEDLSYCREERKSLREMAERLADKYEEAKEKQEDIMNRMKKLLHSFHSELPVLSDSERDMKKELQLIPDQLRHLGNAIKQVTMKKDYQQQKMEKVLSLPKPTIILSAYQRKCIQSILKEEGEHIREMVKQINDIRNHVNF

SEQ ID NO: 41127 - protein, 300 aa, Homo sapiens
MLDSLLALGGLVLLRDSVEWEGRSLLKALVKKSALCGEQVHILGCEVSEEEFREGFDSDINNRLVYHDFFRDPLNWSKTEEAFPGGPLGALRAMCKRTDPVPVTIALDSLSWLLLRLPCTTLCQVLHAVSHQDSCPGDSSSVGKVSVLGLLHEELHGPGPVGALSSLAQTEVTLGGTMGQASAHILCRRPRQRPTDQTQWFSILPDFSLDLQEGPSVESQPYSDPHIPPVDPTTHLTFNLHLSKKEREARDSLILPFQFSSEKQQALLRPRPGQATSHIFYEPDAYDDLDQEDPDDDLDI

SEQ ID NO: 41128 - protein, 263 aa, Homo sapiens
MLDSLLALGGLVLLRDSVEWEGRSLLKALVKKSALCGEQVHILGCEVSEEEFREGFDSDINNRLVYHDFFRDPLNWSKTEEAFPGGPLGALRAMCKRTDPVPVTIALDSLSWLLLRLPCTTLCQVLHAVSHQDSCPGDSSSVGKVSVLGLLHEELHGPGPVGALSSLAQTEVTLGGTMGQASAHILCRRPRQRPTDQTQWFSILPDFSLDLQEGPSVESQPYSDPHIPPVSKNAKARTRKCSLVSGHGRENKSCRGWGWGQGF

SEQ ID NO: 41129 - protein, 163 aa, Homo sapiens
MLDSLLALGGLVLLRDSVEWEGRSLLKALVKKSALCGEQVHILGCEVSEEEFREGFDSDINNRLVYHDFFRDPLNWSKTEEAFPGGPLGALRAMCKRTDPVPVTIALDSLSWLLLRLPCTTLCQVLHAVSHQDSCPGETPPSLFPLIHLPLPRSVPLFLSTLE

SEQ ID NO: 41130 - protein, 301 aa, Homo sapiens
MNLSESLLRGIYAYGFEKPSAIQQRAILPCIKGYDVIAQAQSGTGKTATFAISILQQIELDLKATQALVLAPTRELAQQIQKVVMALGDYMGASCHACIGGTNVRAEVQKLQMEAPHIIVGTPGRVFDMLNRRYLSPKYIKMFVLDEADEMLSRGFKDQIYDIFQKLNSNTQVVLLSATMPSDVLEVTKKFMRDPIRILVKKEELTLEGIRQFYINVEREEWKLDTLCDLYETLTITQAVIFINTRRKVDWLTEKMHARDFTVSAMHGDMDQKERDVIMREFRSGSSRVLITTDLLVSRGN

SEQ ID NO: 41131 - protein, 327 aa, Homo sapiens [sequence omitted]

SEQ ID NO: 41132 - protein, 138 aa, Homo sapiens
MARSNKPKSWTFFLSLTSWAAPWPSLLLVRHCTLQGPCLLLTCSQAHPKTGLSLGRTLVFRDTSEIYVVTVPHQSSFFPPLAPAWCLRSEGVSSVLLGVSSAEQLIEHLGALQVLSQLTPQTVMEIDGLLGNKPHSKK

SEQ ID NO: 41133 - protein, 87 aa, Homo sapiens [sequence omitted]

SEQ ID NO: 41134 - protein, 167 aa, Homo sapiens
MGAIDVSDLRPVPDNQEVFCHPVTDQSLIVELLELQAHVRGEAAARYHFEDVGGVQGARAVHVESVQPLSLENLALRGRCQEAWVLSGKQQIAKENQQVAKDVTLHQALLRLPQYQTDLLLTFNQPPPDNRSSLGPENLSPAPWSLGDFEQLVTSLTLHDPNIFGPQ

SEQ ID NO: 41135 - protein, 453 aa, Homo sapiens [sequence omitted]

SEQ ID NO: 41136 - protein, 77 aa, Homo sapiens [sequence omitted]

SEQ ID NO: 41137 - protein, 11 aa, Homo sapiens
MRLWPPLATHS

SEQ ID NO: 41138 - protein, 707 aa, Homo sapiens
MSGPRPGAERLAVPGPDGGGGTGPWWAAGGRGPREVSPGAGTEVQDALERALPELQQALSALKQAGGARAVGAGLAEVFQLVEEAWLLPAVGREVAQGLCDAIRLDGGLDLLLRLLQAPELETRVQAARLLEQILVAENRDRVARIGLGVILNLAKEREPVELARSVAGILEHMFKHSEETCQRLVAAGGLDAVLYWCRRTDPALLRHCALALGNCALHGGQAVQRRMVEKRAAEWLFPLAFSKEDELLRLHACLAVAVLATNKEVEREVERSGTLALVEPLVASLDPGRFARCLVDASDTSQGRGPDDLQRLVPLLDSNRLEAQCIGAFYLCAEAAIKSLQGKTKVFSDIGAIQSLKRLVSYSTNGTKSALAKRALRLLGEEVPRPILPSVPSWKEAEVQTWLQQIGFSKYCESFREQQVDGDLLLRLTEEELQTDLGMKSGITRKRFFRELTELKTFANYSTCDRSNLADWLGSLDPRFRQYTYGLVSCGLDRSLLHRVSEQQLLEDCGIHLGVHRARILTAAREMLHSPLPCTGGKPSGDTPDVFISYRRNSGSQLASLLKVHLQLHGFSVFIDVEKLEAGKFEDKLIQSVMGARNFVLVLSPGALDKCMQDHDCKDWVHKEIVTALSCGKNIVPIIDGFEWPEPQVLPEDMQAVLTFNGIKWSHEYQEATIEKIIRFLQGRSSRDSSAGSDTSLEGAAPMGPT

SEQ ID NO: 41139 - protein, 638 aa, Homo sapiens
MSLVSEEFPEEVPPRAEEITIPADVTPERVPTHIVDYSEAEQSDEQLHQEISQANVICIVYAVNNKHSIDKVTSRWIPLINERTDKDSRLPLILVGNKSDLVEYSSMETILPIMNQYTEIETCVECSAKNLKNISELFYYAQKAVLHPTGPLYCPEEKEMKPACIKALTRIFKISDQDNDGTLNDAELNFFQRICFNTPLAPQALEDVKNVVRKHISDGVADSGLTLKGFLFLHTLFIQRGRHETTWTVLRRFGYDDDLDLTPEYLFPLLKIPPDCTTELNHHAYLFLQSTFDKHDLDRDCALSPDELKDLFKVFPYIPWGPDVNNTVCTNERGWITYQGFLSQWTLTTYLDVQRCLEYLGYLGYSILTEQESQASAVTVTRDKKIDLQKKQTQRNVFRCNVIGVKNCGKSGVLQALLGRNLMRQKKIREDHKSYYAINTVYVYGQEKYLLLHDISESEFLTEAEIICDVVCLVYDVSNPKSFEYCARIFKQHFMDSRIPCLIVAAKSDLHEVKQEYSISPTDFCRKHKMPPPQAFTCNTADAPSKDIFVKLTTMAMYPHARLRCMCTCNRCTFCICQNFLNSDLLQSVKNKIFTAVLNRHVTQADLKSSTFWLRASFGATVFAVLGFAMYKALLKQR

SEQ ID NO: 41140 - protein, 990 aa, Homo sapiens
MDTVSMPEFMANLRLRFEKGRIYTFIGEVVVSVNPYKLLNIYGRDTIEQYKGRELYERPPHLFAIADAAYKAMKRRSKDTCIVISGESGAGKTEASKYIMQYIAAITNPSQRAEVERVKNMLLKSNCVLEAFGNAKTNRNDNSSRFGKYMDINFDFKGDPIGGHINNYLLEKSRVIVQQPGERSFHSFYQLLQGGSEQMLRSLHLQKSLSSYNYIHVGAQLKSSINDAAEFRVVADAMKVIGFKPEEIQTVYKILAAILHLGNLKFVVDGDTPLIENGKVVSIIAELLSTKTDMVEKALLYRTVATGRDIIDKQHTEQEASYGRDAFAKAIYERLFCWIVTRINDIIEVKNYDTTIHGKNTVIGVLDIYGFEIFDNNSFEQFCINYCNEKLQQLFIQLVLKQEQEEYQREGIPWKHIDYFNNQIIVDLVEQQHKGIIAILDDACMNVGKVTDEMFLEALNSKLGKHAHFSSRKLCASDKILEFDRDFRIRHYAGDVVYSVIGFIDKNKDTLFQDFKRLMYNSSNPVLKNMWPEGKLSITEVTKRPLTAATLFKNSMIALVDNLASKEPYYVRCIKPNDKKSPQIFDDERCRHQVEYLGLLENVRVRRAGFAFRQTYEKFLHRYKMISEFTWPNHDLPSDKEAVKKLIERCGFQDDVAYGKTKIFIRTPRTLFTLEELRAQMLIRIVLFLQKVWRGTLARMRYKRTKAALTIIRYYRRYKVKSYIHEVARRFHGVKTMRDYGKHVKWPSPPKVLRRFEEALQTIFNRWRASQLIKSIPASDLPQVRAKVAAVEMLKGQRADLGLQRAWEGNYLASKPDTPQTSGTFVPVANELKRKDKYMNVLFSCHVRKVNRFSKVEDRAIFVTDRHLYKMDPTKQYKVMKTIPLYNLTGLSVSNGKDQLVVFHTKDNKDLIVCLFSKQPTHESRIGELVGVLVNHFKSEKRHLQVNVTNPVQCSLHGKKCTVSVETRLNQPQPDFTKNRSGFILSVPGN

SEQ ID NO: 41141 - protein, 568 aa, Homo sapiens
MFPVAGGIRPPQAGLMPMQQQGFPMVSVMQPNMQGIMGMNYSSQMSQGPIAMQAGIPMGPMPAAGMPYLGQAPFLGMRPPGPQYTPDMQKQFAEEQQKRFEQQQKLLEEERKRRQFEEQKQKLRLLSSVKPKTGEKSRDDALEAIKGNLDGFSRDAKMHPTPASHPKKPDCPTSSHSTKTVSPSPAFLDEEEFSDFMQGPVEVPPCGPSSTSQPFQSFHPSTPLGQLHTQKAGTQPLPPSQSPVPFALHGVPGQIPYFSTASASHSVPEAGPSLEEKFLVSCDISTSGQEQIKLNTSEVGHKALGPGSSKKYPSLMASNGVAVDGCVSGTTTAEAENTSDQNLSIEESGVGVFPSQDPAQPRMPPWIYNESLVPDAYKKILETTMTPTGIDTAKLYPILMSSGLPRETLGQIWALANRTTPGKLTKEELYTVLAMIAVTQRGVPAMSPDALNQFPAAPIPTLSGFSMTLPTPVSQPTVIPSGPAGSMPLSLGQPVMGINLVGPVGGAAAQASSGFIPTYPANQVVKPEEDDFQDFQDASKSGSLDDSFSDFQELPASSKTSNSQHGNR

SEQ ID NO: 41142 - protein, 246 aa, Homo sapiens [sequence omitted]

SEQ ID NO: 41143 - protein, 311 aa, Homo sapiens [sequence omitted]

SEQ ID NO: 41144 - protein, 316 aa, Homo sapiens
MLRFVQKRGNSTVYEWRTGTEPSVVERPHLEELPEQVAEDAIDWGDFGVEAVSEGTDSGISAEAAGIDWGIFPESDSKDPGGDGIDWGDDAVALQITVLEAGTQAPEGVARGPDALTLLEYTETRNQFLDELMELEIFLAQRAVELSEEADVLSVSQFQLAPAILQGQTKEKMVTMVSVLEDLIGKLTSLQLQHLFMILASPRYVDRVTEFLQQKLKQSQLLALKKELMVQKQQEALEEQAALEPKLDLLLEKTKELQKLIEADISKRQKTRLTGRWKATGRKRHLMVILALSMFSTRSCGDWPCGLSGENHRFSF

SEQ ID NO: 41145 - protein, 585 aa, Homo sapiens [sequence omitted]

SEQ ID NO: 41146 - protein, 54 aa, Homo sapiens
MGPTTRSPTDTLTSEHSKQARRCRRSFGTVSRAIFADGKNNREIDDHSLCTRRK

SEQ ID NO: 41147 - protein, 283 aa, Homo sapiens
MNRAQNKRKYSASSGGLCEEATAAKVASWDFVEATQRTNCSCLRHKNLKSRNAGQQGQAPSLGQQQQILPKHKTNEKQEKSEKPQKRPLTPFHHRVSVSDDVGMDADSASQRLVISAPDSQVRFSNIRTNDVAKTPQMHGTEMANSPQPPPLSPHPCDVVDEGVTKTPSTPQSQHFYQMPTPDPLVPSKPMEDRIDSLSQSFPPQYQEAVEPTVYVGTAVNLEEDEANIAWKYYKFPKKKDVEFLPPQLPSDKFKDDPVGPFGQESVTSVTEYVFFLIVTIII

SEQ ID NO: 41148 - protein, 438 aa, Homo sapiens
MEDSVTESPQRVIITEDDEDETTVELEGQDENQEGDFEDADTQEGDTESEPYDDEEFEGYEDKPDTSSSKNKDPITIVDVPAHLQNSWESYYLEILMVTGLLAYIMNYIIGKNKNSRLAQAWFNTHRELLESNFTLVGDDGTNKEATSTGKLNQENEHIYNLWCSGRVCCEGMLIQLRFLKRQDLLNVLARMMRPVSDQVQIKVTMNDEDMDTYVFAVGTRKALVRLQKEMQDLSEFCSDKPKSGAKYGLPDSLAILSEMGEVTDGMMDTKMVHFLTHYADKIESVHFSDQFSGPKIMQEEGQPLKLPDTKRTLLFTFNVPGSGNTYPKDMEALLPLMNMVIYSIDKAKKFRLNREGKQKADKNRARVEENFLKLTHVQRQEAAQSRREEKKRAEKERIMNEEDPEKQRRLEEAALRREQKKLEKKQMKMKQIKVKAM

SEQ ID NO: 41149 - protein, 412 aa, Homo sapiens
MTPAEREENQRMIVCNQVMKYILDKIDKEEKQAAKKRKREESVEQKRSKQNATKLSALLFKHKEQLRAEILKKRALLDKDLQIEVQEELKRDLKIKKEKDLMQLAQATAVAAPCPPVTPAPPAPPAPPPSPPPPPAVQHTGLLSTPTLPAASQKRKREEEKDSSSKSKKKKMISTTSKETKKDTKLYCICKTPYDESKFYIGCDLCTNWYHGECVGITEKEAKKMDVYICNDCKRAQEGSSEELYCICRTPYDESQFYIGCDRCQNWYHGRCVGILQSEAELIDEYVCPQCQSTEDAMTVLTPLTEKDYEGLKRVLRSLQAHKMAWPFLEPVDPNDAPDYYGVIKEPMDLATMEERVQRRYYEKLTEFVADMTKIFDNCRYYNPSDSPFYQCAEVLESFFVQKLKGFKASRL

SEQ ID NO: 41150 - protein, 912 aa, Homo sapiens
MVGERYRDLIEAADTIGQMRRCAVGLVDAVKATDQYCARLRQAGSAAPRPPRAQQPQQPSQEKFYSMAAQIKLLLEIPEKIWSSMEASQCLHATQLYLLCCHLHSLLQLDSSSSRYSPVLSRFPILIRQVAAASHFRSTILHESKMLLKCQGVSDQAVAEALCSIMLLEESSPRQALTDFLLARKATIQKLLNQPHHGAGIKAQICSLVELLATTLKQAHALFYTLPEGLLPDPALPCGLLFSTLETITGQHPAGKGTGVLQEEMKLCSWFKHLPASIVEFQPTLRTLAHPISQEYLKDTLQKWIHMCNEDIKNGITNLLMYVKSMKGLAGIRDAMWELLTNESTNHSWDVLCRRLLEKPLLFWEDMMQQLFLDRLQTLTKEGFDSISSSSKELLVSALQELESSTSNSPSNKHIHFEYNMSLFLWSESPNDLPSDAAWVSVANRGQFASSGLSMKAQAISPCVQNFCSALDSKLKVKLDDLLAYLPSDDSSLPKDVSPTQAKSSAFDRYADAGTVQEMLRTQSVACIKHIVDCIRAELQSIEEGVQGQQDALNSAKLHSVLFMARLCQSLGELCPHLKQCILGKSESSEKPAREFRALRKQGKVKTQEIIPTQAKWQEVKEVLLQQSVMGYQVWSSAVVKVLIHGFTQSLLLDDAGSVLATATSWDELEIQEEAESGSSVTSKIRLPAQPSWYVQSFLFSLCQEINRVGGHALPKVTLQEMLKSCMVQVVAAYEKLSEEKQIKKEGAFPVTQNRALQLLYDLRYLNIVLTAKGDEVKSGRSKPDSRIEKVTDHLEALIDPFDLDVFTPHLNSNLHRLVQRTSVLFGLVTGTENQLAPRSSTFNSQEPHNILPLASSQIRFGLLPLSMTSTRKAKSTRNIETKAQVGAKSKRLIRGWVPTSHRATHDQLPFK

SEQ ID NO: 41151 - protein, 742 aa, Homo sapiens
MTSADVMWQDGSVECNIRSNDLFPVHHLDNNEFCPGDFVVDKRVQSCPDPAVYGVVQSGDHIGRTCMVKWFKLRPSGDDVELIGEEEDVSVYDIADHPDFRFRTTDIVIRIGNTEDGAPHKEDEQPSVGQVARVDVSSKVEVVWADNSKTIILPQHLYNIESEIEESDYDSVEGSTSGASSDEWEDDSDSWETDNGLVEDEHPKIEEPPIPPLEQPVAPEDKGVVISEEAATAAVQGAVAMAAPMAGLMEKAGKDGPPKSFRELKEAIKILESLKNMTVEQLLTGSPTSPTVEPEKPTREKKFLDDIKKLQENLKKTLDNVAIVEEEKMEAVPDVERKEDKPEGQSPVKAEWPSETPVLCQQCGGKPGVTFTSAKGEVFSVLEFAPSNHSFKKIEFQPPEAKKFFSTVRKEMALLATSLPEGIMVKTFEDRMDLFSALIKGPTRTPYEDGLYLFDIQLPNIYPAVPPHFCYLSQCSGRLNPNLYDNGKVCVSLLGTWIGKGTERWTSKSSLLQVLISIQGLILVNEPYYNEAGFDSDRGLQEGYENSRCYNEMALIRVVQSMTQLVRRPPEVFEQEIRQHFSTGGWRLVNRIESWLETHALLEKAQALPNGVPKASSSPEPPAVAELSDSGQQEPEDGGPAPGEASQGSDSEGGAQGLASASRDHTDQTSETAPDASVPPSVKPKKRRKSYRSFLPEKSGYPDIGFPLFPLSKGFIKSIRGVLTQFRAALLEAGMPECTEDK

SEQ ID NO: 41152 - protein, 35 aa, Homo sapiens
MENWGSFLPPLPRRSFYRKSSSSQPARASPTSWRP

SEQ ID NO: 41153 - protein, 557 aa, Homo sapiens
MDFVAGLSVGLTAIPQALAYAEVAGLPPQYGLYSAFMGCFVYFFLGTSRDVTLGPTAIMSLLVSFYTFHEPAYAVLLAFLSGCIQLAMGVLRLGFLLDFISYPVIKGFTSAAAVTIGFGQIKNLLGLQNIPRPFFLQVYHTFLRIAETRVGDAVLGLVCMLLLLVLKLMRDHVPPVHPEMPPGVRLSRGLVWAATTARNALVVSFAALVAYSFEVTGYQPFILTGETAEGLPPVRIPPFSVTTANGTISFTEMVQDMGAGLAVVPLMGLLESIAVAKAFASQNNYRIDANQELLAIGLTNMLGSLVSSYPVTGSFGRTAVNAQSGVCTPAGGLVTGVLVLLSLDYLTSLFYYIPKSALAAVIIMAVAPLFDTKIFRTLWRVKRLDLLPLCVTFLLCFWEVQYGILAGALVSLLMLLHSAARPETKVSEGPVLVLQPASGLSFPAMEALREEILSRALEVSPPRCLVLECTHVCSIDYTVVLGLGELLQDFQKQGVALAFVGLQVPVLRVLLSADLKGFQYFSTLEEAEKHLRQEPGTQPYNIREDSILDQKVALLKA

SEQ ID NO: 41154 - protein, 627 aa, Homo sapiens [sequence omitted]

SEQ ID NO: 41155 - protein, 28 aa, Homo sapiens
MNNSGGADLRAVTLTAKVCSFTFEPARP

SEQ ID NO: 41156 - protein, 334 aa, Homo sapiens
MATCSSDQSVKVWDKSESGDWHCTASWKTHSGSVWRVTWAHPEFGQVLASCSFDRTAAVWEEIVGESNDKLRGQSHWVKRTTLVDSRTSVTDVKFAPKHMGLMLATCSADGIVRIYEAPDVMNLSQWSLQHEISCKLSCSCISWNPSSSRAHSPMIAVGSDDSSPNAMAKVQIFEYNENTRKYAKAETLMTVTDPVHDIAFAPNLGRSFHILAIATKDVRIFTLKPVRKELTSSGGPTKFEIHIVAQFDNHNSQVWRVSWNITGTVLASSGDDGCVRLWKANYMDNWKCTGILKGNGSPVNGSSQQGTSNPSLGSTIPSLQNSLNGSSAGRKHS

SEQ ID NO: 41157 - protein, 17 aa, Homo sapiens
MFSRILKAKNSVNLGIN

SEQ ID NO: 41158 - protein, 175 aa, Homo sapiens
MNLSDVELIPLPLEPQVKIRGIIPETATLFKSALMPAQLFFKTEDGGKYPVIFKHGDDLRQDQLILQIISLMDKLLRKENLDLKLTPYKVLATSTKHGFMQFIQSVPVAEVLDTEGSIQNFFRKYAPSENGPNGISAEVMDTYVKSCAGYCVITYILGVGDRHLDNLLLTKTGNN

SEQ ID NO: 41159 - protein, 262 aa, Homo sapiens
MDCPALPPGWKKEEVIRKSGLSAGKSDVYYFSPSGKKFRSKPQLARYLGNTVDLSSFDFRTGKMMPSKLQKNKQRLRNDPLNQNKGKPDLNTTLPIRQTASIFKQPVTKVTNHPSNKVKSDPQRMNEQPRQLFWEKRLQGLSASDVTEQIIKTMELPKGLQGVGPGSNDETLLSAVASALHTSSAPITGQVSAAVEKNPAVWLNTSQPLCKAFIVTDEDIRKQEERVQQVRKKLEEALMADILSRAADTEEMDIEMDSGDEA

SEQ ID NO: 41160 - protein, 1070 aa, Homo sapiens [sequence omitted]

SEQ ID NO: 41161 - protein, 813 aa, Homo sapiens
MNETGHYRDDNRDKDSEKTKRWSKPRKRSLMEMEGKEDAQKVLKCMYCGHSFESLQDLSVHMIKTKHYQKVPLKEPVPAITKLVPSTKKRALQDLAPPCSPEPAGMAAEVALSESAKDQKAANPYVTPNNRYGYQNGASYTWQFEARKAQILKCMECGSSHDTLQQLTAHMMVTGHFLKVTTSASKKGKQLVLDPVVEEKIQSIPLPPTTHTRLPASSIKKQPDSPAGSTTSEEKKEPEKEKPPVAGDAEKIKEESEDSLEKFEPSTLYPYLREEDLDDSPKGGLDILKSLENTVSTAISKAQNGAPSWGGYPSIHAAYQLPGTVKPLPAAVQSVQVQPSYAGGVKSLSSAEHNALLHSPGSLTPPPHKSNVSAMEELVEKVTGKVNIKKEERPPEKEKSSLAKAASPIAKENKDFPKTEEVSGKPQKKGPEAETGKAKKEGPLDVHTPNGTEPLKAKVTNGCNNLGIIMDHSPEPSFINPLSALQSIMNTHLGKVSKPVSPSLDPLAMLYKISNSMLDKPVYPATPVKQADAIDRYYYENSDQPIDLTKSKNKPLVSSVADSVASPLRESALMDISDMVKNLTGRLTPKSSTPSTVSEKSDADGSSFEEALDELSPVHKRKGRQSNWNPQHLLILQAQFASSLRETTEGKYIMSDLGPQERVHISKFTGLSMTTISHWLANVKYQLRRTGGTKFLKNLDTGHPVFFCNDCASQFRTASTYISHLETHLGFSLKDLSKLPLNQIQEQQNVSKVLTNKTLGPLGATEEDLGSTFQCKLCNRTFASKHAVKLHLSKTHGKSPEDHLIYVTELEKQ

SEQ ID NO: 41162 - protein, 25 aa, Homo sapiens
MLLFPLFLLLSLDLCQKEGYAESLI

SEQ ID NO: 41163 - protein, 428 aa, Homo sapiens
MEVAVCTDSAAPMWSCIVWELHSGANLLTYRGGQAGPRGLALLNGEYLLAAQLGKNYISAWELQRKDQLQQKIMCPGPVTCLTASPNGLYVLAGVAESIHLWEVSTGNLLVILSRHYQDVSCLQFTGDSSHFISGGKDCLVLVWSLCSVLQADPSRIPAPRHVWSHHALPITDLHCGFGGPLARVATSSLDQTVKLWEVSSGELLLSVLFDVSIMAVTMDLAEHHMFCGGSEGSIFQVDLFTWPGQRERSFHPEQDAGKVFKGHRNQVTCLSVSTDGSVLLSGSHDETVRLWDVQSKQCIRTVALKGPVTNAAILLAPVSMLSSDFRPSLPLPHFNKHLLGAEHGDEPRHGGLTLRLGLHQQGSEPSYLDRTEQLQAVLCSTMEKSVLGGQDQLRVRVTELEDEVRNLRKINRDLFDFSTRFITRPAK

SEQ ID NO: 41164 - protein, 193 aa, Homo sapiens
MQLCHDRGYLVTQDELDQTLEEFKAQSGDKPSEGRPRRTDLTVLVAHNDDPTDQMFVFFPEEPKVGIKTIKVYCQRMQEENITRALIVVQQGMTPSAKQSLVDMAPKYILEQFLQQELLINITEHELVPEHVVMTKEEVTELLARYKLRENQLPRIQAGDPVARYFGIKRGQVVKIIRPSETAGRYITYRLVQ

SEQ ID NO: 41165 - protein, 72 aa, Homo sapiens
MSLGRLCRLLKPALLCGALAAPGLAGTMCASRDDWRCARSMHEFSAKDIDGHMVNLDKYRGFVCIVTNVASQ

SEQ ID NO: 41166 - protein, 438 aa, Homo sapiens [sequence omitted]

SEQ ID NO: 41167 - protein, 398 aa, Homo sapiens [sequence omitted]

SEQ ID NO: 41168 - protein, 367 aa, Homo sapiens [sequence omitted]

SEQ ID NO: 41169 - protein, 57 aa, Homo sapiens
MWLVFLSCYLLCICSPCRAAKRRPEEKEPEKVNPQISDEKDEDEKEEKRRKTTPKEP

SEQ ID NO: 41170 - protein, 190 aa, Homo sapiens
MDKWGFGATLLEICFDGEAPLQSRSPSEKEHFYQRQHRLPEPSCPQLATLTSQCLTYEPTQRPSFRTILRDLTRLQPHNLADVLTVNPDSPASDPTVFHKRYLKKIRDLGEGHFGKVSLYCYDPTNDGTGEMVAVKALKADCGPQHRSGWKQEIDILRTLYHEHIIKYKGCCEDQGGRDPASPRDLRGRG

SEQ ID NO: 41171 - protein, 864 aa, Homo sapiens
MEELIPLVNKLQDAFSSIGQSCHLDLPQIAVVGGQSAGKSSVLENFVGRDFLPRGSGIVTRRPLILQLIFSKTEHAEFLHCKSKKFTDFDEVRQEIEAETDRVTGTNKGISPVPINLRVYSPHVLNLTLIDLPGITKVPVGDQPPDIEYQIKDMILQFISRESSLILAVTPANMDLANSDALKLAKEVDPQGLRTIGVITKLDLMDEGTDARDVLENKLLPLRRGYIGVVNRSQKDIEGKKDIRAALAAERKFFLSHPAYRHMADRMGTPHLQKTLNQQLTNHIRESLPALRSKLQSQLLSLEKEVEEYKNFRPDDPTRKTKALLQMVQQFGVDFEKRIEGSGDQVDTLELSGGARINRIFHERFPFELVKMEFDEKDLRREISYAIKNIHGVRTGLFTPDLAFEAIVKKQVVKLKEPCLKCVDLVIQELINTVRQCTSKLSSYPRLREETERIVTTYIREREGRTKDQILLLIDIEQSYINTNHEDFIGFANAQQRSTQLNKKRAIPNQGEILVIRRGWLTINNISLMKGGSKEYWFVLTAESLSWYKDEEEKEKKYMLPLDNLKIRDVEKGFMSNKHVFAIFNTEQRNVYKDLRQIELACDSQEDVDSWKASFLRAGVYPEKDQAENEDGAQENTFSMDPQLERQVETIRNLVDSYVAIINKSIRDLMPKTIMHLMINNTKAFIHHELLAYLYSSADQSSLMEESADQAQRRDDMLRMYHALKEALNIIGDISTSTVSTPVPPPVDDTWLQSASSHSPTPQRRPVSSIHPPGRPPAVRGPTPGPPLIPVPVGAAASFSAPPIPSRPGPQSVFANSDLFPAPPQIPSRPVRIPPGIPPGVPRRPPAAPSRPTIIRPAEPSLLD

SEQ ID NO: 41172 - protein, 532 aa, Homo sapiens
MENGTGPYGEERPREVQETTVTEGAAKIAFPSANEVFYNPVQEFNRDLTCAVITEFARIQLGAKGIQIKVPGEKDTQKVVVDLSEQEEEKVELKESENLASGDQPRTAAVGEICEEGLHVLEGLAASGLRSIRFALEVPGLRSVVANDASTRAVDLIRRNVQLNDVAHLVQPSQADARMLMYQHQRVSERFDVIDLDPYGSPATFLDAAVQAVSEGGLLCVTCTDMAVLAGNSGETCYSKYGAMALKSRACHEMALRIVLHSLDLRANCYQRFVVPLLSISADFYVRVFVRVFTGQAKVKASASKQALVFQCVGCGAFHLQRLGKASGVPSGRAKFSAACGPPVTPECEHCGQRHQLGGPMWAEPIHDLDFVGRVLEAVSANPGRFHTSERIRGVLSVITEELPDVPLYYTLDQLSSTIHCNTPSLLQLRSALLHADFRVSLSHACKNAVKTDAPASALWDIMRCWEKECPVKRERLSETSPAFRILSVEPRLQANFTIREDANPSSRQRGLKRFQANPEANWGPRPRARPG

SEQ ID NO: 41173 - protein, 28 aa, Homo sapiens
MTRKIQSLTSSVPVPLPRSCLHRFNPEQ

SEQ ID NO: 41174 - protein, 140 aa, Homo sapiens [sequence omitted]

SEQ ID NO: 41175 - protein, 220 aa, Homo sapiens
MPIWVVLLSRIIMKEKQSTKVLRDSRIHHLRLLNILGCHAVFFMIPTWVLVDLSAFLVSSDLTYVYQWPWTLLLLAVSGFCNFAQNVIAFSILNLVSPLSYSVANATKRIMVITVSLIMLRNPVTSTNVLGMMTAILGVFLYNKTKYDANQQARKHLLPVTTADLSSKERHRSPLEKPHNGLLFPQHGDYQYGRNNILTDHFQYSRQSYPNSYSLNRYDV

SEQ ID NO: 41176 - protein, 213 aa, Homo sapiens
MGRGFRGTGSSPSRKRPHSTSPLPDDSLFVASLSSPRAGVGLSRVPLRESGSVLPTYQSSPLVSGDTSWGPFRWLAPVQGLRAWGRGLRVPTCRRGHRQYLRSGPDYDFARYRSTVHGVTQAFAAASREVLAVEAELGGPRRQPLLAGHVRSLQELEQTRLGTVALLQLMETPELAGQEDAVRMQQLKMKVIKTMEAISEVLQDLRFDAESAE

SEQ ID NO: 41177 - protein, 218 aa, Homo sapiens
MDNAEAQFTTALRLTNHQELWAFIVTNLASVYIREGNRHQELYSLLERINPDHSFPVSSHCLRAAAFYVRGLFSFFQGRYNEAKRFLRETLKMSNAEDLNRLTACSLVLLGHIFYVLGNHRESNNMVVPAMQLASKIPDMSVQLWSSALLRDLNKACGNAMDAHEAAQMHQNFSQQLLQDHIEACSLPEHNLITWTDGPPPVQFQAQNGPNTSLASLL

SEQ ID NO: 41178 - protein, 364 aa, Homo sapiens
MRRVSHHHPRTSELSPAARSWRLLGRRGAVPLTPAQEEAWEGRSWAACGVNLQGAWGERSGVRASEAESPGKRADVSWWSRQLETMVDHLANTEINSQRIAAVESCFGASGQPLALPGRVLLGEGVLTKECRKKAKPRIFFLFNDILVYGSIVLNKRKYRSQHIIPLEEVTLELLPETLQAKNRWMIKTAKKSFVVSAASATERQEWISHIEECVRRQLRATGRPPSTEHAAPWIPDKATDICMRCTQTRFSALTRRHHCRKCGFVVCAECSRQRFLLPRLSPKPVRVCSLCYRELAAQQRQEEAEEQGAGSPGQPAHLARPICGASSGDDDDSDEDKEGSRDGDWPSSVEFYASGVAWSAFHS

SEQ ID NO: 41179 - protein, 675 aa, Homo sapiens
MGRRSSLPSFETLDYGDEEDIETQLSSSGKELGDVSAREDRGGHSDDLYAVPHRNQVPLLHEVNSEDDENISHQDGFPGSPPAPQRTQQKDGKHPVLNLKDEKPPLCEKPPPSPDITGRARQRYTEITREKFEALKEENMDLNNMNQSLTLELNTMKQAMKELQLKLKGMEKEKRKLKEAEKASSQEVAAPELLYLRKQAQELVDENDGLKMTVHRLNVELSRYQTKFRHLSKEESLNIEGLPSKGPIPPWLLDIKYLSPLLLAYEDMMKEKDELNATLKEEMRMFRMRVQEVVKENEELHQELNKSSAVTSEEWRQLQTQAKLVLEENKLLLEQLEIQQRKAKDSHQERLQEVSKLTKQLMLLEAKTHGQEKELAENREQLEILRAKCQELKTHSDGKIAVEVHKSIVNELKSQLQKEEEKERAEMEELMEKLTVLQAQKKSLLLEKNSLTEQNKALEAELERAQKINRKSQKKIEVLKKQVEKAMGNEMSAHQYLANLVGLAENITQERDSLMCLAKCLESEKDGVLNKVIKSNIRLGKLEEKVKGYKKQAALKLGDISHRLLEQQEDFAGKTAQYRQEMRHLHQVLKDKQEVLDQALQQNREMEGELEVIWESTFRENRRIRELLQDTLTRTGVQDNPRALVAPSLNGVSQADLLDGCDVCSYDLKSHAPTC

SEQ ID NO: 41180 - protein, 590 aa, Homo sapiens
MLENFALIASLGLISFRSHIVSQLEMGKEPWVPDSVDMTSAMARGAYGRPGSDFCHGTEGKDLPSEHNVSVEGVAQDRSPEATLCPQKTCPCDICGLRLKDILHLAEHQTTHPRQKPFVCEAYVKGSEFSANLPRKQVQQNVHNPIRTEEGQASPVKTCRDHTSDQLSTCREGGKDFVATAGFLQCEVTPSDGEPHEATEGVVDFHIALRHNKCCESGDAFNNKSTLVQHQRIHSRERPYECSKCGIFFTYAADLTQHQKVHNRGKPYECCECGKFFSQHSSLVKHRRVHTGESPHVCGDCGKFFSRSSNLIQHKRVHTGEKPYECSDCGKFFSQRSNLIHHKRVHTGRSAHECSECGKSFNCNSSLIKHWRVHTGERPYKCNECGKFFSHIASLIQHQIVHTGERPHGCGECGKAFSRSSDLMKHQRVHTGERPYECNECGKLFSQSSSLNSHRRLHTGERPYQCSECGKFFNQSSSLNNHRRLHTGERPYECSECGKTFRQRSNLRQHLKVHKPDRPYECSECGKAFNQRPTLIRHQKIHIRERSMENVLLPCSQHTPEISSENRPYQGAVNYKLKLVHPSTHPGEVP

SEQ ID NO: 41181 - protein, 166 aa, Homo sapiens [sequence omitted]

SEQ ID NO: 41182 - protein, 183 aa, Homo sapiens [sequence omitted]

SEQ ID NO: 41183 - protein, 199 aa, Homo sapiens
MMTPQDVLQTGTQRTIAPRTHPYSPKIDGTRTPRDERRRAQHNEVERRRRDKINNWIVQLSKIIPDCNADNSKTGAVSTPDPQCLRWSRPPTLACRKSNSHGARESSLGWRPVGGACPKAPGPLAPQSKGGILSKACDYIRELRQTNQRMQETFKEAERLQMDNELLRQQIEELKNENALLRAQLQQHNLEMVGEGTRQ

SEQ ID NO: 41184 - protein, 693 aa, Homo sapiens [sequence omitted]

SEQ ID NO: 41185 - protein, 1344 aa, Homo sapiens
MASPRGSGSSTSLSTVGSEGDPAPGPTPACSASRPEPLPGPPIRLHLSPVGIPGSARPSRLERVAREIVETERAYVRDLRSIVEDYLGPLLDGGVLGLSVEQVGTLFANIEDIYEFSSELLEDLENSSSAGGIAECFVQRSEDFDIYTLYCMNYPSSLALLRELSLSPPAALWLQERQAQLRHSLPLQSFLLKPVQRILKYHLLLQELGKHWAEGPGTGGREMVEEAIVSMTAVAWYINDMKRKQEHAARLQEVQRRLGGWTGPELSAFGELVLEGAFRGGGGGGPRLRGGERLLFLFSRMLLVAKRRGLEYTYKGHIFCCNLSVSESPRDPLGFKVSDLTIPKHRHLLQAKNQEEKRLWIHCLQRLFFENHPASIPAKAKQVLLENSLHCAPKSKPVLEPLTPPLGSPRPRDARSFTPGRRNTAPSPGPSVIRRGRRQSEPVKDPYVMFPQNAKPGFKHAGSEGELYPPESQPPVSGSAPPEDLEDAGPPTLDPSGTSITEEILELLNQRGLRDPGPSTHDIPKFPGDSQVPGDSETLTFQALPSRDSSEEEEEEEEGLEMDERGPSPLHVLEGLESSIAAEMPSIPCLTKIPDVPNLPEIPSRCEIPEGSRLPSLSDISDVFEMPCLPAIPSVPNTPSLSSTPTLSCDSWLQGPLQEPAEAPATRRELFSGSNPGKLGEPPSGGKAGPEEDEEGVSFTDFQPQDVTQHQGFPDELAFRSCSEIRSAWQALEQGQLARPGFPEPLLILEDSDLGGDSGSGKAGAPSSERTASRVRELARLYSERIQQMQRAETRASANAPRRRPRVLAQPQPSPCLPQEQAEPGLLPAFGHVLVCELAFPLTCAQESVPLGPAVWVQAAIPLSKQGGSPDGQGLHVSNLPKQDLPGIHVSAATLLPEQGGSRHVQAPAATPLPKQEGPLHLQVPALTTFSDQGHPEIQVPATTPLPEHRSHMVIPAPSTAFCPEQGHCADIHVPTTPALPKEICSDFTVSVTTPVPKQEGHLDSESPTNIPLTKQGGSRDVQGPDPVCSQPIQPLSWHGSSLDPQGPGDTLPPLPCHLPDLQIPGTSPLPAHGSHLDHRIPANAPLSLSQELPDTQVPATTPLPLPQVLTDIWVQALPTSPKQGSLPDIQGPAAAPPLPEPSLTDTQVQKLTPSLEQKSLIDAHVPAATPLPERGGSLDIQGLSPTPVQTTMVLSKPGGSLASHVARLESSDLTPPHSPPPSSRQLLGPNAAALSRYLAASYISQSLARRQGPGGGAPAASRGSWSSAPTSRASSPPPQPQPPPPPARRLSYATTVNIHVGGGGRLRPAKAQVRLNHPALLASTQESMGLHRAQGAPDAPFHM

SEQ ID NO: 41186 - protein, 450 aa, Homo sapiens [sequence omitted]

SEQ ID NO: 41187 - protein, 364 aa, Homo sapiens [sequence omitted]

SEQ ID NO: 41188 - protein, 76 aa, Homo sapiens
MGVPRPQPWALGLLLFLLPGSLGAGEGRSGPGPCCRRAAGGGPRQAGAKPAGPEFPASPWRCLLRSINFLNVSCWA

SEQ ID NO: 41189 - protein, 249 aa, Homo sapiens
MAGSEELGLREDTLRVLAAFLRRGEAAGSPVPTPPSPAQEEPTDFLSRLRRCLPCSLGRGAAPSESPRPCSLPIRPCYGLEPGPATPDFYALVAQRLEQLVQEQLKSPPSPELQGPPSTEKEAILRRLVALLEEEAEVINQKLASDPALRSKLVRLSSDSFARLVELFCSRDDSSRPSRACPGPPPPSPEPLARLALAMELSRRVAGLGGTLAGLSVEHVHSFTPWIQAHGGWEGILAVSPVDLNLPLD

SEQ ID NO: 41190 - protein, 429 aa, Homo sapiens
MLENYSNLVSLDLESAYENKSLPTEKNIHEIRASKRNSDRRSKSLGRNWICEGTLERPQRSRGRYVNQMIINYVKRPATREGTPPRTHQRHHKENSFECKDCGKAFSRGYQLSQHQKIHTGEKPYECKECKKAFRWGNQLTQHQKIHTGEKPYECKDCGKAFRWGSSLVIHKRIHTGEKPYECKDCGKAFRRGDELTQHQRFHTGEKDYECKDCGKTFSRVYKLIQHKRIHSGEKPYECKDCGKAFICGSSLIQHKRIHTGEKPYECQECGKAFTRVNYLTQHQKIHTGEKPHECKECGKAFRWGSSLVKHERIHTGEKPYKCTECGKAFNCGYHLTQHERIHTGETPYKCKECGKAFIYGSSLVKHERIHTGVKPYGCTECGKSFSHGHQLTQHQKTHSGAKSYECKECGKACNHLNHLREHQRIHNS

SEQ ID NO: 41191 - protein, 448 aa, Homo sapiens
MACVGFFLLQGAWPLMGGQDKPFLSARPSTVVPRGGHVALQCHYRRGFNNFMLYKEDRSHVPIFHGRIFQESFIMGPVTPAHAGTYRCRGSRPHSLTGWSAPSNPLVIMVTGNHRKPSLLAHPGPLLKSGETVILQCWSDVMFEHFFLHREGISEDPSRLVGQIHDGVSKANFSIGPLMPVLAGTYRCYGSVPHSPYQLSAPSDPLDIVITGLYEKPSLSAQPGPTVQAGENVTLSCSSWSSYDIYHLSREGEAHERRLRAVPKVNRTFQADFPLGPATHGGTYRCFGSFRALPCVWSNSSDPLLVSVTGNPSSSWPSPTEPSSKSGICRHLHVLIGTSVVIFLFILLLFFLLYRWCSNKKNAAVMDQEPAGDRTVNRQDSDEQDPQEVTYAQLDHCVFIQRKISRPSQRPKTPLTDTSVYTELPNAEPRSKVVSCPRAPQSGLEGVF

SEQ ID NO: 41192 - protein, 711 aa, Homo sapiens [sequence omitted]

SEQ ID NO: 41193 - protein, 1015 aa, Homo sapiens
MELYGEHAKAVAALPCAPGPPPQPPPQPPPPQYDYPPQSTFKPKAEVPSSSSSSSSSSSSSSSSSSSSSSSSSQAKKPDPPLPPAFGAPPPPLFDAAFPTPQWGIVDLSGHQHLFGNLKRGGPASGPGVTPGLGAPAGAPGPLPAPSQTPPGPPAAAACDPTKDDKGYFRRLKYLMERRFPCGVCQKSFKQSSHLVQHMLVHSGERPYECGVCGRTYNHVSSLIRHRRCHKDVPPAAGGPPQPGPHLPPLGLPAPAASAATAAAPSTVSSGPPATPVAPAPSADGSAAPAGVGVPPPATGGGDGPFACPLCWKVFKKPSHLHQHQIIHTGEKPFSCSVCSKSFNRRESLKRHVKTHSADLLRLPCGICGKAFRDASYLLKHQAAHAGAGAGGPRPVYPCDLCGKSYSAPQSLLRHKAAHAPPAAAAEAPKDGAASAPQPPPTFPPGPYLLPPDPPTTDSEKAAAAAAAVVYGAVPVPLLGAHPLLLGGAGTSGAGGSGASVPGKTFCCGICGRGFGRRETLKRHERIHTGEKPHQCPVCGKRFRESFHLSKHHVVHTRERPYKCELCGKVFGYPQSLTRHRQVHRLQLPCALAGAAGLPSTQGTPGACGPGASGTSAGPTDGLSYACSDCGEHFPDLFHVMSHKEVHMAEKPYGCDACGKTFGFIENLMWHKLVHQAAPERLLPPAPGGLQPPDGSSGTDAASVLDNGLAGEVGAAVAALAGVSGGEDAGGAAVAGAGGGASSGPERFSCATCGQSFKHFLGLVTHKYVHLVRRTLGCGLCGQSFAGAYDLLLHRRSHRQKRGFRCPVCGKRFWEAALLMRHQRCHTEQRPYRCGVCGRGFLRSWYLRQHRVVHTGERAFKCGVCAKRFAQSSSLAEHRRLHAVARPQRCSACGKTFRYRSNLLEHQRLHLGERAYRCEHCGKGFFYLSSVLRHQRAHEPPRPELRCPACLKAFKDPGYFRKHLAAHQGGRPFRCSSCGEGFANTYGLKKHRLAHKAENLGGPGAGAGTLAGKDA

SEQ ID NO: 41194 - protein, 653 aa, Homo sapiens
MDRVQSCVTFEDVFVYFSREEWELLEEAQRFLYRDVMLENFALVATLGFWCEAEHEAPSEQSVSVEGVSQVRTAESGLFQKAHPCEMCDPLLKDILHLAEHQGSHLTQKLCTRGLCRRRFSFSANFYQHQKQHNGENCFRGDDGGASFVKSCTVHMLGRSFTCREEGMDLPDSSGLFQHQTTYNRVSPCRRTECMESFPHSSSLRQHQGDYDGQMLFSCGDEGKAFLDTFTLLDSQMTHAEVRPFRCLPCGNVFKEKSALINHRKIHSGEISHVCKECGKAFIHLHHLKMHQKFHTGKRHYTCSECGKAFSRKDTLVQHQRVHTGERSYDCSECGKAYSRSSHLVQHQRIHTGERPYKCNKCGKAFSRKDTLVQHQRFHTGERPYECSECGKFFSQSSHLIEHWRIHTGARPYECIECGKFFSHNSSLIKHRRVHTGARSYVCSKCGKAFGCKDTLVQHQIIHTGARPYECSECGKAFSRKDTLVQHQKIHTGERPYECGECGKFFSHSSNLIVHQRIHTGAKPYECNECGKCFSHNSSLILHQRVHTGARPYVCSECGKAYISSSHLVQHKKVHTGARPYECSECGKFFSRNSGLILHQRVHTGEKPYVCSECGKAYSRSSHLVRHQKAHTGERAHECNSFGGPLAASLKLV

SEQ ID NO: 41195 - protein, 82 aa, Homo sapiens
MSLAALLIGGFAGLTSTVICRWTRTGTKSTLPISETGGGTPELRCGKHQAVGTSPQRAAAQDSEQESAGMEGRDTHRLPRAL

SEQ ID NO: 41196 - protein, 759 aa, Homo sapiens
MDVKLGQVTLRNPRAAPGELPKTFTFDAVYDASSKQADLYDETVRPLIDSVLQGFNGTVFAYGQTGTGKTYTMQGTWVEPELRGVIPNAFEHIFTHISRSQNQQYLVRASYLEIYQEEIRDLLSKEPGKRLELKENPETGVYIKDLSSFVTKNVKEIEHVMNLGNQTRAVGSTHMNEVSSRSHAIFIITVECSERGSDGQDHIRVGKLNLVDLAGSERQNKAGPNTAGGAATPSSGGGGGGGGSGGGAGGERPKEASKINLSLSALGNVIAALAGNRSTHIPYRDSKLTRLLQDSLGGNAKTIMVATLGPASHSYDESLSTLRFANRAKNIKNKPRVNEDPKDTLLREFQEEIARLKAQLEKRGMLGKRPRRKSSRRKKAVSAPPGYPEGPVIEAWVAEEEDDNNNNHRPPQPILESALEKNMENYLQEQKERLEEEKAAIQDDRSLVSEEKQKLLEEKEKMLEDLRREQQATELLAAKYKAMESKLLIGGRNIMDHTNEQQKMLELKRQEIAEQKRREREMQQEMMLRDEETMELRGTYTSLQQEVEVKTKKLKKLYAKLQAVKAEIQDQHDEYIRVRQDLEEAQNEQTRELKLKYLIIENFIPPEEKNKIMNRLFLDCEEEQWKFQPLVPAGVSSSQMKKRPTSAVGYKRPISQYARVAMAMGSHPRYRAENIMFLELDVSPPAVFEMEFSHDQEQDPRALHMERLMRLDSFLERPSTSKVRKSRSWCQSPQRPPPSTTHASLASASLRPATVADHE

SEQ ID NO: 41197 - protein, 105 aa, Homo sapiens
MERKIHWNSWRASLSLESLFCYSLLLLLPFPTPSQAREICVKFTRGVDFNWQAQALLALQEAAEAFLVHLFEDAYLLTLHAGRVTLFPKDVQLARRIRGLEEGLG

SEQ ID NO: 41198 - protein, 247 aa, Homo sapiens [sequence omitted]

SEQ ID NO: 41199 - protein, 313 aa, Homo sapiens
MTVLILLLLPTGQAAPKDGVTRPDSEVQHQLLPNPFQPGQEQLGLLQSYLKGLGRTEVQLEHLSREQVLLYLFALHDYDQSGQLDGLELLSMLTAALAPGAANSPTTNPVILIVDKVLETQDLNGDGLMTPAELINFPGVALRHVEPGEPLAPSPQEPQAVGRQSLLAKSPLRQETQEAPGPREEAKGQVEARRESLDPVQEPGGQAEADGDVPGPRGEAEGQAEAKGDAPGPRGEAGGQAEAEGDAPGPRGEAGGQAEAEGDAPGPRGEAGGQAEARENGEEAKELPGETLESKNTQNDFEVHIVQVENDEI

SEQ ID NO: 41200 - protein, 50 aa, Homo sapiens
MAFWIGIGSIVTSMGSSMPPSPSNGSSFSLPTNLTVATVTTLMPLTTFSK

SEQ ID NO: 41201 - protein, 892 aa, Homo sapiens [sequence omitted]

SEQ ID NO: 41202 - protein, 354 aa, Homo sapiens
MQPVLPFSKSQTDVYNDSTNLACRNGHLQSESGAVPKRKDPLTHTSNSLPRSKTVMKTGSAGLSGHHRAPSYSGLSMVSGVKQGSGPAPTTHKGTPKTNRTNKPSTPTTATRKKKDLKNFRNVDSNLANLIMNEIVDNGTAVKFDDIAGQDLAKQALQEIVILPSLRPELFTGLRAPARGLLLFGPPGNGKTMLAKAVAAESNATFFNISAASLTSKYVGEGEKLVRALFAVARELQPSIIFIDEVDSLLCERREGEHDASRRLKTEFLIEFDGVQSAGDDRVLVMGATNRPQELDEAVLRRFIKRVYVSLPNEETRLLLLKNLLCKQGSPLTQKELAQLARTKTRTGEEYVCQ

SEQ ID NO: 41203 - protein, 4829 aa, Homo sapiens
MAAAAAAASGPGCSSAAGAGAAGVSEWLVLRDGCMHCDADGLHSLSYHPALNAILAVTSRGTIKVIDGTSGATLQASALSAKPGGQVKCQYISAVDKVIFVDDYAVGCRKDLNGILLLDTALQTPVSKQDDVVQLELPVTEAQQLLSACLEKVDISSTEGYDLFITQLKDGLKNTSHETAANHKVAKWATVTFHLPHHVLKSIASAIVNELKKINQNVAALPVASSVMDRLSYLLPSARPELGVGPGRSVDRSLMYSEANRRETFTSWPHVGYRWAQPDPMAQAGFYHQPASSGDDRAMCFTCSVCLVCWEPTDEPWSEHERHSPNCPFVKGEHTQNVPLSVTLATSPAQFPCTDGTDRISCFGSGSCPHFLAAATKRGKICIWDVSKLMKVHLKFEINAYDPAIVQQLILSGDPSSGVDSRRPTLAWLEDSSSCSDIPKLEGDSDDLLEDSDSEEHSRSDSVTGHTSQKEAMEVSLDITALSILQQPEKLQWEIVANVLEDTVKDLEELGANPCLTNSKSEKTKEKHQEQHNIPFPCLLAGGLLTYKSPATSPISSNSHRSLDGLSRTQGESISEQGSTDNESCTNSELNSPLVRRTLPVLLLYSIKESDEKAGKIFSQMNNIMSKSLHDDGFTVPQIIEMELDSQEQLLLQDPPVTYIQQFADAAANLTSPDSEKWNSVFPKPGTLVQCLRLPKFAEEENLCIDSITPCADGIHLLVGLRTCPVESLSAINQVEALNNLNKLNSALCNRRKGELESNLAVVNGANISVIQHESPADVQTPLIIQPEQRNVSGGYLVLYKMNYATRIVTLEEEPIKIQHIKDPQDTITSLILLPPDILDNREDDCEEPIEDMQLTSKNGFEREKTSDISTLGHLVITTQGGYVKILDLSNFEILAKVEPPKKEGTEEQDTFVSVIYCSGTDRLCACTKGGELHFLQIGGTCDDIDEADILVDGSLSKGIEPSSEGSKPLSNPSSPGISGVDLLVDQPFTLEILTSLVELTRFETLTPRFSATVPPCWVEVQQEQQQRRHPQHLHQQHHGDAAQHTRTWKLQTDSNSWDEHVFELVLPKACMVGHVDFKFVLNSNITNIPQIQVTLLKNKAPGLGKVNALNIEVEQNGKPSLVDLNEEMQHMDVEESQCLRLCPFLEDHKEDILCGPVWLASGLDLSGHAGMLTLTSPKLVKGMAGGKYRSFLIHVKAVNERGTEEICNGGMRPVVRLPSLKHQSNKGYSLASLLAKVAAGKEKSSNVKNENTSGTRKSENLRGCDLLQEVSVTIRRFKKTSISKERVQRCAMLQFSEFHEKLLNTLCRKTDDGQITEHAQSLVLDTLCWLAGVHSNGPGSSKEGNENLLSKTRKFLSDIVRVCFFEAGRSIAHKCARFLALCISNGKCDPCQPAFGPVLLKALLDNMSFLPAATTGGSVYWYFVLLNYVKDEDLAGCSTACASLLTAVSRQLQDRLTPMEALLQTRYGLYSSPFDPVLFDLEMSGSSCKNVYNSSIGVQSDEIDLSDVLSGNGKVSSCTAAEGSFTSLTGLLEVEPLHFTCVSTSDGTRIERDDAMSSFGVTPAVGGLSSGTVGEASTALSSAAQVALQSLSHAMASAEQQLQVLQEKQQQLLKLQQQKAKLEAKLHQTTAAAAAAASAVGPVHNSVPSNPVAAPGFFIHPSDVIPPTPKTTPLFMTPPLTPPNEAVSVVINAELAQLFPGSVIDPPAVNLAAHNKNSNKSRMNPLGSGLALAISHASHFLQPPPHQSIIIERMHSGARRFVTLDFGRPILLTDVLIPTCGDLASLSIDIWTLGEEVDGRRLVVATDISTHSLILHDLIPPPVCRFMKITVIGRYGSTNARAKIPLGFYYGHTYILPWESELKLMHDPLKGEGESANQPEIDQHLAMMVALQEDIQCRYNLACHRLETLLQSIDLPPLNSANNAQYFLRKPDKAVEEDSRVFSAYQDCIQLQLQLNLAHNAVQRLKVALGASRKMLSETSNPEDLIQTSSTEQLRTIIRYLLDTLLSLLHASNGHSVPAVLQSTFHAQACEELFKHLCISGTPKIRLHTGLLLVQLCGGERWWGQFLSNVLQELYNSEQLLIFPQDRVFMLLSCIGQRSLSNSGVLESLLNLLDNLLSPLQPQLPMHRRTEGVLDIPMISWVVMLVSRLLDYVATVEDEAAAAKKPLNGNQWSFINNNLHTQSLNRSSKGSSSLDRLYSRKIRKQLVHHKQQLNLLKAKQKALVEQMEKEKIQSNKGSSYKLLVEQAKLKQATSKHFKDLIRLRRTAEWSRSNLDTEVTTAKESPEIEPLPFTLAHERCISVVQKLVLFLLSMDFTCHADLLLFVCKVLARIANATRPTIHLCEIVNEPQLERLLLLLVGTDFNRGDISWGGAWAQYSLTCMLQDILAGELLAPVAAEAMEEGTVGDDVGATAGDSDDSLQQSSVQLLETIDEPLTHDITGAPPLSSLEKDKEIDLELLQDLMEVDIDPLDIDLEKDPLAAKVFKPISSTWYDYWGADYGTYNYNPYIGGLGIPVAKPPANTEKNGSQTVSVSVSQALDARLEVGLEQQAELMLKMMSTLEADSILQALTNTSPTLSQSPTGTDDSLLGGLQAANQTSQLIIQLSSVPMLNVCFNKLFSMLQVHHVQLESLLQLWLTLSLNSSSTGNKENGADIFLYNANRIPVISLNQASITSFLTVLAWYPNTLLRTWCLVLHSLTLMTNMQLNSGSSSAIGTQESTAHLLVSDPNLIHVLVKFLSGTSPHGTNQHSPQVGPTATQAMQEFLTRLQVHLSSTCPQIFSEFLLKLIHILSTERGAFQTGQGPLDAQVKLLEFTLEQNFEVVSVSTISAVIESVTFLVHHYITCSDKVMSRSGSDSSVGARACFGGLFANLIRPGDAKAVCGEMTRDQLMFDLLKLVNILVQLPLSGNREYSARVSVTTNTTDSVSDEEKVSGGKDGNGSSTSVQGSPAYVADLVLANQQIMSQILSALGLCNSSAMAMIIGASGLHLTKHENFHGGLDAISVGDGLFTILTTLSKKASTVHMMLQPILTYMACGYMGRQGSLATCQLSEPLLWFILRVLDTSDALKAFHDMGGVQLICNNMVTSTRAIVNTARSMVSTIMKFLDSGPNKAVDSTLKTRILASEPDNAEGIHNFAPLGTITSSSPTAQPAEVLLQATPPHRRARSAAWSYIFLPEEAWCDLTIHLPAAVLLKEIHIQPHLASLATCPSSVSVEVSADGVNMLPLSTPVVTSGLTYIKIQLVKAEVASAVCLRLHRPRDASTLGLSQIKLLGLTAFGTTSSATVNNPFLPSEDQVSKTSIGWLRLLHHCLTHISDLEGMMASAAAPTANLLQTCAALLMSPYCGMHSPNIEVVLVKIGLQSTRIGLKLIDILLRNCAASGSDPTDLNSPLLFGRLNGLSSDSTIDILYQLGTTQDPGTKDRIQALLKWVSDSARVAAMKRSGRMNYMCPNSSTVEYGLLMPSPSHLHCVAAILWHSYELLVEYDLPALLDQELFELLFNWSMSLPCNMVLKKAVDSLLCSMCHVHPNYFSLLMGWMGITPPPVQCHHRLSMTDDSKKQDLSSSLTDDSKNAQAPLALTESHLATLASSSQSPEAIKQLLDSGLPSLLVRSLASFCFSHISSSESIAQSIDISQDKLRRHHVPQQCNKMPITADLVAPILRFLTEVGNSHIMKDWLGGSEVNPLWTALLFLLCHSGSTSGSHNLGAQQTSARSASLSSAATTGLTTQQRTAIENATVAFFLQCISCHPNNQKLMAQVLCELFQTSPQRGNLPTSGNISGFIRRLFLQLMLEDEKVTMFLQSPCPLYKGRINATSHVIQHPMYGAGHKFRTLHLPVSTTLSDVLDRVSDTPSITAKLISEQKDDKEKKNHEEKEKVKAENGFQDNYSVVVASGLKSQSKRAVSATPPRPPSRRGRTIPDKIGSTSGAEAANKIITVPVFHLFHKLLAGQPLPAEMTLAQLLTLLYDRKLPQGYRSIDLTVKLGSRVITDPSLSKTDSYKRLHPEKDHGDLLASCPEDEALTPGDECMDGILDESLLETCPIQSPLQVFAGMGGLALIAERLPMLYPEVIQQVSAPVVTSTTQEKPKDSDQFEWVTIEQSGELVYEAPETVAAEPPPIKSAVQTMSPIPAHSLAAFGLFLRLPGYAEVLLKERKHAQCLLRLVLGVTDDGEGSHILQSPSANVLPTLPFHVLRSLFSTTPLTTDDGVLLRRMALEIGALHLILVCLSALSHHSPRVPNSSVNQTEPQVSSSHNPTSTEEQQLYWAKGTGFGTGSTASGWDVEQALTKQRLEEEHVTCLLQVLASYINPVSSAVNGEAQSSHETRGQNSNALPSVLLELLSQSCLIPAMSSYLRNDSVLDMARHVPLYRALLELLRAIASCAAMVPLLLPLSTENGEEEEEQSECQTSVGTLLAKMKTCVDTYTNRLRSKRENVKTGVKPDASDQEPEGLTLLVPDIQKTAEIVYAATTSLRQANQEKKLGEYSKKAAMKPKPLSVLKSLEEKYVAVMKKLQFDTFEMVSEDEDGKLGFKVNYHYMSQVKNANDANSAARARRLAQEAVTLSTSLPLSSSSSVFVRCDEERLDIMKVLITGPADTPYANGCFEFDVYFPQDYPSSPPLVNLETTGGHSVRFNPNLYNDGKVCLSILNTWHGRPEEKWNPQTSSFLQVLVSVQSLILVAEPYFNEPGYERSRGTPSGTQSSREYDGNIRQATVKWAMLEQIRNPSPCFKEVIHKHFYLKRVEIMAQCEEWIADIQQYSSDKRVGRTMSHHAAALKRHTAQLREELLKLPCPEGLDPDTDDAPEVCRATTGAEETLMHDQVKPSSSKELPSDFQL

SEQ ID NO: 41204 - protein, 878 aa, Homo sapiens
MCLSALKRIEEEKPDCSKARCEVQFSPRCPEDSVLIEGYAPPGECCPLPSRCVCNPAGCLRKVCQPGNLNILVSKASGKPGECCDLYECKPVFGVDCRTVECPPVQQTACPPDSYETQVRLTADGCCTLPTRCECLSGLCGFPVCEVGSTPRIVSRGDGTPGKCCDVFECVNDTKPACVFNNVEYYDGDMFRMDNCRFCRCQGGVAICFTAQCGEINCERYYVPEGECCPVCEDPVYPFNNPAGCYANGLILAHGDRWREDDCTFCQCVNGERHCVATVCGQTCTNPVKVPGECCPVCEEPTIITVDPPACGELSNCTLTGKDCINGFKRDHNGCRTCQCINTEELCSERKQGCTLNCPFGFLTDAQNCEICECRPRPKKCRPIICDKYCPLGLLKNKHGCDICRCKKCPELSCSKICPLGFQQDSHGCLICKCREASASAGPPILSGTCLTVDGHHHKNEESWHDGCRECYCLNGREMCALITCPVPACGNPTIHPGQCCPSCADDFVVQKPELSTPSICHAPGGEYFVEGETWNIDSCTQCTCHSGRVLCETEVCPPLLCQNPSRTQDSCCPQCTDQPFRPSLSRNNSVPNYCKNDEGDIFLAAESWKPDVCTSCICIDSVISCFSESCPSVSCERPVLRKGQCCPYCIEDTIPKKVVCHFSGKAYADEERWDLDSCTHCYCLQGQTLCSTVSCPPLPCVEPINVEGSCCPMCPEMYVPEPTNIPIEKTNHRGEVDLEVPLWPTPSENDIVHLPRDMGHLQVDYRDNRLHPSEDSSLDSIASVVVPIIICLSIIIAFLFINQKKQWIPLLCWYRTPTKPSSLNNQLVSVDCKKGTRVQVDSSQRMLRIAEPDARFSGFYSMQKQNHLQADNFYQTV

SEQ ID NO: 41205 - protein, 437 aa, Homo sapiens
MMMPFKRQALVEFENIDSAKECVTFAADEPVYIAGQQAFFNYSTSKRITRPGNTDDPSGGNKVLLLSIQNPLYPITVDVLYTVCNPVGKVQRIVIFKRNGIQAMVEFESVLCAQKAKAALNGADIYAGCCTLKIEYARPTRLNVIRNDNDSWDYTKPYLGRRDRGKGRQRQAILGEHPSSFRHDGYGSHGPLLPLPSRYRMGSRDTPELVAYPLPQASSSYMHGGNPSGSVVMVSGLHQLKMNCSRVFNLFCLYGNIEKVKFMKTIPGTALVEMGDEYAVERAVTHLNNVKLFGKRLNVCVSKQHSVVPSQIFELEDGTSSYKDFAMSKNNRFTSAGQASKNIIQPPSCVLHYYNVPLCVTEETFTKLCNDHEVLTFIKYKVFDAKPSAKTLSGLLEWECKTDAVEALTALNHYQIRVPNGSNPYTLKLCFSTSSHL

SEQ ID NO: 41206 - protein, 175 aa, Homo sapiens
MMMPFKRQALVEFENIDSAKECVTFAADEPVYIAGQQAFFNYSTSKRITRPGNTDDPSGGNKVLLLSIQNPLYPITVDVLYTVCNPVGKVQRIVIFKRNGIQAMVEFESVLCAQKAKAALNGADIYAGCCTLKIEYARPTRLNVIRNDNDSWDYTKPYLGRRGRYFIHFRMYLIC

SEQ ID NO: 41207 - protein, 805 aa, Homo sapiens
MEFCGGGSLQDIYHVTGPLSELQIAYVSRETLQGLYYLHSKGKMHRDIKGANILLTDNGHVKLADFGVSAQITATIAKRKSFIGTPYWMAPEVAAVERKGGYNQLCDLWAVGITAIELAELQPPMFDLHPMRALFLMTKSNFQPPKLKDKMKWSNSFHHFVKMALTKNPKKRPTAEKLLQHPFVTQHLTRSLAIELLDKVNNPDHSTYHDFDDDDPEPLVAVPHRIHSTSRNVREEKTRSEITFGQVKFDPPLRKETEPHHELPDSDGFLDSSEEIYYTARSNLDLQLEYGQGHQGGYFLGANKSLLKSVEEELHQRGHVAHLEDDEGDDDESKHSTLKAKIPPPLPPKPKSIFIPQEMHSTEDENQGTIKRCPMSGSPAKPSQVPPRPPPPRLPPHKPVALGNGMSSFQLNGERDGSLCQQQNEHRGTNLSRKEKKDVPKPISNGLPPTPKVHMGACFSKVFNGCPLKIHCASSWINPDTRDQYLIFGAEEGIYTLNLNELHETSMEQLFPRRCTWLYVMNNCLLSISGKASQLYSHNLPGLFDYARQMQKLPVAIPAHKLPDRILPRKFSVSAKIPETKWCQKCCVVRNPYTGHKYLCGALQTSIVLLEWVEPMQKFMLIKHIDFPIPCPLRMFEMLVVPEQEYPLVCVGVSRGRDFNQVVRFETVNPNSTSSWFTESDTPQTNVTHVTQLERDTILVCLDCCIKIVNLQGRLKSSRKLSSELTFDFQIESIVCLQDSVLAFWKHGMQGRSFRSNEVTQEISDSTRIFRLLGSDRVVVLESRPTDNPTANSNLYILAGHENSY

SEQ ID NO: 41208 - protein, 784 aa, Homo sapiens [sequence omitted]

SEQ ID NO: 41209 - protein, 76 aa, Homo sapiens [sequence omitted]

SEQ ID NO: 41210 - protein, 208 aa, Homo sapiens
MENLLQATKSHVDKVIMKLGKTNAKAVSEMRQKIWNNMPKDHPDHELIDPFPVPLVIIGSKYDVFQDFESEKRKVICKTLRFVAHYYGASLMFTSKSEALLLKIRGVINQLAFGIDKSKSICVDQNKPLFITAGLDSFGQIGSPPVPENDIGKLHAHSPMELWKKVYEKLFPPKSINTLKDIKDPARDPQYAENEVDEMRIQKDLVLS

SEQ ID NO: 41211 - protein, 728 aa, Homo sapiens
MTCPWRTSPCIRCGCCRRLLSSKHASGFLGEHSPGGQRSCRGGLSLERLPNSIASRFRLTEREEEVITCFERASWIAQVFLQELEKTTNNSTSRHLKGCHPLDYELTYFLEAALQSAYVKNLKKGNIVKGMRELREVLRTVETKATQNFKVMAAKHLAGVLLHSLSEECYWSPLSHPLPEFMGKEESSFATQALRKPHLYEGDNLYCPKDNIEEALLLLLISESMATRDVVLSRVPEQEEDRTVSLQNAAAIYDLLSITLGRRGQYVMLSECLERAMKFAFGEFHLWYQVALSMVACGKSAYAVSLLRECVKLRPSDPTVPLMAAKVCIGSLRWLEEAEHFAMMVISLGEEAGEFLPKGYLALGLTYSLQATDATLKSKQDELHRKALQTLERAQQLAPSDPQVILYVSLQLALVRQISSAMEQLQEALKVRKDDAHALHLLALLFSAQKHHQHALDVVNMAITEHPENFNLMFTKVKLEQVLKGPEEALVTCRQVLRLWQTLYSFSQLGGLEKDGSFGEGLTMKKQSGMHLTLPDAHDADSGSRRASSIAASRLEEAMSELTMPSSVLKQGPMQLWTTLEQIWLQAAELFMEQQHLKEAGFCIQEAAGLFPTSHSVLYMRGRLAEVKGNLEEAKQLYKEALTVNPDGVRIMHSLGLMLSRLGHKSLAQKVLRDAVERQSTCHEAWQGLGEVLQAQGQNEAAVDCFLTALELEASSPVLPFSIIPREL

SEQ ID NO: 41212 - protein, 415 aa, Homo sapiens [sequence omitted]

SEQ ID NO: 41213 - protein, 361 aa, Homo sapiens
MTTAHKEKYKCILPLVTSGDEEEEKDYKGPNPRELLEPLFKQSSCSYRIESYWTYEVCHGKHIRQYHEEKETGQKINIHEYYLGNMLAKNLLFEKEREAEEKEKSNEIPTKNIEGQMTPYYPVGMGNGTPCSLKQNRPRSSTVMYICHPESKHEILSVAEVTTCEYEVVILTPLLCSHPKYRFRASPVNDIFCQSLPGSPFKPLTLRQLEQQEEILRVPFRRNKEGVGWWKYEFCYGKHVHQYHEDKDSGKTSVVVGTWNQEEHIEWAKKNTARAYHLQDDGTQTVRMVSHFYGNGDICDITDKPRQVTVKLKCKESDSPHAVTVYMLEPHSCQYILGVESPVICKILDTADENGLLSLPN

SEQ ID NO: 41214 - protein, 355 aa, Homo sapiens
MKCVNHYGGYLCLPKTAQIIVNNEQPQQETQPAEGTSGATTGVVAASSMATSGVLPGGGFVASAAAVAGPEMQTGRNNFVIRRNPADPQRIPSNPSHRIQCAAGYEQSEHNVCQDIDECTAGTHNCRADQVCINLRGSFACQCPPGYQKRGEQCVDIDECRTSSYLCQYQCVNEPGKFSCMCPQGYQVVRSRTCQDINECETTNECREDEMCWNYHGGFRCYPRNPCQDPYILTPENRCVCPVSNAMCRELPQSIVYKYMSIRSDRSVPSDIFQIQATTIYANTINTFRIKSGNENGEFYLRQTSPVSAMLVLVKSLSGPREHIVDLEMLTVSSIGTFRTSSVLRLTIIVGPFSF

SEQ ID NO: 41215 - protein, 1181 aa, Homo sapiens
MWQLCSCIPSTLPDPKAVSLMTAKLSTSFVLETFIHSKEKPTMLQWIELLTKQFNNSQAACEWFLDRMADDDWWPMQILIKCPNQIVRQMFQRLCIHVIQRLRPVHAHLYLQPGMEDGSDDMDTSVEDIGGRSCVTRFVRTLLLIMEHGVKPHSKHLTEYFAFLYEFAKMGEEESQFLLSLQAISTMVHFYMGTKGPENPQVEVLSEEEGEEEEEEEDILSLAEEKYRPAALEKMIALVALLVEQSRSERHLTLSQTDMAALTGGKGFPFLFQHIRDGINIRQTCNLIFSLCRYNNRLAEHIVSMLFTSIAKLTPEAANPFFKLLTMLMEFAGGPPGMPPFASYILQRIWEVIEYNPSQCLDWLAVQTPRNKLAHSWVLQNMENWVERFLLAHNYPRVRTSAAYLLVSLIPSNSFRQMFRSTRSLHIPTRDLPLSPDTTVVLHQVYNVLLGLLSRAKLYVDAAVHGTTKLVPYFSFMTYCLISKTEKLMFSTYFMDLWNLFQPKLSEPAIATNHNKQALLSFWYNVCADCPENIRLIVQNPVVTKNIAFNYILADHDDQDVVLFNRGMLPAYYGILRLCCEQSPAFTRQLASHQNIQWAFKNLTPHASQYPGAVEELFNLMQLFIAQRPDMREEELEDIKQFKKTTISCYLRCLDGRSCWTTLISAFRILLESDEDRLLVVFNRGLILMTESFNTLHMMYHEATACHVTGDLVELLSIFLSVLKSTRPYLQRKDVKQALIQWQERIEFAHKLLTLLNSYSPPELRNACIDVLKELVLLSPHDFLHTLVPFLQHNHCTYHHSNIPSVLVAYEGLPLHLALFPKLWTELCQTQSAMSKNCIKLLCEDPVFAEYIKCILMDERTFLNNNIVYTFMTHFLLKVQSQVFSEANCANLISTLITNLISQYQNLQSDFSNRVEISKASASLNGDLRALALLLSVHTPKQLNPALIPTLQELLSKCRTCLQQRNSLQEQEAKERKTKDDEGATPIKRRRVSSDEEHTVDSCISDMKTETREVLTPTSTSDNETRDSSIIDPGTEQDLPSPENSSVKEYRMEVPSSFSEDMSNIRSQHAEEQSNNGRYDDCKEFKDLHCSKDSTLAEEESEFPSTSISAVLSDLADLRSCDGQALPSQDPEVALSLSCGHSRGLFSHMQQHDILDTLCRTIESTIHVVTRISGKGNQAAS

SEQ ID NO: 41216 - protein, 254 aa, Homo sapiens
MSFIVFSTRGTTLMKLTEDREQIRQGLEELQKVLPGGDTYMHEGFERASEQIYYENRQGYRTASVIIALTDGELHEDLFFYSEREANRSRDLGAIVYCVGVKDFNETQLARIADSKDHVFPVNDGFQALQGIIHSILKKSCIEILAAEPSTICAGESFQVVVRGNGFRHARNVDRVLCSFKINDSVTLNEKPFSVEDTYLLCPAPILKEVGMKAALQVSMNDGLSFISSSVIITTTHCSLHKIASGPTTAACME

SEQ ID NO: 41217 - protein, 193 aa, Homo sapiens [sequence omitted]

SEQ ID NO: 41218 - protein, 48 aa, Homo sapiens
MYLLSWLSLFIQVAFITLAVAAGLYYLAELIEEYTVATSRIIKYMIWD

SEQ ID NO: 41219 - protein, 157 aa, Homo sapiens
MQLTHQLDLFPECRVTLLLFKDVKNAGDLRRKAMEGTIDGSLINPTVIVDPFQILVAANKAVHLYKLGKMKTRTLSTEIIFNLSPNNNISEALKKFGISANDTSILIVYIEEGEKQINQEYLISQVEGHQVSLKNLPEIMNITEVKKVCQSIFLERV

SEQ ID NO: 41220 - protein, 781 aa, Homo sapiens
MSGRWVLAWYRARRAVTLHSAPPVLPADSSSPAVAPDLFWGTYRPHVYFGMKTRSPKPLLTGLMWAQQGTTPGTPKLRHTCEQGDGVGPYGWEFHDGLSFGRQHIQDGALRLTTEFVKRPGGQHGGDWSWRVTVEPQDSGTSALPLVSLFFYVVTDGKEVLLPEVGAKGQLKFISGHTSELGDFRFTLLPPTSPGDTAPKYGSYNVFWTSNPGLPLLTEMVKSRLNSWFQHRPPGAPPERYLGLPGSLKWEDRGPSGQGQGQFLIQQVTLKIPISIEFVFESGSAQAGGNQALPRLAGSLLTQALESHAEGFRERFEKTFQLKEKGLSSGEQVLGQAALSGLLGGIGYFYGQGLVLPDIGVEGSEQKVDPALFPPVPLFTAVPSRSFFPRGFLWDEGFHQLVVQRWDPSLTREALGHWLGLLNADGWIGREQILGDEARARVPPEFLVQRAVHANPPTLLLPVAHMLEVGDPDDLAFLRKALPRLHAWFSWLHQSQAGPLPLSYRWRGRDPALPTLLNPKTLPSGLDDYPRASHPSVTERHLDLRCWVALGARVLTRLAEHLGEAEVAAELGPLAASLEAAESLDELHWAPELGVFADFGNHTKAVQLKPRPPQGLVRVVGRPQPQLQYVDALGYVSLFPLLLRLLDPTSSRLGPLLDILADSRHLWSPFGLRSLAASSSFYGQRNSEHDPPYWRGAVWLNVNYLALGALHHYGHLEGPHQARAAKLHGELRANVVGNVWRQYQATGFLWEQYSDRDGRGMGCRPFHGWTSLVLLAMAEDY

SEQ ID NO: 41221 - protein, 64 aa, Homo sapiens
MAASSTKSWWETGEVQAQSAAKTPSCKDIVAGDMSKKSLWEQKGGSKTSSTIKSQLNHFSRKTY

SEQ ID NO: 41222 - protein, 450 aa, Homo sapiens
MSLTPKELSSLLSIISEEAGGGSTFEGLSTAFHHYFSKADHFRLGSVLVMLLQQPDLLPSAAQRLTALYLLWEMYRTEPLAANPFAASFAHLLNPAPPARGGQEPDRPPLSGFLPPITPPEKFFLSQLMLAPPRELFKKTPRQIALMDVGNMGQSVDISGLQLALAERQSELPTQSKASFPSILSDPDPDSSNSGFDSSVASQITEALVSGPKPPIESHFRPEFIRPPPPLHICEDELAWLNPTEPDHAIQWDKSMCVKNSTGVEIKRIMAKAFKSPLSSPQQTQLLGELEKDPKLVYHIGLTPAKLPDLVENNPLVAIEMLLKLMQSSQITEYFSVLVNMDMSLHSMEVVNRLTTAVDLPPEFIHLYISNCISTCEQIKDKYMQNRLVRLVCVFLQSLIRNKIINVQDLFIEVQAFCIEFSRIREAAGLFRLLKTLDTGETPSETKMSK

SEQ ID NO: 41223 - protein, 240 aa, Homo sapiens
MEKCSDGWWRGSYNGQIGWFPSNYVLEEVDEAAAESPSFLSLRKGASLSNGQGSRVLHVVQTLYPFSSVTEEELNFEKGETMEVIEKPENDPEWWKCKNARGQVGLVPKNYVVVLSDGPALHPAHAPQISYTGPSSSGRFAGREWYYGNVTRHQAECALNERGVEGDFLIRDSESSPSDFSVSLKASGKNKHFKVQLVDNVYCIGQRRFHTMDELVEHYKKAPIFTSEHGEKLYLVRALQ

SEQ ID NO: 41224 - protein, 1934 aa, Homo sapiens [sequence omitted]

SEQ ID NO: 41225 - protein, 146 aa, Homo sapiens
MEKAEDKKTALPAGLSATEKADAHEEDELRAAEEQRIQSLMTKMTAMANEESRLTASSVGQIVGLCSAEIKQIVSEYAEKSELSAEESPEKLGTSQLHRRKVISLNKQIAQKTKHLEELRASHTSLQARYNEAKKTLTERTILIQT

SEQ ID NO: 41226 - protein, 27 aa, Homo sapiens
MQIIGLPSRIPKDPQICRIRLLCTPVI

SEQ ID NO: 41227 - protein, 83 aa, Homo sapiens
MRHDIPDLGTMSEAKPHLITHGFSSRLGKRVSDILRYLFPVPKDDSHRVITFANQDDYISFRWVHGPCPRKASPPCVPRAACR

SEQ ID NO: 41228 - protein, 617 aa, Homo sapiens
MGQRLNVSQLTINTAIVYMHRFYMHHSFTKFNKNIISSTALFLAAKVEEQARKLEHVIKVAHACLHPLEPLLDTKCDAYLQQTQELVILETIMLQTLGFEITIEHPHTDVVKCTQLVRASKDLAQTSYFMATNSLHLTTFCLQYKPTVIACVCIHLACKWSNWEIPVSTDGKHWWEYVDPTVTLELLDELTHEFLQILEKTPNRLKKIRNWRANQAARKPKVDGQVSETPLLGSSLVQNSILVDSVTGVPTNPSFQKPSTSAFPAPVPLNSGNISVQDSHTSDNLSMLATGMPSTSYGLSSHQEWPQHQDSARTEQLYSQKQETSLSGSQYNINFQQGPSISLHSGLHHRPDKISDHSSVKQEYTHKAGSSKHHGPISTTPGIIPQKMSLDKYREKRKLETLDLDVRDHYIAAQVEQQHKQGQSQAASSSSVTSPIKMKIPIANTEKYMADKKEKSGSLKLRIPIPPTDKSASKEELKMKIKVSSSERHSSSDEGSGKSKHSSPHISRDHKEKHKEHPSSRHHTSSHKHSHSHSGSSSGGSKHSADGIPPTVLRSPVGLSSDGISSSSSSSRKRLHVNDASHNHHSKMSKSSKSSGGLRTSQHPRETGQEASGDQRS

SEQ ID NO: 41229 - protein, 1024 aa, Homo sapiens
MHWQLQPEDKRLLLVGAPRAEALPLQRANRTGGLYSCDITARGPCTRIEFDNDADPTSESKEDQWMGVTVQSQGPGGKVVTCAHRYEKRQHVNTKQESRDIFGRCYVLSQNLRIEDDMDGGDWSFCDGRLRGHEKFGSCQQGVAATFTKDFHYIVFGAPGTYNWKGIVRVEQKNNTFFDMNIFEDGPYEVGGETEHDESLVPVPANSYLGFSLDSGKGIVSKDEITFVSGAPRANHSGAVVLLKRDMKSAHLLPEHIFDGEGLASSFGYDVAVVDLNKDGWQDIVIGAPQYFDRDGEVGGAVYVYMNQQGRWNNVKPIRLNGTKDSMFGIAVKNIGDINQDGYPDIAVGAPYDDLGKVFIYHGSANGINTKPTQVLKGISPYFGYSIAGNMDLDRNSYPDVAVGSLSDSVTIFRSRPVINIQKTITVTPNRIDLRQKTACGAPSGICLQVKSCFEYTANPAGYNPSISIVGTLEAEKERRKSGLSSRVQFRNQGSEPKYTQELTLKRQKQKVCMEETLWLQDNIRDKLRPIPITASVEIQEPSSRRRVNSLPEVLPILNSDEPKTAHIDVHFLKEGCGDDNVCNSNLKLEYKFCTREGNQDKFSYLPIQKGVPELVLKDQKDIALEITVTNSPSNPRNPTKDGDDAHEAKLIATFPDTLTYSAYRELRAFPEKQLSCVANQNGSQADCELGNPFKRNSNVTFYLVLSTTEVTFDTPDLDINLKLETTSNQDNLAPITAKAKVVIELLLSVSGVAKPSQVYFGGTVVGEQAMKSEDEVGSLIEYEFRVINLGKPLTNLGTATLNIQWPKEISNGKWLLYLVKVESKGLEKVTCEPQKEINSLNLTESHNSRKKREITEKQIDDNRKFSLFAERKYQTLNCSVNVNCVNIRCPLRGLDSKASLILRSRLWNSTFLEEYSKLNYLDILMRAFIDVTAAAENIRLPNAGTQVRVTVFPSKTVAQYSGVPWWIILVAILAGILMLALLVFILWKCGFFKRNKKDHYDATYHKAEIHAQPSDKERLTSDA

SEQ ID NO: 41230 - protein, 28 aa, Homo sapiens
MGQKVLAGTVLFKSAYLLAGVFVWEEVG

SEQ ID NO: 41231 - protein, 218 aa, Homo sapiens
MHFLFRFIVFFYLWGLFTAQRQKKEESTEEVKIEVLHRPENCSKTSKKGDLLNAHYDGYLAKDGSKFYCSRTQNEGHPKWFVLGVGQVIKGLDIAMTDMCPGEKRKVVIPPSFAYGKEGYAEGKIPPDATLIFEIELYAVTKGPRSIETFKQIDMDNDRQLSKAEINLYLQREFEKDEKPRDKSYQDAVLEDIFKKNDHDGDGFISPKEYNVYQHDEL

SEQ ID NO: 41232 - protein, 217 aa, Homo sapiens
MHFLFRFIVFFYLWGLFTAQRQKKEESTEEVKIEVLHRPENCSKTSKKGDLLNAHYDGYLAKDGSKFYCSRTQNEGHPKWFVLGVGQVIKGLDIAMTDMCPGEKRKVVIPPSFAYGKEGYEGKIPPDATLIFEIELYAVTKGPRSIETFKQIDMDNDRQLSKAEINLYLQREFEKDEKPRDKSYQDAVLEDIFKKNDHDGDGFISPKEYNVYQHDEL

SEQ ID NO: 41233 - protein, 70 aa, Homo sapiens
MHFLFRFIVFFYLWGLFTAQRQKKEESTEEVKIEVLHRPENCSKTSKKGDLLNAHYDGYLAKDGSKFYCR

SEQ ID NO: 41234 - protein, 82 aa, Homo sapiens
MHFLFRFIVFFYLWGLFTAQRQKKEESTEEVKIEVLHRPENCSKTSKKGDLLNAHYDGYLAKDGSKFYCSRRQDSTGCYIDF

SEQ ID NO: 41235 - protein, 123 aa, Homo sapiens
MHFLFRFIVFFYLWGLFTAQRQKKEESTEEVKIEVLHRPENCSKTSKKGDLLNAHYDGYLAKDGSKFYCSRTQNEGHPKWFVLGVGQVIKGLDIAMTDMCPGEKRKVVIPPSFAYGKEGYGST

SEQ ID NO: 41236 - protein, 70 aa, Homo sapiens; identical to SEQ ID NO: 41233

SEQ ID NO: 41237 - protein, 723 aa, Homo sapiens [sequence omitted]

SEQ ID NO: 41238 - protein, 140 aa, Homo sapiens
MDRKAVETHLLRNPHLVSDYRVLMAEIGEDLDKSDVSSLIFLMKDYMGRGKISKEKSFLDLVVELEKLNLVAPDQLDLLEKCLKNIHRIDLKTKIQKYKQSVQGAGTSYRNVLQAAIQKSLKDPSNNFRVSLEKTYGIPA

SEQ ID NO: 41239 - protein, 820 aa, Homo sapiens
MILGTDRVEQMTKTYNDIDMVTHLLAERDRDLELAARIGQALLKRNHVLSEQNESLEEQLGQAFDQVNQLQHELCKKDELLRIVSIASEESETDSSCSTPLRFNESFSLSQGLLQLEMLQEKLKELEEENMALRSKACHIKTETVTYEEKEQQLVSDCVKELRETNAQMSRMTEELSGKSDELIRYQEELSSLLSQIVDLQHKLKEHVIEKEELKLHLQASKDAQRQLTMELHELQDRNMECLGMLHESQEEIKELRSRSGPTAHLYFSQSYGAFTGESLAAEIEGTMRKKLSLDEESSLFKQKAQQKRVFDTVRIANDTRGRSISFPALLPIPGSNRSSVIMTAKPFESGLQQTEDKSLLNQGSSSEEVAGSSQKMGQPGPSGDSDLATALHRLSLRRQNYLSEKQFFAEEWQRKIQVLADQKEGVSGCVTPTESLASLCTTQSEITDLSSASCLRGFMPEKLQIVKPLEGSQTLYHWQQLAQPNLGTILDPRPGVITKGFTQLPGDAIYHISDLEEDEEEGITFQVQQPLEVEEKLSTSKPVTGIFLPPITSAGGPVTVATANPGKCLSCTNSTFTFTTCRILHPSDITQVTPSSGFPSLSCGSSGSSSSNTAVNSPALSYRLSIGESITNRRDSTTTFSSTMSLAKLLQERGISAKVYHSPISENPLQPLPKSLAIPSTPPNSPSHSPCPSPLPFEPRVHLSENFLASRPAETFLQEMYGLRPSRNPPDVGQLKMNLVDRLKRLGIARVVKNPGAQENGRCQEAEIGPQKPDSAVYLNSGSSLLGGLRRNQSLPVIMGSFAAPVCTSSPKMGVLKED

SEQ ID NO: 41240 - protein, 36 aa, Homo sapiens
MDFLYSDSYQSCPSQPKQERILHESIPECNFYITNR

SEQ ID NO: 41241 - protein, 899 aa, Homo sapiens
MSLSPPGARVPLHYLETELEDPFAFNEEDDDLKKGATVRKKLQSKLAQNRQRQRETEILKVRQEHFSPPPAPSQQQPPQQHSHLSPLSTSLKPPAPPQGSVCKSPQPQNTSLPMQGVAPTTHTIAQARQLSHKRPLPLLPSSRAPTVDPPRTDRILMKATAFSPHFSCISRLQRLVKLCTQKHQLDTDLFPHLGLDWSEESGEEPEDSEQASPYQVAWSIRETLRYQRHASDDDDAESRSSRVTQLCTYFQQKYKHLCRLERAESRQKKCRHTFRKALLQAASKEPECTGQLIQELRRAACSRTSISRTKLREVEPAACSGTVKGEQCANKALPFTRHCFQHILLNHSQQLFSSCTAKFADGQQCSVPVFDITHQTPLCEEHAKKMDNFLRGDNSRKVQHQQQRKPRKKTKPPALTKKHKKKRRRGPRRPQKPIPPAVPQGNLSMPASVSLPVEASHIRSPSTPELSADELPDDIANEITDIPHDLELNQEDFSDVLPRLPDDLQDFDFFEGKNGDLLPTTEEAEELERALQAVTSLECLSTIGVLAQSDGVPVQELSDRGIGVFSTGTGASGIQSLSREVNTDLGELLNGRIVHDNFSSLELDENLLRSATLSNPPTPLAGQIQGQFSAPANVGLTSATLISQSALGERAFPGQFHGLHDGSHASQRPHPAQLLSKADDLITSRQQYSSDHSHSSPHGSHYDSEHVPSPYSDHITSPHTTSYSGDNMAATFSAEMPIMAQHLLPTQLEVPLGGVVNPRTHWGNLPVNLGDPSPFSNLLGADGHLLSTSLSTPPTTSNSETTQPAFATVTPSSSSVLPGLPQTSFSGMGPSAELMASTSPKQQLPQFSAAFGHQLSSHSGIPKDLQPSHSSIAPPTGFTVTGATATSTNNASSPFPSPN

SEQ ID NO: 41242 - protein, 325 aa, Homo sapiens
MESGAENQQSGDAAVTEAENQQMTVQAQPQIATLAQVSMPAAHATSSAPTVTLVQLPNGQTVQVHGVIQAAQPSVIQSPQVQTVQISTIAESEDSQESVDSVTDSQKRREILSRRPSYRKILNDLSSDAPGVPRIEEEKSEEETSAPAITTVTVPTPIYQTSSGQYIAITQGGAIQLANNGTDGVQGLQTLTMTNAAATQPGTTILQYAQTTDGQQILVPSNQVVVQAASGDVQTYQIRTAPTSTIAPGVVMASSPALPTQPAEEAARKREVRLMKNREAARECRRKKKEYVKCLENRVAVLENQNKTLIEELKALKDLYCHKSD

SEQ ID NO: 41243 - protein, 339 aa, Homo sapiens
MESGAENQQSGDAAVTEAENQQMTVQAQPQIATLAQVSMPAAHATSSAPTVTLVQLPNGQTVQVHGVIQAAQPSVIQSPQVQTVQSSCKDLKRLFSGTQISTIAESEDSQESVDSVTDSQKRREILSRRPSYRKILNDLSSDAPGVPRIEEEKSEEETSAPAITTVTVPTPIYQTSSGQYIAITQGGAIQLANNGTDGVQGLQTLTMTNAAATQPGTTILQYAQTTDGQQILVPSNQVVVQAASGDVQTYQIRTAPTSTIAPGVVMASSPALPTQPAEEAARKREVRLMKNREAARECRRKKKEYVKCLENRVAVLENQNKTLIEELKALKDLYCHKSD

SEQ ID NO: 41244 - protein, 209 aa, Homo sapiens
MASGCKIGPSILNSDLANLGAECLRMLDSGADYLHLDVMDGHFVPNITFGHPVVESLRKQLGQDPFFDMHMMVSKPEQWVKPMAVAGANQYTFHLEATENPGALIKDIRENGMKVGLAIKPGTSVEYLAPWANQIDMALVMTVEPGFGGQKFMEDMMPKVHWLRTQFPSLDIEVDGGVGPDTVHKCAEPFGRSLSFTALEVRNFSKIRN

SEQ ID NO: 41245 - protein, 246 aa, Homo sapiens
MASGCKIGPSILNSDLANLGAECLRMLDSGADYLHLDVMDGHFVPNITFGHPVVESLRKQLGQDPFFDMHMMVSKPEQWVKPMAVAGANQYTFHLEATENPGALIKDIRENGMKSCSVTQAEVQWHSQGPLQVGLAIKPGTSVEYLAPWANQIDMALVMTVEPGFGGQKFMEDMMPKVHWLRTQFPSLDIEVDGGVGPDTVHKCAEAGANMIVSGSAIMRSEDPRSVINLLRNVCSEAAQKRSLDR

SEQ ID NO: 41246 - protein, 361 aa, Homo sapiens [sequence omitted]

SEQ ID NO: 41247 - protein, 169 aa, Homo sapiens
MRPGCCYHSSRDLKPTNILLGDEGQPVLMDLGSMNQACIHVEGSRQALTLQDWAAQRCTISYRAPELFSVQSHCVIDERTDVWSLGCVLYAMMFGEGPYDMVFQKGDSVALAVQNQLSIPQSPRHSSALRQLLNSMMTVDPHQRPHIPLLLSQLEALQPPAPGQHTTQI

SEQ ID NO: 41248 - protein, 53 aa, Homo sapiens
MRQQDINDTVRLLKEKCLFTVQQVTKILHSCPSVLREDLGQLEYKFQQPRLTA

SEQ ID NO: 41249 - protein, 351 aa, Homo sapiens [sequence omitted]

SEQ ID NO: 41250 - protein, 125 aa, Homo sapiens
MAISEGGLLTDEIRRKVWPKLLNVNANDPPPISGKNLRQMSKDYQQVLLDVRRSLRRFPPGMPEEQREGLQEELIDIILLILERNPQLHYYQGYHDIVVTFLLVVGERLATSLVEKLSTHHLRYQ

SEQ ID NO: 41251 - protein, 137 aa, Homo sapiens
MLSNSPRRDSLLARGLVSACVLMPSSLLSTAPQVLSTSSPAQQAENEAKASSSILIDESEPTTNIQIRLADGGRLVQKFNHSHRISDIRLFIVDARPAMAATSFILMTTFPNKELADESQTLKEANLLNAVIVQRLT

SEQ ID NO: 41252 - protein, 598 aa, Homo sapiens
MLPYPSALGDQYWEEILLPKNGENVETMKKLTQNHKAKGLPSNDTDCPQKKEGKAQIVVPVTFRDVTVIFTEAEWKRLSPEQRNLYKEVMLENYRNLLSLAEPKPEIYTCSSCLLAFSCQQFLSQHVLQIFLGLCAENHFHPGNSSPGHWKQQGQQYSHVSCWFENAEGQERGGGSKPWSARTEERETSRAFPSPLQRQSASPRKGNMVVETEPSSAQRPNPVQLDKGLKELETLRFGAINCREYEPDHNLESNFITNPRTLLGKKPYICSDCGRSFKDRSTLIRHHRIHSMEKPYVCSECGRGFSQKSNLSRHQRTHSEEKPYLCRECGQSFRSKSILNRHQWTHSEEKPYVCSECGRGFSEKSSFIRHQRTHSGEKPYVCLECGRSFCDKSTLRKHQRIHSGEKPYVCRECGRGFSQNSDLIKHQRTHLDEKPYVCRECGRGFCDKSTLIIHERTHSGEKPYVCGECGRGFSRKSLLLVHQRTHSGEKHYVCRECRRGFSQKSNLIRHQRTHSNEKPYICRECGRGFCDKSTLIVHERTHSGEKPYVCSECGRGFSRKSLLLVHQRTHSGEKHYVCRECGRGFSHKSNLIRHQRTH

SEQ ID NO: 41253 - protein, 149 aa, Homo sapiens
MERHGRASATSVSSAGEQAAGDPEGRRQEPLRRRASSASVPAVGASAEGTRRDRLGSYSGPTSVSRQRVESLRKKRPLFPWFGLDIGGTLVKLVYFEPKDITAEEEEEEVESLKSIRKYLTSNVAYGSTGIRDVHLELKDLTLCGRKDR

SEQ ID NO: 41254 - protein, 83 aa, Homo sapiens
MSVVYGIGTWSVLGSLLYYSRTMAKSSVDQKDGSASEVPSELSERPKGFYVETVVTYKEDFVPNTEKILNYWKSWTGGPGTEP

SEQ ID NO: 41255 - protein, 82 aa, Homo sapiens [sequence omitted]

SEQ ID NO: 41256 - protein, 61 aa, Homo sapiens
MSVVYGIGTWSVLGSLLYYSRTMAKSSGLTLSPRLECSGMISAHHNLRLRAQVILLPQPPE

SEQ ID NO: 41257 - protein, 648 aa, Homo sapiens
MGLLLLLLLLLTQPGAGTGADTEAVVCVGTACYTAHSGKLSAAEAQNHCNQNGGNLATVKSKEEAQHVQRVLAQLLRREAALTARMSKFWIGLQREKGKCLDPSLPLKGFSWVGGGEDTPYSNWHKELRNSCISKRCVSLLLDLSQPLLPSRLPKWSEGPCGSPGSPGSNIEGFVCKFSFKGMCRPLALGGPGQVTYTTPFQTTSSSLEAVPFASAANVACGEGDKDETQSHYFLCKEKAPDVFDWGSSGPLCVSPKYGCNFNNGGCHQDCFEGGDGSFLCGCRPGFRLLDDLVTCASRNPCSSSPCRGGATCVLGPHGKNYTCRCPQGYQLDSSQLDCVDVDECQDSPCAQECVNTPGGFRCECWVGYEPGGPGEGACQDVDECALGRSPCAQGCTNTDGSFHCSCEEGYVLAGEDGTQCQDVDECVGPGGPLCDSLCFNTQGSFHCGCLPGWVLAPNGVSCTMGPVSLGPPSGPPDEEDKGEKEGSTVPRAATASPTRGPEGTPKATPTTSRPSLSSDAPITSAPLKMLAPSGSPGVWREPSIHHATAASGPQEPAGGDSSVATQNNDGTDGQKLLLFYILGTVVAILLLLALALGLLVYRKRRAKREEKKEKKPQNAADSYSWVPERAESRAMENQYSPTPGTDC

SEQ ID NO: 41258 - protein, 253 aa, Homo sapiens
MNGTDEGVSAWITINFLTGSLKTPGGSSVGMLDLGGGSTQIAFLPRVEGTLQASPPGYLTALRMFNRTYKLYSYSYLGLGLMSARLAILGGVEGQPAKDGKELVSPCLSPSFKGEWEHAEVTYRVSGQKAAASLHELCAARVSEVLQNRVHRTEEVKHVDFYAFSYYYDLAAGVGLIDAEKGGSLVVGDFEIAAKYGGSHLEREGTCLIPSVSDPGDTAAEQPLLMHGPHLRQPATPGVRLSQEQSAEAHSEN

SEQ ID NO: 41259 - protein, 396 aa, Homo sapiens
MPILISKIFKGLAADQTEALFVGDAILSVNGEDLSSATHDEAVQVLKKTGKEVVLEVKYMKDVSPYFKNSTGGTSVGWDSPPASPLQRQPSSPGPTPRNFSEAKHMSLKMAYVSKRCTPNDPEPRYLEICSADGQDTLFLRAKDEASARSWATAIQAQVNTLTPRVKDELQALLAATSTAGSQDIKQIGWLTEQLPSGGTAPTLALLTEKELLLYLSLPETREALSRPARTAPLIATRLVHSGPSKGSVPYDAELSFALRTGTRHGVDTHLFSVESPQELAAWTRQLVDGCHRAAEGVQEVSTACTWNGRPCSLSVHIDKGFTLWAAEPGAARAVLLRQPFEKLQMSSDDGASLLFLDFGGAEGEIQLDLHSCPKTIVFIIHSFLSAKVTRLGLLA

SEQ ID NO: 41260 - protein, 62 aa, Homo sapiens
MVVNDWCAFCGLDTTSTELSVVESVFKLNEAQPSTIATSMRDSLIDRLGNSRRPWSTLRISV

SEQ ID NO: 41261 - protein, 163 aa, Homo sapiens
MQIQNIFVVPPNQKSHAHNKDSKWCQEHFLNYKGLVRAATVREQLKKLLVKFQVPRKSSEGDPDLVLRCIVSGFFANAARFHSTGAYRTIRDDHELHIHPASVLYAEKPPRWVIYNEVIQTSKYYMRDVTAIESAWLLELAPHFYQQGTHLSLKAKRAKVQDP

SEQ ID NO: 41262 - protein, 1257 aa, Homo sapiens
MTLFYSKKSQRPERKTFQVKLETRQITWSRGADKIEGAIDIREIKEIRPGKTSRDFDRYQEDPAFRPDQSHCFVILYGMEFRLKTLSLQATSEDEVNMWIKGLTWLMEDTLQAPTPLQIERWLRKQFYSVDRNREDRISAKDLKNMLSQVNYRVPNMRFLRERLTDLEQRSGDITYGQFAQLYRSLMYSAQKTMDLPFLEASTLRAGERPELCRVSLPEFQQFLLDYQGELWAVDRLQVQEFMLSFLRDPLREIEEPYFFLDEFVTFLFSKENSVWNSQLDAVCPDTMNNPLSHYWISSSHNTYLTGDQFSSESSLEAYARCLRMGCRCIELDCWDGPDGMPVIYHGHTLTTKIKFSDVLHTIKEHAFVASEYPVILSIEDHCSIAQQRNMAQYFKKVLGDTLLTKPVEISADGLPSPNQLKRKILIKHKKLAEGSAYEEVPTSMMYSENDISNSIKNGILYLEDPVNHEWYPHYFVLTSSKIYYSEETSSDQGNEDEEEPKEVSSSTELHSNEKWFHGKLGAGRDGRHIAERLLTEYCIETGAPDGSFLVRESETFVGDYTLSFWRNGKVQHCRIHSRQDAGTPKFFLTDNLVFDSLYDLITHYQQVPLRCNEFEMRLSEPVPQTNAHESKEWYHASLTRAQAEHMLMRVPRDGAFLVRKRNEPNSYAISFRAEGKIKHCRVQQEGQTVMLGNSEFDSLVDLISYYEKHPLYRKMKLRYPINEEALEKIGTAEPDYGALYEGRNPGFYVEANPMPTFKCAVKALFDYKAQREDELTFIKSAIIQNVEKQEGGWWRGDYGGKKQLWFPSNYVEEMVNPVALEPEREHLDENSPLGDLLRGVLDVPACQIAIRPEGKNNRLFVFSISMASVAHWSLDVAADSQEELQDWVKKIREVAQTADARLTEGKIMERRKKIALELSELVVYCRPVPFDEEKIGTERACYRDMSSFPETKAEKYVNKAKGKKFLQYNRLQLSRIYPKGQRLDSSNYDPLPMWICGSQLVALNFQTPDKPMQMNQALFMTGRHCGYVLQPSTMRDEAFDPFDKSSLRGLEPCAISIEVLGARHLPKNGRGIVCPFVEIEVAGAEYDSTKQKTEFVVDNGLNPVWPAKPFHFQISNPEFAFLRFVVYEEDMFSDQNFLAQATFPVKGLKTGYRAVPLKNNYSEDLELASLLIKIDIFPAKQENGDLSPFSGTSLRERGSDASGQLFHGRAREGSFESRYQQPFEDFRISQEHLADHFDSRERRAPRRTRVNGDNRL

SEQ ID NO: 41263 - protein, 148 aa, Homo sapiens
MTLFYSKKSQRPERKTFQVKLETRQITWSRGADKIEGAIDIREIKEIRPGKTSRDFDRYQEDPAFRPDQSHCFVILYGMEFRLKTLSLQATSEDEVNMWIKGLTWLMEDTLQAPTPLQIERWLRKQFYSVDRNREDRPRWARPTGQRS

SEQ ID NO: 41264 - protein, 670 aa, Homo sapiens
MIPLSSIPTYNAAMDSNSFLKNSFHKFPYPTKAELCYLTVVTKYPEEQLKIWFTAQRLKQGISWSPEEIEDARKKMFNTVIQSVPQPTITVLNTPLVASAGNVQHLIQAALPGHVVGQPEGTGGGLLVTQPLMANGLQATSSPLPLTVTSVPKQPGVAPINTVCSNTTSAVKVVNAAQSLLTACPSITSQAFLDASIYKNKKSHEQLSALKGSFCRNQFPGQSEVEHLTKVTGLSTREVRKWFSDRRYHCRNLKGSRAMIPGDHSSIIIDSVPEVSFSPSSKVPEVTCIPTTATLATHPSAKRQSWHQTPDFTPTKYKERAPEQLRALESSFAQNPLPLDEELDRLRSETKMTRREIDSWFSERRKKVNAEETKKAEENASQEEEEAAEDEGGEEDLASELRVSGENGSLEMPSSHILAERKVSPIKINLKNLRVTEANGRNEIPGLGACDPEDDESNKLAEQLPGKVSCKKTAQQRHLLRQLFVQTQWPSNQDYDSIMAQTGLPRPEVVRWFGDSRYALKNGQLKWYEDYKRGNFPPGLLVIAPGNRELLQDYYMTHKMLYEEDLQNLCDKTQMSSQQVKQWFAEKMGEETRAVADTGSEDQGPGTGELTAVHKGMGDTYSEVSENSESWEPRVPEASSEPFDTSSPQAGRQLGSWSLSSQPLPSLLTL

SEQ ID NO: 41265 - protein, 57 aa, Homo sapiens
MQTVYYGSLGLWLALVDGLVRSSPSLDQMFDAEILGFSTPPGRLSMMSFILNALTWS

SEQ ID NO: 41266 - protein, 20 aa, Homo sapiens
MACNFMGDEWFVDSLNQKVR

SEQ ID NO: 41267 - protein, 188 aa, Homo sapiens
MPPESVDQYRKQIFILLFQRLQNSKTTKFIKSFLVFINLYCIKYGALALQEIFDGIQPKMFGMVLEKIIIPEIQKVSGNVEKKICAVGITKLLTECPPMMDTEYTKLWTPLLQSLIGLFELPEDDTIPDEEHFIDIEDTPGYQTAFSQLAFAGKKEHDPVGQMVNNPKIHLAQSLHKLSTACPGRTYF

SEQ ID NO: 41268 - protein, 322 aa, Homo sapiens
MEVANFYYEADCLAAAYGGKAAPAAPPAARPGPRPPAGELGSIGDHERAIDFSPYLEPLGAPQAPAPATATDTFEAAPPAPAPAPASSGQHHDFLSDLFSDDYGGKNCKKPAEYGYVSLGRLGAAKGALHPGCFAPLHPPPPPPPPPAELKAEPGFEPADCKRKEEAGAPGGGAGMAAGFPYALRAYLGYQAVPSGSSGSLSTSSSSSPPGTPSPADAKAPPTACYAGAAPAPSQVKSKAKKTVDKHSDEYKIRRERNNIAVRKSRDKAKMRNLETQHKVLELTAENERLQKKVEQLSRELSTLRNLFKQLPEPLLASSGHC

SEQ ID NO: 41269 - protein, 173 aa, Homo sapiens
MLLVDADQPEPMRSGARELALFLTPEPGAEAKEVEETIEGMLLRLEEFCSLADLIRSDTSQILEENIPVLKAKLTEMRGIYAKVDRLEAFVKMVGHHVAFLEADVLQAERDHGAFPQALRRWLGSAGLPSFRNKSPAPVPVTYELPTLYRTEDYFPVDAGEAQHHPRTCPRPL

SEQ ID NO: 41270 - protein, 39 aa, Homo sapiens
MFSRSDFSVWTILKKCVGLTYGKSQNSTEHSCRPTTQLP

SEQ ID NO: 41271 - protein, 298 aa, Homo sapiens [sequence omitted]

SEQ ID NO: 41272 - protein, 721 aa, Homo sapiens
MPHSHQYSDRRQPNISDQQVSALSYSDQIQQPLTNQRRMPQTFRDPATAPLRKLSVDLIKTYKHINEVYYAKKKRRHQQGQGDDSSHKKERKVYNDGYDDDNYDYIVKNGEKWMDRYEIDSLIGKGSFGQVVKAYDRVEQEWVAIKIIKNKKAFLNQAQIEVRLLELMNKHDTEMKYYIVHLKRHFMFRNHLCLVFEMLSYNLYDLLRNTNFRGVSLNLTRKFAQQMCTALLFLATPELSIIHCDLKPENILLCNPKRSAIKIVDFGSSCQLGQRIYQYIQSRFYRSPEVLLGMPYDLAIDMWSLGCILVEMHTGEPLFSGANEVDQMNKIVEVLGIPPAHILDQAPKARKFFEKLPDGTWNLKKTKDGKREYKPPGTRKLHNILGVETGGPGGRRAGESGHTVADYLKFKDLILRMLDYDPKTRIQPYYALQHSFFKKTADEGTNTSNSVSTSPAMEQSQSSGTTSSTSSSSGGSSGTSNSGRARSDPTHQHRHSGGHFTAAVQAMDCETHSPQVRQQFPAPLGWSGTEAPTQVTVETHPVQETTFHVAPQQNALHHHHGNSSHHHHHHHHHHHHHGQQALGNRTRPRVYNSPTNSSSTQDSMEVGHSHHSMTSLSSSTTSSSTSSSSTGNQGNQAYQNRPVAANTLDFGQNGAMDVNLTVYSNPRQETGIAGHPTYQFSANTGPAHYMTEGHLTMRQGADREESPMTGVCVQQSPVASS

SEQ ID NO: 41273 - protein, 83 aa, Homo sapiens
MDRYEIDSLIGKGSFGQVVKAYDRVEQEWVAIKIIKNKKAFLNQAQIEVRLLELMNKHDTEMKYYIGKQTGKQRSVPQPTPKL

SEQ ID NO: 41274 - protein, 250 aa, Homo sapiens [sequence omitted]

SEQ ID NO: 41275 - protein, 369 aa, Homo sapiens
MVLTRAKASELHSVRKLNCWGSRLTDISICQEMPSLEVITLSVNSISTLEPVSRCQRLSELYLRRNRIPSLAELFYLKGLPRLRVLWLAENPCCGTSPHRYRMTVLRTLPRLQKLDNQAVTEEELSRALSEGEEITAAPEREGTGHGGPKLCCTLSSLSSAAETGRDPLDSEEEATGAQDERGLKPPSRGQFPSLSARDASSSHRGRVSGGPLGAAAASAHCTHCTETVGREHGASQGPVGREHGASQGLEELCPRGSCVCGSVNAHTRVTRAPHGAVLAPQPLLLSWSVECGPGPCWAEGNRSHVEEVPHTRPQAGLLCSDSPSVPNVLTAILLLLRELDAEGLEAVQQTVGSRLQALRGEEVQEHAE

SEQ ID NO: 41276 - protein, 522 aa, Homo sapiens [sequence omitted]

SEQ ID NO: 41277 - protein, 91 aa, Homo sapiens
MRSIPLRGFDQQMSSMVIEHMASHGTRFLRGCAPSRVRRLPDGQLQVTWEDSTTGKEDTGTFDTVLWAIGLPHPAGCQAGWPLPSAPREQP

SEQ ID NO: 41278 - protein, 111 aa, Homo sapiens
MARRRRQEGESEPPVTRVADVVTPLWTVPYAEQLERKQLECEQVLQKLAKEIGSTNRALLPWLLEQRHKHNKACCPLEGVRPSPQQVRLDFGGHKPLSWVLKNFAFAHPSC

SEQ ID NO: 41279 - protein, 79 aa, Homo sapiens
MSPGLWTAWCSRVCGSTDFPRRTTRGEACGWPTASGWTPAARACGTRHPSTSTSAPNTLRRTALSWWESGGPPCRPTLG

SEQ ID NO: 41280 - protein, 510 aa, Homo sapiens [sequence omitted]

SEQ ID NO: 41281 - protein, 42 aa, Homo sapiens
MGQLLPARGTRAPLSREPTLQVRPQGPLTLRADEARDRPGGP

SEQ ID NO: 41282 - protein, 2111 aa, Homo sapiens
MEFYLEAVMLDSTDVNLWYKIGHVALRLIRIPLARHAFEEGLRCNPDHWPCLDNLITVLYTLSDYTTCLYFICKALEKDCRYSKGLVLKEKIFEEQPCLRKDSLRMFLKCDMSIHDVSVSAAETQAIVDEALGLRKKRQALIVREKEPDLKLVQPIPFFTWKCLGESLLAMYNHLTTCEPPRPSLGKRIDLSDYQDPSQPLESSMVVTPVNVIQPSTVSTNPAVAVAEPVVSYTSVATTSFPLHSPGLLETGAPVGDISGGDKSKKGVKRKKISEESGETAKRRSARVRNTKCKKEEKVDFQELLMKFLPSRLRKLDPEEEDDSFNNYEVQSEAKLESFPSIGPQRLSFDSATFMESEKQDVHEFLLENLTNGGILELMMRYLKAMGHKFLVRWPPGLAEVVLSVYHSWRRHSTSLPNPLLRDCSNKHIKDMMLMSLSCMELQLDQWLLTKGRSSAVSPRNCPAGMVNGRFGPDFPGTHCLGDLLQLSFASSQRDLFEDGWLEFVVRVYWLKARFLALQGDMEQALENYDICTEMLQSSTAIQVEAGAERRDIVIRLPNLHNDSVVSLEEIDKNLKSLERCQSLEEIQRLYEAGDYKAVVHLLRPTLCTSGFDRAKHLEFMTSIPERPAQLLLLQDSLLRLKDYRQCFECSDVALNEAVQQMVNSGEAAAKEEWVATVTQLLMGIEQALSADSSGSILKVSSSTTGLVRLTNNLIQVIDCSMAVQEEAKEPHVSSVLPWIILHRIIWQEEDTFHSLCHQQQLQNPAEEGMSETPMLPSSLMLLNTAHEYLGRRSWCCNSDGALLRFYVRVLQKELAASTSEDTHPYKEELETALEQCFYCLYSFPSKKSKARYLEEHSAQQVDLIWEDALFMFEYFKPKTLPEFDSYKTSTVSADLANLLKRIATIVPRTERPALSLDKVSAYIEGTSTEVPCLPEGADPSPPVVNELYYLLADYHFKNKEQSKAIKFYMHDICICPNRFDSWAGMALARASRIQDKLNSNELKSDGPIWKHATPVLNCFRRALEIDSSNLSLWIEYGTMSYALHSFASRQLKQWRGELPPELVQQMEGRRDSMLETAKHCFTSAARCEGDGDEEEWLIHYMLGKVAEKQQQPPTVYLLHYRQAGHYLHEEAARYPKKIHYHNPPELAMEALEVYFRLHASILKLLGKPDSGVGAEVLVNFMKEAAEGPFARGEEKNTPKASEKEKACLVDEDSHSSAGTLPGPGASLPSSSGPGLTSPPYTATPIDHDYVKCKKPHQQATPDDRSQDSTAVALSDSSSTQDFFNEPTSLLEGSRKSYTEKRLPILSSQAGATGKDLQGATEERGKNEESLESTEGFRAAEQGVQKPAAETPASACIPGKPSASTPTLWDGKKRGDLPGEPVAFPQGLPAGAEEQRQFLTEQCIASFRLCLSRFPQHYKSLYRLAFLYTYSKTHRNLQWARDVLLGSSIPWQQLQHMPAQGLFCERNKTNFFNGIWRIPVDEIDRPGSFAWHMNRSIVLLLKVLAQLRDHSTLLKVSSMLQRTPDQGKKYLRDADRQVLAQRAFILTVKVLEDTLSELAEGSERPGPKVCGLPGARMTTDVSHKASPEDGQEGLPQPKKPPLADGSGPGPEPGGKVGLLNHRPVAMDAGDSADQSGERKDKESPRAGPTEPMDTSEATVCHSDLERTPPLLPGRPARDRGPESRPTELSLEELSISARQQPTPLTPAQPAPAPAPATTTGTRAGGHPEEPLSRLSRKRKLLEDTESGKTLLLDAYRVWQQGQKGVAYDLGRVERIMSETYMLIKQVDEEAALEQAVKFCQVHLGAAAQRQASGDTPTTPKHPKDSRENFFPVTVVPTAPDPVPADSVQRPSDAHTKPRPALAAATTIITCPPSASASTLDQSKDPGPPRPHRPEATPSMASLGPEGEELARVAEGTSFPPQEPRHSPQVKMAPTSSPAEPHCWPAEAALGTGAEPTCSQEGKLRPEPRRDGEAQEAASETQPLSSPPTAASSKAPSSGSAQPPEGHPGKPEPSRAKSRPLPNMPKLVIPSAATKFPPEITVTPPTPTLLSPKGSISEETKQKLKSAILSAQSAANVRKESLCQPALEVLETSSQESSLESETDEDDDYMDI

SEQ ID NO: 41283 - protein, 343 aa, Homo sapiens
MSLEWLVAWSWSLDGLRDCIATGIQSVRDCDTTAVITVACLLVLFVWYCYHVGREQPRPYVSVNSLMQAADANGLQNGYVYCQSPECVRCTHNEGLNQKLYHNLQEYAKRYSWSGMGRIHKGIREQGRYLNSRPSIQKPEVFFLPDLPTTPYFSRDAQKHDVEVLERNFQTILCEFETLYKAFSNCSLPQGWKMNSTPSGEWFTFYLVNQGVCVPRNCRKCPRTYRLLGSLRTCIGNNVFGNACISVLSPGTVITEHYGPTNIRIRCHLGLKTPNGCELVVGGEPQCWAEGRCLLFDDSFLHAAFHEGSAEDGPRVVFMVDLWHPNVAAAERQALDFIFAPGR

SEQ ID NO: 41284 - protein, 262 aa, Homo sapiens [sequence omitted]

SEQ ID NO: 41285 - protein, 19 aa, Homo sapiens
MVVIHYLILLYMSRLCGWW

SEQ ID NO: 41286 - protein, 47 aa, Homo sapiens
MSLLLPPLALLLLLAALVAPATAATAYRPDWNRLSGLTRARVETCGG

SEQ ID NO: 41287 - protein, 1164 aa, Homo sapiens
MEKKVDSRYFKDGAVKKPYSAKTLSNKKSSASFGIRRELPSTSHLVQYRGTHTCTRQGRLRELRIRFYYEQRLLRKVFEEWKEEWWVFQHEWKLCVRADCHYRYYLYNLMFQTWKTYVRQQQEMRNKYIRAEVHDAKQKMRQAWKSWLIYVVVRRTKLQMQTTALEFRQRIILRVWWSTWRQRLGQVRVSRALHASALKHRALSLQVQAWSQWREQLLYVQKEKQKVVSAVKHHQHWQKRRFLKAWLEYLQVRRVKRQQNEMAERFHHVTVLQIYFCDWQQAWERRESLYAHHAQVEKLARKMALRRAFTHWKHYMLLCAEEAAQFEMAEEHHRHSQLLLHRFWNLWRSQIEQKKERELLPLLHAAWDHYRIALLCKCIELWLQYTQKRRYKQLLQARADGHFQQRALPAAFHTWNRLWRWRHQENVLSARATRFHRETLEKQVFSLWRQKMFQHRENRLAERMAILHAERQLLYRSWFMWHQQAAARHQEQEWQTVACAHHRHGRLKKAFCLWRESAQGLRTERTGRVRAAEFHMAQLLRWAWSQWRECLALRGAERQKLMRADLHHQHSVLHRALQAWVTYQGRVRSILREVAARESQHNRQLLRGALRRWKENTMARVDEAKKTFQASTHYRRTICSKVLVQWREAVSVQMYYRQQEDCAIWEAQKVLDRGCLRTWFQRWWDCSRRSAQQRLQLERAVQHHHRQLLLEGLARWKTHHLQCVRKRLLHRQSTQLLAQRLSRTCFRQWRQQLAARRQEQRATVRALWFWAFSLQAKVWATWLAFVLERRRKKARLQWALQAYQGQLLQEGATRLLRFAASMKASRQQLQAQQQVQAAHSLHRAVRRCATLWKQKVLGRGGKPQPLAAIAPSRKVTFEGPLLNRIAAGAGDGTLETKRPQASRPLGALGRLAAEEPHALELNTAHSARKQPRRPHFLLEPAQSQRPQKPQEHGLGMAQPAAPSLTRPFLAEAPTALVPHSPLPGALSSAPGPKQPPTASTGPELLLLPLSSFMPCGAAAPARVSAQRATPRDKPPVPSSLASVPDPHLLLPGDFSATRAGPGLSTAGSLDLEAELEEIQQQLLHYQTTKQNLWSCRRQASSLRRWLELNREEPGPEDQEVEQQVQKELEQVEMQIQLLAEELQAQRQPIGACVARIQALRQALC

SEQ ID NO: 41288 - protein, 98 aa, Homo sapiens [sequence omitted]

SEQ ID NO: 41289 - protein, 275 aa, Homo sapiens
MTSGIRRNWIEALRKTVRPTSAPDVTKLSDSNKENALHSYSTQKGPLKAGEQRAGSEVISRGGPRKADGQRQALDYVELSPLTQASPQRARTPARTPDRLAKQEELERDLAQRSEERRKWFEATDSRTPEVPAGEGPRRGLGAPLTEDQQNRLSEEIEKKWQELEKLPLRENKRVPLTALLNQSRGERRGPPSDGHEALEKEVQALRAQLEAWRLQGEAPQSALRSQEDGHIPPGYISQLVGVITVPVLQTRPLSSERLCDLPKVTPPAGLKGGI

SEQ ID NO: 41290 - protein, 489 aa, Homo sapiens
MLAFLGAVICIIASVPLAASPARALPGGADNASVASGAAASPGPQRSLSALHGAGGSAGPPALPGAPAASAHPLPPGPLFSRFLCTPLAAACPSGAQQGDAAGAAPGEREELLLLQSTAEQLRQTALQQEARIRADQDTIRELTGKLGRCESGLPRGLQGAGPRRDTMADGPWDSPALILELEDAVRALRDRIDRLEQELPARVNLSAAPAPVSAVPTGLHSKMDQLEGQLLAQVLALEKERVALSHSSRRQRQEVEKELDVLQGRVAELEHGSSAYSPPDAFKISIPIRNNYMYARVRKALPELYAFTACMWLRSRSSGTGQGTPFSYSVPGQANEIVLLEAGHEPMELLINDKVAQLPLSLKDNGWHHICIAWTTRDGLWSAYQDGELQGSGENLAAWHPIKPHGILILGQEQDTLGGRFDATQAFVGDIAQFNLWDHALTPAQVLGIANCTAPLLGNVLPWEDKLVEAFGGATKAAFDVCKGRAKA

SEQ ID NO: 41291 - protein, 575 aa, Homo sapiens [sequence omitted]

SEQ ID NO: 41292 - protein, 2991 aa, Homo sapiens
MGLRAAAWEPRVPGGTRAFALRPGCTYAVGAACTPRAPRELLDVGRDGRLAGRRRVSGAGRPLPLQVRLVARSAPTALSRRLRARTHLPGCGARARLCGTGARLCGALCFPVPGGCAAAQHSALAAPTTLPACRCPPRPRPRCPGRPICLPPGGSVRLRLLCALRRAAGAVRVGLALEAATAGTPSASPSPSPPLPPNLPEARAGPARRARRGTSGRGSLKFPMPNYQVALFENEPAGTLILQLHAHYTIEGEEERVSYYMEGLFDERSRGYFRIDSATGAVSTDSVLDRETKETHVLRVKAVDYSTPPRSATTYITVLVKDTNDHSPVFEQSEYRERVRENLEVGYEVLTIRASDRDSPINANLRYRVLGGAWDVFQLNESSGVVSTRAVLDREEAAEYQLLVEANDQGRNPGPLSATATVYIEVEDENDNYPQFSEQNYVVQVPEDVGLNTAVLRVQATDRDQGQNAAIHYSILSGNVAGQFYLHSLSGILDVINPLDFEDVQKYSLSIKAQDGGRPPLINSSGVVSVQVLDVNDNEPIFVSSPFQATVLENVPLGYPVVHIQAVDADSGENARLHYRLVDTASTFLGGGSAGPKNPAPTPDFPFQIHNSSGWITVCAELDREEVEHYSFGVEAVDHGSPPMSSSTSVSITVLDVNDNDPVFTQPTYELRLNEDAAVGSSVLTLQARDRDANSVITYQLTGGNTRNRFALSSQRGGGLITLALPLDYKQEQQYVLAVTASDGTRSHTAHVLINVTDANTHRPVFQSSHYTVSVSEDRPVGTSIATLSANDEDTGENARITYVIQDPVPQFRIDPDSGTMYTMMELDYENQVAYTLTIMAQDNGIPQKSDTTTLEILILDANDNAPQFLWDFYQGSIFEDAPPSTSILQVSATDRDSGPNGRLLYTFQGGDDGDGDFYIEPTSGVIRTQRRLDRENVAVYNLWALAVDRGSPTPLSASVEIQVTILDINDNAPMFEKDELELFVEENNPVGSVVAKIRANDPDEGPNAQIMYQIVEGDMRHFFQLDLLNGDLRAMVELDFEVRREYVLVVQATSAPLVSRATVHILLVDQNDNPPVLPDFQILFNNYVTNKSNSFPTGVIGCIPAHDPDVSDSLNYTFVQGNELRLLLLDPATGELQLSRDLDNNRPLEALMEVSVSDGIHSVTAFCTLRVTIITDDMLTNSITVRLENMSQEKFLSPLLALFVEGVAAVLSTTKDDVFVFNVQNDTDVSSNILNVTFSALLPGGVRGQFFPSEDLQEQIYLNRTLLTTISTQRVLPFDDNICLREPCENYMKCVSVLRFDSSAPFLSSTTVLFRPIHPINGLRCRCPPGFTGDYCETEIDLCYSDPCGANGRCRSREGGYTCECFEDFTGEHCEVDARSGRCANGVCKNGGTCVNLLIGGFHCVCPPGEYERPYCEVTTRSFPPQSFVTFRGLRQRFHFTISLTFATQERNGLLLYNGRFNEKHDFIALEIVDEQVQLTFSAGETTTTVAPKVPSGVSDGRWHSVQVQYYNKPNIGHLGLPHGPSGEKMAVVTVDDCDTTMAVRFGKDIGNYSCAAQGTQTGSKKSLDLTGPLLLGGVPNLPEDFPVHNRQFVGCMRNLSVDGKNVDMAGFIANNGTREGCAARRNFCDGRRCQNGGTCVNRWNMYLCECPLRFGGKNCEQAMPHPQLFSGESVVSWSDLNIIISVPWYLGLMFRTRKEDSVLMEATSGGPTSFRLQILNNYLQFEVSHGPSDVESVMLSGLRVTDGEWHHLLIELKNVKEDSEMKHLVTMTLDYGMDQNKADIGGMLPGLTVRSVVVGGASEDKVSVRRGFRGCMQGVRMGGTPTNVATLNMNNALKVRVKDGCDVDDPCTSSPCPPNSRCHDAWEDYSCVCDKGYLGINCVDACHLNPCENMGACVRSPGSPQGYVCECGPSHYGPYCENKLDLPCPRGWWGNPVCGPCHCAVSKGFDPDCNKTNGQCQCKENYYKLLAQDTCLPCDCFPHGSHSRTCDMATGQCACKPGVIGRQCNRCDNPFAEVTTLGCEVIYNGCPKAFEAGIWWPQTKFGQPAAVPCPKGSVGNAVRHCSGEKGWLPPELFNCTTISFVDLRAMNEKLSRNETQVDGARALQLVRALRSATQHTGTLFGNDVRTAYQLLGHVLQHESWQQGFDLAATQDADFHEDVIHSGSALLAPATRAAWEQIQRSEGGTAQLLRRLEGYFSNVARNVRRTYLRPFVIVTANMILAVDIFDKFNFTGARVPRFDTIHEEFPRELESSVSFPADFFRPPEEKEGPLLRPAGRRTTPQTTRPGPGTEREAPISRRRRHPDDAGQFAVALVIIYRTLGQLLPERYDPDRRSLRLPHRPIINTPMVSTLVYSEGAPLPRPLERPVLVEFALLEVEERTKPVCVFWNHSLAVGGTGGWSARGCELLSRNRTHVACQCSHTASFAVLMDISRRENGEVLPLKIVTYAAVSLSLAALLVAFVLLSLVRMLRSNLHSIHKHLAVALFLSQLVFVIGINQTENPFLCTVVAILLHYIYMSTFAWTLVESLHVYRMLTEVRNIDTGPMRFYYVVGWGIPAIVTGLAVGLDPQGYGNPDFCWLSLQDTLIWSFAGPIGAVIIINTVTSVLSAKVSCQRKHHYYGKKGIVSLLRTAFLLLLLISATWLLGLLAVNRDALSFHYLFAIFSGLQGPFVLLFHCVLNQEVRKHLKGVLGGRKLHLEDSATTRATLLTRSLNCNTTFGDGPDMLRTDLGESTASLDSIVRDEGIQKLGVSSGLVRGSHGEPDASLMPRSCKDPPGHDSDSDSELSLDEQSSSYASSHSSDSEDDGVGAEEKWDPARGAVHSTPKGDAVANHVPAGWPDQSLAESDSEDPSGKPRLKVETKVSVELHREEQGSHRGEYPPDQESGGAARLASSQPPEQRKGILKNKVTYPPPLTLTEQTLKGRLREKLADCEQSPTSSRTSSLGSGGPDCAITVKSPGREPGRDHLNGVAMNVRTGSAQADGSDSEKP

SEQ ID NO: 41293 - protein, 411 aa, Homo sapiens
MPTTPVKAKRVSTFQEFESNTSDAWDAGEDDDELLAMAAESLNSEVVMETANRVLRNHSQRQGRPTLQEGPGLQQKPRPEAEPPSPPSGDLRLVKSVSESHTSCPAEELRRLSWSGIPKPVRPMTWKLLSGYLPANVDRRPATLQRKQKEYFAFIEHYYDSRNDEVHQDTYRQIHIDIPRMSPEALILQPKVTEIFERILFIWAIRHPASGYVQGINDLVTPFFVVFICEYIEAEEVDTVDVSGVPAEVLCNIEADTYWCMSKLLDGIQDNYTFAQPGIQMKVKMLEELVSRIDEQVHRHLDQHEVRYLQFAFRWMNNLLMREVPLRCTIRLWDTYQSEPDGFSHFHLYVCAAFLVRWRKEILEEKDFQELLLFLQNLPTAHWDDEDISLLLAEAYRLKFAFADAPNHYKK

SEQ ID NO: 41294 - protein, 373 aa, Homo sapiens
MRLPRRAALGLLPLLLLLPPAPEAAKKPTPCHRCRGLVDKFNQGMVDTAKKNFGGGNTAWEEKTLSKYESSEIRLLEILEGLCESSDFECNQMLEAQEEHLEAWWLQLKSEYPDLFEWFCVKTLKVCCSPGTYGPDCLACQGGSQRPCSGNGHCSGDGSRQGDGSCRCHMGYQGPLCTDCMDGYFSSLRNETHSICTACDESCKTCSGLTNRDCGECEVGWVLDEGACVDVDECAAEPPPCSAAQFCKNANGSYTCEECDSSCVGCTGEGPGNCKECISGYAREHGQCADVDECSLAEKTCVRKNENCYNTPGSYVCVCPDGFEETEDACVPPAEAGEWHGCPPHRLPSPGPQGLHVDWLLGLKSTQMVALRW

SEQ ID NO: 41295 - protein, 192 aa, Homo sapiens
MEEFHGRTLHDDDSCQVIPVLPQVMMILIPGQTLPLQLFHPQEVSMVRNLIQKDRTFAVLAYSNVQEREAQFGTTAEIYAYREEQDFGIEIVKVKAIGRQRFKVLELRTQSDGIQQAKVQILPECVLPSTMSAVQLESLNKCQIFPSKPVSREDQCSYKWWQKYQKRKFHCANLTSWPRWLYSLYDAVSNLP

SEQ ID NO: 41296 - protein, 1131 aa, Homo sapiens
MSYAQAQRMVEVDLHGRVHRISIFDNLDVVSEDEEAPEEAPENGSNKENTETPAATPKSGKHKNKEKRKDSNHHHHHNVSASTTPKLPEVVYRELEQDTPDAPPRPTSYYRYIEKSAEELDEEVEYDMDEEDYIWLDIMNERRKTEGVSPIPQEIFEYLMDRLEKESYFESHNKGDPNALVDEDAVCCICNDGECQNSNVILFCDMCNLAVHQECYGVPYIPEGQWLCRRCLQSPSRAVDCALCPNKGGAFKQTDDGRWAHVVCALWIPEVCFANTVFLEPIDSIEHIPPARWKLTCYICKQRGSGACIQCHKANCYTAFHVTCAQQAGLYMKMEPVRETGANGTSFSVRKTAYCDIHTPPGSARRLPALSHSEGEEDEDEEEDEGKGWSSEKVKKAKAKSRIKMKKARKILAEKRAAAPVVSVPCIPPHRLSKITNRLTIQRKSQFMQRLHSYWTLKRQSRNGVPLLRRLQTHLQSQRNCDQVGRDSEDKNWALKEQLKSWQRLRHDLERARLLVELIRKREKLKRETIKVQQIAMEMQLTPFLILLRKTLEQLQEKDTGNIFSEPVPLSEVTELDEVPDYLDHIKKPMDFFTMKQNLEAYRYLNFDDFEEDFNLIVSNCLKYNAKDTIFYRAAVRLREQGGAVLRQARRQAEKMGIDFETGMHIPHSLAGDEATHHTEDAAEEERLVLLENQKHLPVEEQLKLLLERLDEVNASKQSVGRSRRAKMIKKEMTALRRKLAHQRETGRDGPERHGPSSRGSLTPHPAACDKDGQTDSAAEESSSQETSKGLGPNMSSTPAHEVGRRTSVLFSKKNPKTAGPPKRPGRPPKNRESQMTPSHGGSPVGPPQLPIMSSLRQRKRGRSPRPSSSSDSDSDKSTEDPPMDLPANGFSGGNQPVKKSFLVYRNDCSLPRSSSDSESSSSSSSSAASDRTSTTPSKQGRGKPSFSRGTFPEDSSEDTSGTENEAYSVGTGRGVGHSMVRKSLGRGAGWLSEDEDSPLDALDLVWAKCRGYPSYPALIIDPKMPREGMFHHGVPIPVPPLEVLKLGEQMTQEAREHLYLVLFFDNKRTWQWLPRTKLVPLGVNQDLDKEKMLEGRKSNIRKSVQIAYHRALQHRSKVQGEQSSETSDSD

SEQ ID NO: 41297 - protein, 1124 aa, Homo sapiens
MSYAQAQRMVEVDLHGRVHRISIFDNLDVVSEDEEAPEEAPENGSNKENTETPAATPKSGKHKNKEKRKDSNHHHHHNVSASTTPKLPEVVYRELEQDTPDAPPRPTSYYRYIEKSAEELDEEVEYDMDEEDYIWLDIMNERRKTEGVSPIPQEIFEYLMDRLEKESYFESHNKGDPNALVDEDAVCCICNDGECQNSNVILFCDMCNLAVHQECYGVPYIPEGQWLCRRCLQSPSRAVDCALCPNKGGAFKQTDDGRWAHVVCALWIPEVCFANTVFLEPIDSIEHIPPARWKLTCYICKQRGSGACIQCHKANCYTAFHVTCAQQAGLYMKMEPVRETGANGTSFSVRKTAYCDIHTPPGSARRLPALSHSEGEEDEDEEEDEGKGWSSEKVKKAKAKSRIKMKKARKILAEKRAAAPVVSVPCIPPHRLSKITNRLTIQRKSQFMQRLHSYWTLKRQSRNGVPLLRRLQTHLQSQRNCDQVGRDSEDKNWALKEQLKSWQRLRHDLERARLLVELIRKREKLKRETIKVQQIAMEMQLTPFLILLRKTLEQLQEKDTGNIFSEPVPLSEVPDYLDHIKKPMDFFTMKQNLEAYRYLNFDDFEEDFNLIVSNCLKYNAKDTIFYRAAVRLREQGGAVLRQARRQAEKMGIDFETGMHIPHSLAGDEATHHTEDAEEERLVLLENQKHLPVEEQLKLLLERLDEVNASKQSVGRSRRAKMIKKEMTALRRKLAHQRETGRDGPERHGPSSRGSLTPHPAACDKDGQTDSAAEESSSQETSKGLGPNMSSTPAHEVGRRTSVLFSKKNPKTAGPPKRPGRPPKNRESQMTPSHGGSPVGPPQLPIMSSLRQRKRGRSPRPSSSSDSDSDKSTEDPPMDLPANGFSGGNQPVKKSFLVYRNDCSLPRSSSDSESSSSSSSSAASDRTSTTPSKQGRGKPSFSRGTFPEDSSEDTSGTENEAYSVGTGRGVGHSMVRKSLGRGAGWLSEDEDSPLDALDLVWAKCRGYPSYPALIIDPKMPREGMFHHGVPIPVPPLEVLKLGEQMTQEAREHLYLVLFFDNKRTWQWLPRTKLVPLGVNQDLDKEKMLEGRKSNIRKSVQIAYHRALQHRSKVQGEQSSETSDSD

SEQ ID NO: 41298 - protein, 160 aa, Homo sapiens
MEAGRPRPVLRSVNSREPSQVIFCNRSPRVVLPVWLNFDGEPQPYPTLPPGTGRRIHSYRGHLWLFRDAGTHDGLLVNQTELFVPSLNVDGQPIFANITLPVYTLKERCLQVVRSLVKPENYRRLDIVRSLYEDLEDHPNVQKDLERLTQERIAHQRMGD

SEQ ID NO: 41299 - protein, 119 aa, Homo sapiens
MEAGRPRPVLRSVNSREPSQVIFCNRSPRVVLPVWLNFDGEPQPYPTLPPGTGRRIHSYRVYTLKERCLQVVRSLVKPENYRRLDIVRSLYEDLEDHPNVQKDLERLTQERIAHQRMGD

SEQ ID NO: 41300 - protein, 596 aa, Homo sapiens
MASLEEEACSLKVDSKDSSHNSTNSEFAAEAEGQNDTIEEPNKVQKRKRDRLRDQGSTMIYLKAIQGILGKSMPKRKGEAATRAKPSAAEHPSHGEGPARSEGPAKTAEGAARSVTVTAAQKEKDATPEVSMEEDKTVPERSSFYDRRVVIDPQEKPSEEPLGDRRTVIDKCSPPLEFLDDSDSHLEIQKHKDREVVMEHPSSGSDWSDVEEISTVRFSQEEPVSLKPSAVPEPSSFTTDYVMYPPHLYSSPWCDYASYWTSSPKPSSYPSTGSSSNDAAQVGKSSRSRMSDYSPNSTGSVQNTSRDMEASEEGWSQNSRSFRFSRSSEEREVKEKRTFQEEMPPRPCGGHASSSLPKSHLEPSLEEGFIDTHCHLDMLYSKLSFQGTFTKFRKIYSSSFPKEFQGCISDFCDPRTLTDCLWEELLKEDLVWGAFGCHPHFARYYSESQERNLLQALRHPKAVAFGEMGLDYSYKCTTPVPEQHKVFERQLQLAVSLKKPLVIHCREADEDLLEIMKKFVPPDYKIHRHCFTGSYPVIEPLLKYFPNMSVGFTAVLTYSSAWEAREALRQIPLERIIVETDAPYFLPRQAVQSPTL

SEQ ID NO: 41301 - protein, 1122 aa, Homo sapiens [sequence omitted]

SEQ ID NO: 41302 - protein, 312 aa, Homo sapiens [sequence omitted]

SEQ ID NO: 41303 - protein, 504 aa, Homo sapiens
MSDVLALPIFKQEDSSLPLDGETEHPPFQYVMCAATSPAVKLHDETLTYLNQGQSYEIRMLDNRKMGDMPEINGKLVKSIIRVVFHDRRLQYTEHQQLEGWKWNRPGDRLLDLDIPMSVGIIDTRTNPSQLNAVEFLWDPAKRTSAFIQVHCISTEFTPRKHGGEKGVPFRIQVDTFKQNENGEYTDHLHSASCQIKVFKPKGADRKQKTDREKMEKRTAHEKEKYQPSYDTTILTEMRLEPIIEDAVEHEQKKSSKRTLPADYGDSLAKRGSCSPWPDAPTAYVNNSPSPAPTFTSPQQSTCSVPDSNSSSPNHQGDGASQTSGEQIQPSATIQETQQWLLKNRFSSYTRLFSNFSGADLLKLTKEDLVQICGAADGIRLYNSLKSRSVRPRLTIYVCREQPSSTVLQGQQQAASSASENGSGAPYVYHAIYLEEMIASEVARKLALVFNIPLHQINQVYRQGPTGIHILVSDQMVQNFQDESCFLFSTVKAESSDGIHIILK

SEQ ID NO: 41304 - protein, 468 aa, Homo sapiens
MSDVLALPIFKQEDSSLPLDGETEHPPFQYVMCAATSPAVKLHDETLTYLNQGQSYEIRMLDNRKMGDMPEINGKLVKSIIRVVFHDRRLQYTEHQQLEGWKWNRPGDRLLDLDIPMSVGIIDTRTNPSQLNAVEFLWDPAKRTSAFIQVHCISTEFTPRKHGGEKGVPFRIQVDTFKQNENGEYTDHLHSASCQIKVFKPKGADRKQKTDREKMEKRTAHEKEKYQPSYDTTILTECSPWPDAPTAYVNNSPSPAPTFTSPQQSTCSVPDSNSSSPNHQGDGASQTSGEQIQPSATIQETQQWLLKNRFSSYTRLFSNFSGADLLKLTKEDLVQICGAADGIRLYNSLKSRSVRPRLTIYVCREQPSSTVLQGQQQAASSASENGSGAPYVYHAIYLEEMIASEVARKLALVFNIPLHQINQVYRQGPTGIHILVSDQMVQNFQDESCFLFSTVKAESSDGIHIILK

SEQ ID NO: 41305 - protein, 640 aa, Homo sapiens
MTKTYNDIDAVTRLLEEKERDLELAARIGQSLLKKNKTLTERNELLEEQVEHIREEVSQLRHELSMKDELLQFYTSAAEESEPESVCSTPLKRNESSSSVQNYFHLDSLQKKLKDLEEENVVLRSEASQLKTETITYEEKEQQLVNDCVKELRDANVQIASISEELAKKTEDAARQQEEITHLLSQIVDLQKKAKACAVENEELVQHLGAAKDAQRQLTAELRELEDKYAECMEMLHEAQEELKNLRNKTMPNTTSRRYHSLGLFPMDSLAAEIEGTMRKELQLEEAESPDITHQKRVFETVRNINQVVKQRSLTPSPMNIPGSNQSSAMNSLLSSCVSTPRSSFYGSDIGNVVLDNKTNSIILETEAADLGNDERSKKPGTPGTPGSHDLETALRRLSLRRENYLSERRFFEEEQERKLQELAEKGELRSGSLTPTESIMSLGTHSRFSEFTGFSGMSFSSRSYLPEKLQIVKPLEGSATLHHWQQLAQPHLGGILDPRPGVVTKGFRTLDVDLDEVYCLNDFEEDDTGDHISLPRLATSTPVQHPETSGERSQARVTVSGSRSYPSRPQASPEEMQEPPAATEEEEEEEEEEGSGEGTTISPVNLAPFPEAEFWAILTSVPGTIRSGSLSVASARLCG

SEQ ID NO: 41306 - protein, 169 aa, Homo sapiens [sequence omitted]

SEQ ID NO: 41307 - protein, 222 aa, Homo sapiens
MAFCFLETLWWEFTASYDTTCIGLASRPYAFLEFDSIIQKVKWHFNYVSSSQMECSLEKIQEELKLQPPAVLTLEDTDVANGVMNGHTPMHLEPAPNFRMEPVTALGILSLILNIMCAALNLIRGVHLAEHSLQVAHEEIGNILAFLVPFVACIFQCYLYLFYSPARTMKVVLMLLFICLGNMYLHGLRNLWQILFHIGVAFLSSYQILTRQLQEKQSDCGV

SEQ ID NO: 41308 - protein, 548 aa, Homo sapiens
MAVTRFPPQRPSAGPDPGPMEPQGVTGAPATHIRQALSSSRRQRARNMGFWRSRALPRNSILVCAEEQGHRARVDRSRESPGGDLRHPGRVRRDITLSGHPRLSTQHVVLLREDEVGDPGTKDLGHPQHGSPIQETQSEVVTLVSPLPGSDMAALPAWRATSGLTLWPHTAEGRDLLGAENRALTGGQQAEDPTLASGAHQWPGSVEKLQGSVWCDAETLLSSSRTGGQAPPWLTDHDVQMLRLLAQGEVVDKARVPAHGQVLQVGFSTEAALQDLSSPRLSQLCSQGLCGLIKRPGDLPEVLSFHVDRVLGLRRSLPAVARRFHSPLLPYRYTDGGARPVIWWAPDVQHLSDPDEDQNSLALGWLQYQALLAHSCNWPGQAPCPGIHHTEWARLALFDFLLQVHDRLDRYCCGFEPEPSDPCVEERLREKCQNPAELRLVHILVRSSDPSHLVYIDNAGNLQHPEDKLNFRLLEGIDGFPESAVKVLASGCLQNMLLKSLQMDPVFWESQGGAQGLKQVLQTLEQRGQVLLGHIQKHNLTLFRDEDP

SEQ ID NO: 41309 - protein, 248 aa, Homo sapiens
MGRQRKSIKLYPTHPLVTFPRSWAKFQEKALLVEDTFTIDEVSEVLNGLQAVVHSEVESELINTAYTNVLLLRQLFAQAEKWYLKLQTDISELENRELLEQVAEFEKAEITSSNKKPILDVTKPKLAPLNEGGTAELLNKEILRLQEENEKLKSRLKTIEIQATNALDEKSKLEKALQDLQLDQGNQKDFIKAQDLSNLENTVAALKSEFQKTLNDKTENQKSLEENLATAKHDLLRVQEQLHMAEKI

SEQ ID NO: 41310 - protein, 1023 aa, Homo sapiens
MLLHPSPNCSLRAESLVHVHFKEEIGVAELIPLVTTYIILFAYIYFSTRKIDMVKSKWGLALAAVVTVLSSLLMSVGLCTLFGLTPTLNGGEIFPYLVVVIGLENVLVLTKSVVSTPVDLEVKLRIAQGLSSESWSIMKNMATELGIILIGYFTLVPAIQEFCLFAVVGLVSDFFLQMLFFTTVLSIDIRRMELADLNKRLPPEACLPSAKPVGQPTRYERQLAVRPSTPHTITLQPSSFRNLRLPKRLRVVYFLARTRLAQRLIMAGTVVWIGILVYTDPAGLRNYLAAQVTEQSPLGEGALAPMPVPSGMLPPSHPDPAFSIFPPDAPKLPENQTSPGESPERGGPAEVVHDSPVPEVTWGPEDEELWRKLSFRHWPTLFSYYNITLAKRYISLLPVIPVTLRLNPREALEGRHPQDGRSAWPPPGPIPAGHWEAGPKGPGGVQAHGDVTLYKVAALGLATGIVLVLLLLCLYRVLCPRNYGQLGGGPGRRRRGELPCDDYGYAPPETEIVPLVLRGHLMDIECLASDGMLLVSCCLAGHVCVWDAQTGDCLTRIPRPGQRRDSGVGSGLEAQESWERLSDGGKAGPEEPGDSPPLRHRPRGPPPPSLFGDQPDLTCLIDTNFSAQPRSSQPTQPEPRHRAVCGRSRDSPGYDFSCLVQRVYQEEGLAAVCTPALRPPSPGPVLSQAPEDEGGSPEKGSPSLAWAPSAEGSIWSLELQGNLIVVGRSSGRLEVWDAIEGVLCCSSEEVSSGITALVFLDKRIVAARLNGSLDFFSLETHTALSPLQFRGTPGRGSSPASPVYSSSDTVACHLTHTVPCAHQKPITALKAAAGRLVTGSQDHTLRVFRLEDSCCLFTLQGHSGAITTVYIDQTMVLASGGQDGAICLWDVLTGSRVSHVFAHRGDVTSLTCTTSCVISSGLDDLISIWDRSTGIKFYSIQQDLGCGASLGVISDNLLVTGGQGCVSFWDLNYGDLLQTVYLGKNSEAQPARQILVLDNAAIVCNFGSELSLVYVPSVLEKLD

SEQ ID NO: 41311 - protein, 421 aa, Homo sapiens
MLTAISCILPMALVSHSVAKLILVNFHWQVSEILDRYKSNSAQLLVEARVQPNPSKHVPTSHPPHHCAVCMQFVRKENLLSLACQHQFCRSCWEQHCSVLVKDGVGVGVSCMAQDCPLRTPEDFVFPLLPNEELREKYRRYLFRDYVESHYQLQLCPGADCPMVIRVQEPRARRVQCNRCNEVFCFKCRQMYHAPTDCATIRKWLTKCADDSETANYISAHTKDCPKCNICIEKNGGCNHMQCSKCKHDFCWMCLGDWKTHGSEYYECSRYKENPDIVNQSQQAQAREALKKYLFYFERWENHNKSLQLEAQTYQRIHEKIQERVMNNLGTWIDWQYLQNAAKLLAKCRYTLQYTYPYAYYMESGPRKKLFEYQQAQLEAEIENLSWKVERADSYDRGDLENQMHIAEQRRRTLLKDFHDT

SEQ ID NO: 41312 - protein, 276 aa, Homo sapiens [sequence omitted]

SEQ ID NO: 41313 - protein, 119 aa, Homo sapiens
MAASVEQREGTIQVQGQALFFREALPGSGQARFSVLLLHGIRFSSETWQNLGTLHRLAQAGYRAVAIDLPGHFQHIEERLETNVQNCQSPDTLCPTHCSPVLNEPCPEVSVVSFCPSDF

SEQ ID NO: 41314 - protein, 424 aa, Homo sapiens
MASCCGWFKRWREPVRKVTLLMVGLDNAGKTATAKGIQGEYPEDVAPTVGFSKINLRQGKFEVTIFDLGGGIRIRGIWKNYYAESYGVIFVVDSSDEERMEETKEAMSEMLRHPRISGKPILVLANKQDKEGALGEADVIECLSLEKLVNEHKCLCQIEPCSAISGYGKKIDKSIKKGLYWLLHVIARDFDALNERIQKETTEQRALEEQEKQERAERVRKLREERKQNEQEQAELDGTSGLAELDPEPTNPFQPIASVIIENEGKLEREKKNQKMEKDSDGCHLKHKMEHEQIETQGQVNHNGQKNNEFGLVENYKEALTQQLKNEDETDRPSLESANGKKKTKKLRMKRNHRVEPLNIDDCAPESPTPPPPPPPVGWGTPKVTRLPKLEPLGETHHNDFYRKPLPPLAVPQRPNSDAHDVIS

SEQ ID NO: 41315 - protein, 87 aa, Homo sapiens
MEKFVDPGNHNSGIDLLRTYLWRCQFLLPFVSLGLMCFGALIGLCACICRSLYPTIATGILHLLAAQYYKERFTIMTLQSWETYHKI

SEQ ID NO: 41316 - protein, 185 aa, Homo sapiens
MYLKNISLCHIKHAFFPCVCVCVFSGQMYQQYQQQAGYGAQQPQAPPQQPQQYGIQYSASYSQQTGPQQPQQFQGYGQQPTSQAPAPAFSGQPQQLPAQPPQQYQASNYPAQTYTAQTSQPTNYTVAPASQPGMAPSQPGAYQPRPGFTSLPGSTMTPPPSGPNPYARNRPPFGQGYTQPGPGYR

SEQ ID NO: 41317 - protein, 484 aa, Homo sapiens [sequence omitted]

SEQ ID NO: 41318 - protein, 337 aa, Homo sapiens
MESTTTSFPNETATIISQYKLFPTRFARGRRITCVVKHPALEKDIRYSFILDIQYAPEVSVTGYDGNWFVGRKGVNLKCNADANPPPFKSVWSRLDGQWPDGLLASDNTLHFVHPLTFNYSGVYICKVTNSLGQRSDQKVIYISDPPTTTTLQPTIQWHPSTADIEDLATEPKKLPFPLSTLATIKDDTIATIIASVVGGALFIVLVSVLAGIFCYRRRRTFRGDYFAKNYIPPSDMQKESQIDVLQQDELDSYPDSVKKENKNPVNNLIRKDYLEEPEKTQWNNVENLNRFERPMDYYEDLKMGMKFVSDEHYDENEDDLVSHVDGSVISRREWYV

SEQ ID NO: 41319 - protein, 1176 aa, Homo sapiens
MESLSPKKYSSSLRFKANGDYSGSYLTLSQPVPAKRSPSPLGTSVRSSPSLAKIQGSKQFSYDGTDKNIPMKPPTPLLNTTSSLSGYPLGRADFDHYTGRDSERALRLSEKPPYSKYSSRHKSHDNVYSLGGLEGRKASGSLLAMWNGSSLSDAGPPPISRSGAASMPSSPKQARKMSIQDSLALQPKLTRHKELASENINLRTRKYSSSSLSHMGAYSRSLPRLYRATENQLTPLSLPPRNSLGNSKRTKLGEKDLPHSVIDNDNYLNFSSLSSGALPYKTSASEGNPYVSSTLSVPASPRVARKMLLASTSSCASDDFDQASYVGTNPSHSLLAGESDRVFATRRNFSCGSVEFDEADLESLRQASGTPQPALRERKSSISSISGRDDLMDYHRRQREERLREQEMERLERQRLETILSLCAEYTKPDSRLSTGTTVEDVQKINKELEKLQLSDEESVFEEALMSPDTRYRCHRKDSLPDADLASCGSLSQSSASFFTPRSTRNDELLSDLTRTPPPPSSTFPKASSESSYLSILPKTPEGISEEQRSQELAAMEETRIVILNNLEELKQKIKDINDQMDESFRELDMECALLDGEQKSETTELMKEKEILDHLNRKIAELEKNIVGEKTKDADLLDVESKHFEDLEFQQLEHESRLDEEKENLTQQLLREVAEYQRNIVSRKEKISALKKQANHIVQQAQREQDHFVKEKNNLIMMLQREKENLCNLEKKYSSLSGGKGFPVNPNTLKEGYISVNEINEPCGNSTNLSPSTQFPADADAVATEPATAVLASQPQSKEHFRSLEERKKQHKEGLYLSDTLPRKKTTSSISPHFSSATMGRSITPKAHLPLGQSNSCGSVLPPSLAAMAKDSESRRMLRGYNHQQMSEGHRQKSEFYNRTASESNVYLNSFHYPDHSYKDQAFDTLSLDSSDSMETSISACSPDNISSASTSNIARIEEMERLLKQAHAEKTRLLESREREMEAKKRALEEEKRRREILEKRLQEETSQRQKLIEKEVKIRERQRAQARPLTRYLPVRKEDFDLRSHVETAGHNIDTCYHVSITEKTCRGFLIKMGGKIKTWKKRWFVFDRNKRTFSYYADKHETKLKGVIYFQAIEEVYYDHLKNANKSPNPLLTFSVKTHDRIYYMVAPSPEAMRIWMDVIVTGAEGYTHFLL

SEQ ID NO: 41320 - protein, 289 aa, Homo sapiens
MQNVINTVKGKALEVAEYLTPVLKESKFKETGVITPEEFVAAGDHLVHHCPTWQWATGEELKVKAYLPTGKQFLVTKNVPCYKRCKQMEYSDELEAIIEEDDGDGGWVDTYHNTGITGITEAVKEITLENKDNIRLQDCSALCEEEEDEDEGEAADMEEYEESGLLETDEATLDTRKIVEACKAKTDAGGEDAILQTRTYDLYITYDKYYQTPRLWLFGYDEQRQPLTVEHMYEDISQDHVKKTVTIENHPHLPPPPMCSVHPCRSVYVEINIFFDVIVYFMDLLLENL

SEQ ID NO: 41321 - protein, 19 aa, Homo sapiens
MDPKGYCCYYGARQLLSQL

SEQ ID NO: 41322 - protein, 1280 aa, Homo sapiens
MHARNLALVWAPNLLRSKEIEATGCNGDAAFLAVRVQQVVIEFILNHVDQIFNNGAPGSLENDENRPIMKSLTLPALSLPMKLVSLEEAQARSLATNHPARKERRENSLPEIVPPMGTLFHTVLELPDNKRKLSSKSKKWKSIFNLGRSGSDSKSKLSRNGSVFVRGQRLSVEKATIRPAKSMDSLCSVPVEGKETKGNFNRTVTTGGFFIPATKMHSTGTGSSCDLTKQEGEWGQEGMPPGAEGGFDVSSDRSHLQGAQARPPPEQLKVFRPVEDPESEQTAPKMLGMFYTSNDSPSKSVFTSSLFQMEPSPRNQRKALNISEPFAVSVPLRVSAVISTNSTPCRTPPKELQSLSSLEEFSFHGSESGGWPEEEKPLGAETSAASVPKKAGLEDAKAVPEAPGTVECSKGLSQEPGAHLEEKKTPESSLSSQHLNELEKRPNPEKVVEEGREAGEMESSTLQESPRARAEAVLLHEMDEDDLANALIWPEIQQELKIIESEEELSSLPPPALKTSPIQPILESSLGPFIPSEPPGSLPCGSFPAPVSTPLEVWTRDPANQSTQGASTAASREKPEPEQGLHPDLASLAPLEIVPFEKASPQATVEVGGPGNLSPPLPPAPPPPTPLEESTPVLLSKGGPEREDSSRKLRTDLYIDQLKSQDSPEISSLCQGEEATPRHSDKQNSKNAASEGKGCGFPSPTREVEIVSQEEEDVTHSVQEPSDCDEDDTVTDIAQHGLEMVEPWEEPQWVTSPLHSPTLKDAHKAQVQGLQGHQLEKRLSHRPSLRQSHSLDSKPTVKSQWTLEVPSSSSCANLETERNSDPLQPQAPRREITGWDEKALRSFREFSGLKGAEAPPNQKGPSGVQPNPAETSPISLAEGKELGTHLGHSSPQIRQGGVPGPESSKESSPSVQDSTSPGEHPAKLQLKSTECGPPKGKNRPSSLNLDPAIPIADLFWFENVASFSSPGMQVSEPGDPKVTWMTSSYCKADPWRVYSQDPQDLDIVAHALTGRRNSAPVSVSAVRTSFMVKMCQARAVPVIPPKIQYTQIPQPLPSQSSGENGVQPLERSQEGPSSTSGTTQKPAKDDSPSSLESSKEEKPKQDPGAIKSSPVDATAPCMCEGPTLSPEPGSSNLLSTQDAVVQCRKRMSETEPSGDNLLSSKLERPSGGSKPFHRSRPGRPQSLILFSPPFPIMDHLPPSSTVTDSKVLLSPIRSPTQTVSPGLLCGELAENTWVTPEGVTLRNKMTIPKNGQRLETSTSCFYQPQRRSVILDGRSGRQIE

SEQ ID NO: 41323 - protein, 57 aa, Homo sapiens
MRWSCEHLIMVWINAFVMLTTQLLPSKYCDLLHKSAAHLGKWQKLEHGSYSNAPQHM

SEQ ID NO: 41324 - protein, 122 aa, Homo sapiens
MRTIDDRIVHELNTTVPTASFAGKIDASQTCKQLYESLMAAHASRDRVIKNCIAQTSAVVKNLREEREKNLDDLTLLKQLRKEQTKLKWMQSELNVEEVVNDRSWKVFNERCRIHFKPPKNE

SEQ ID NO: 41325 - protein, 79 aa, Homo sapiens
MFYAPWCPHCKKVIPHFTATADAFKDDRKIACAAVDCVKDKNQDLCQQEAVKGYPTFHYYHYGKFAEKYDSDRTVFSVG

SEQ ID NO: 41326 - protein, 467 aa, Homo sapiens
MKQIDIMVAHKKSEWEGRTHALETCLKIREQELKSLRSQLDVTHKEVGMLHQQVEEHEKIKQEMTMEYKQELKKLHEELCILKRSYEKLQKKQMREFRGNTKNHREDRSEIERLTAKIEEFRQKSLDWEKQRLIYQQQVSSLEAQRKALAEQSEIIQAQLVNRKQKLESVELSSQSEIQHLSSKLERANDTICANELEIERLTMRVNDLVGTSMTVLQEQQQKEEKLRESEKLLEALQEEKRELKAALQSQENLIHEARIQKEKLQEKVKATNTQHAVEAISLESVSATCKQLSQELMEKYEELKRMEAHNNEYKAEIKKLKEQILQGEQSYSSALEGMKMEISHLTQELHQRDITIASTKGSSSDMEKRLRAEMQKAEDKAVEHKEILDQLESLKLENRHLSEMVMKLELGLHECSLPVSPLGSIATRFLEEEELRSHHILERLDAHIEELKRESEKTVRQFTALK

SEQ ID NO: 41327 - protein, 261 aa, Homo sapiens [sequence omitted]

SEQ ID NO: 41328 - protein, 2634 aa, Homo sapiens [sequence omitted]

SEQ ID NO: 41329 - protein, 403 aa, Homo sapiens
MVLHSPSLLASWQRNELTDRRFLQLNKCPACFGTSWCRRFLNGQVVFEAWGRLRLLDFLNVKNVYFAQYGEPREGGRRRVVLKRLGSQRELAQLDQSICKRATGRPRCDLLQAMPRTEFARLNGDVRLLTPEAVEGWSDLVHCPSQRLLDRLVRRYAETKDSGSFLLRNLKDSERMQLLLTLAFNPEPLVLQSFPSDEGWPFAKYLGACGRMVAVNYVGEELWSYFNAPWEKRVDLAWQLMEIAEQLTNNDFEFALYLLDVSFDNFAVGPRDGKVIIVDAENVLVADKRLIRQNKPENWDVWYESKFDDCDKEACLSFSKEILCARATVDHNYYAVCQNLLSRHATWRGTSGGLLHDPPSEIAKDGRLEALLDECANPKKRYGRFQAAKELREYLAQLSNNVR

SEQ ID NO: 41330 - protein, 124 aa, Homo sapiens
MISELDFQDSVFVLGFSEELNKLLLQLYLDNRKEIRTILSELAPSLPSYHNLEWRLDVQLASRSLRQQIKPAVTIKLHLNQNGDHNTKVLQTDPATLLHLVQQLEQALEEMKTNHCRRVVRNIK

SEQ ID NO: 41331 - protein, 248 aa, Homo sapiens
MPAKATIFNLKCDPVFDFGTGPRNAAYYSPHGHILVLAGFGNLRGQMEVWDVKNYKLISKPVASDSTYFAWCPDGEHILTATCAPRLRVNNGYKIWHYTGSILHKYDVPSNAELWQVSWQPFLDGIFPAKTITYQAVPSEVPNEEPKVATAYRPPALRNKPITNSKLHEEEPPQNMKPQSGNDKPLSKTALKNQRKHEAKKAAKQKLKAIEQLKEQAATGKQLEKNQLEKIQKETALLQELEDLELGI

SEQ ID NO: 41332 - protein, 46 aa, Homo sapiens
MRLLLLLLVAASAMVRSEASANLGGVPSKRLKMQYATGPLLKFQIW

SEQ ID NO: 41333 - protein, 743 aa, Homo sapiens
MDITDINTPKPKKKQRWTPLEISLSVLVLLLTIIAVTMIALYATYDDGICKSSDCIKSAARLIQNMDATTEPCTDFFKYACGGWLKRNVIPETSSRYGNFDILRDELEVVLKDVLQEPKTEDIVAVQKAKALYRSCINESAIDSRGGEPLLKLLPDIYGWPVATENWEQKYGASWTAEKAIAQLNSKYGKKVLINLFVGTDDKNSVNHVIHIDQPRLGLPSRDYYECTGIYKEACTAYVDFMISVARLIRQEERLPIDENQLALEMNKVMELEKEIANATAKPEDRNDPMLLYNKMTLAQIQNNFSLEINGKPFSWLNFTNEIMSTVNISITNEEDVVVYAPEYLTKLKPILTKYSARDLQNLMSWRFIMDLVSSLSRTYKESRNAFRKALYGTTSETATWRRCANYVNGNMENAVGRLYVEAAFAGESKHVVEDLIAQIREVFIQTLDDLTWMDAETKKRAEEKALAIKERIGYPDDIVSNDNKLNNEYLELNYKEDEYFENIIQNLKFSQSKQLKKLREKVDKDEWISGAAVVNAFYSSGRNQIVFPAGILQPPFFSAQQSNSLNYGGIGMVIGHEITHGFDDNGRNFNKDGDLVDWWTQQSASNFKEQSQCMVYQYGNFSWDLAGGQHLNGINTLGENIADNGGLGQAYRAYQNYIKKNGEEKLLPGLDLNHKQLFFLNFAQVWCGTYRPEYAVNSIKTDVHSPGNFRIIGTLQNSAEFSEAFHCRKNSYMNPEKKCRVW

SEQ ID NO: 41334 - protein, 621 aa, Homo sapiens
MIFTPCKLCHLCCRESEINMHSKVTIICIRFLFWFLLLCMLIGKSHTEDDIIIATKNGKVRGMNLTVFGGTVTAFLGIPYAQPPLGRLRFKKPQSLTKWSDIWNATKYANSCCQNIDQSFPGFHGSEMWNPNTDLSEDCLYLNVWIPAPKPKNATVLIWIYGGGFQTGTSSLHVYDGKFLARVERVIVVSMNYRVGALGFLALPGNPEAPGNMGLFDQQLALQWVQKNIAAFGGNPKSVTLFGESAGAASVSLHLLSPGSHSLFTRAILQSGSFNAPWAVTSLYEARNRTLNLAKLTGCSRENETEIIKCLRNKDPQEILLNEAFVVPYGTPLSVNFGPTVDGDFLTDMPDILLELGQFKKTQILVGVNKDEGTAFLVYGAPGFSKDNNSIITRKEFQEGLKIFFPGVSEFGKESILFHYTDWVDDQRPENYREALGDVVGDYNFICPALEFTKKFSEWGNNAFFYYFEHRSSKLPWPEWMGVMHGYEIEFVFGLPLERRDNYTKAEEILSRSIVKRWANFAKYGNPNETQNNSTSWPVFKSTEQKYLTLNTESTRIMTKLRAQQCRFWTSFFPKVLEMTGNIDEAEWEWKAGFHRWNNYMMDWKNQFNDYTSKKESCVGL

SEQ ID NO: 41335 - protein, 441 aa, Homo sapiens [sequence omitted]

SEQ ID NO: 41336 - protein, 854 aa, Homo sapiens
MPGGSGGRKMAAGDIGELLVPHMPTIRVPRSGDRVYKNECAFSYDSPNSEGGLYVCMNTFLAFGREHVERHFRKTGQSVYMHLKRHVREKVRGASGGALPKRRNSKIFLDLDTDDDLNSDDYEYEDEAKLVIFPDHYEIALPNIEELPALVTIACDAVLSSKSPYRKQDPDTWENELPVSKYANNLTQLDNGVRIPPSGWKCARCDLRENLWLNLTDGSVLCGKWFFDSSGGNGHALEHYRDMGYPLAVKLGTITPDGADVYSFQEEEPVLDPHLAKHLAHFGIDMLHMHGTENGLQDNDIKLRVSEWEVIQESGTKLKPMYGPGYTGLKNLGNSCYLSSVMQAIFSIPEFQRAYVGNLPRIFDYSPLDPTQDFNTQMTKLGHGLLSGQYSKPPVKSELIEQVMKEEHKPQQNGISPRMFKAFVSKSHPEFSSNRQQDAQEFFLHLVNLVERNRIGSENPSDVFRFLVEERIQCCQTRKVRYTERVDYLMQLPVAMEAATNKDELIAYELTRREAEANRRPLPELVRAKIPFSACLQAFSEPENVDDFWSSALQAKSAGVKTSRFASFPEYLVVQIKKFTFGLDWVPKKFDVSIDMPDLLDINHLRARGLQPGEEELPDISPPIVIPDDSKDRLMNQLIDPSDIDESSVMQLAEMGFPLEACRKAVYFTGNMGAEVAFNWIIVHMEEPDFAEPLTMPGYGGAASAGASVFGASGLDNQPPEEIVAIITSMGFQRNQAIQALRATNNNLERALDWIFSHPEFEEDSDFVIEMENNANANIISEAKPEGPRVKDGSGTYELFAFISHMGTSTMSGHYICHIKKEGRWVIYNDHKVCASERPPKDLGYMYFYRRIPS

SEQ ID NO: 41337 - protein, 117 aa, Homo sapiens
MESGAKGCKVMASGKLRGQRAKSMKFVDGLTIHSGDPINYYVGTAVCHVLLRQGVLGIKVKIMLPWDPTGKTGPKKPLPDHVSIVEPKDEILPTTPISEQKGGKPEPSAMPQPVPTA

SEQ ID NO: 41338 - protein, 1386 aa, Homo sapiens
MDKELEFKNDLIDDKEFDIPQVDTPPTLESILNETDDEDESFILEDPTLLNIDTIDSHSYDTSSVASSDSGDRTNLKRKKKLPDSFSLHGSVMRHSLLKGISAQIVSAADKVDAGLPTAIAVSSLIAVGTSHGLALIFDQNQALRLCLGSTSVGGQYGAISALSINNDCSRLLCGFAKGQITMWDLASGKLLRSITDAHPPGTAILHIKFTDDPTLAICNDSGGSVFELTFKRVMGVRTCESRCLFSGSKGEVCCIEPLHSKPELKDHPITQFSLLAMASLTKILVIGLKPSLKVWMTFPYGRMDPSSVPLLAWHFVAVQNYVNPMLAFCRGDVVHFLLVKRDESGAIHVTKQKHLHLYYDLINFTWINSRTVVLLDSVEKLHVIDRQTQEELETVEISEVQLVYNSSHFKSLATGGNVSQALALVGEKACYQSISSYGGQIFYLGTKSVYVMMLRSWRERVDHLLKQDCLTEALALAWSFHEGKAKAVVGLSGDASKRKAIVADRMVEILFHYADRALKKCPDQGKIQVMEQHFQDMVPVIVDYCLLLQRKDLLFSQMYDKLSENSVAKGVFLECLEPYILSDKLVGITPQVMKDLIVHFQDKKLMENVEALIVHMDITSLDIQQVVLMCWENRLYDAMIYVYNRGMNEFISPMEKLFRVIAPPLNAGKTLTDEQVVMGNKLLVYISCCLAGRAYPLGDIPEDLVPLVKNQVFEFLIRLHSAEASPEEEIYPYIRTLLHFDTREFLNVLALTFEDFKNDKQAVEYQQRIVDILLKVMVENSDFTPSQVGCLFTFLARQLAKPDNTLFVNRTLFDQVLEFLCSPDDDSRHSERQQVLLELLQAGGIVQFEESRLIRMAEKAEFYQICEFMYEREHQYDKIIDCYLRDPLREEEVFNYIHNILSIPGHSAEEKQSVWQKAMDHIEELVSLKPCKAAELVATHFSGHIETVIKKLQNQVLLFKFLRSLLDPREGIHVNQELLQISPCITEQFIELLCQFNPTQVIETLQVLECYRLEETIQITQKYQLHEVTAYLLEKKGDIHGAFLIMLERLQSKLQEVTHQGENTKEDPSLKDVEDTMVETIALCQRNSHNLNQQQREALWFPLLEAMMAPQKLSSSAIPHLHSEALKSLTMQVLNSMAAFIALPSILQRILQDPVYGKGKLGEIQGLILGMLDTFNYEQTLLETTTSLLNQDLHWSLCNLRASVTRGLNPKQDYCSICLQQYKRRQEMADEIIVFSCGHLYHSFCLQNKECTVEFEGQTRWTCYKCSSSNKVGKLSENSSEIKKGRITPSQVKMSPSYHQSKGDPTAKKGTSEPVLDPQQIQAFDQLCRLYRGSSRLALLTELSQNRSSESYRPFSGSQSAPAFNSIFQNENFQLQLIPPPVTED

SEQ ID NO: 41339 - protein, 195 aa, Homo sapiens
MLNRRYLSPKWIKMFVLDEADEMLSRGFKDQIYEIFQKLNTSIQVVLLSATMPTDVLEVTKKFMRDPIRILVKKEELTLEGIKQFYINVEREEWKLDTLCDLYETLTITQAVIFLNTRRKVDWLTEKMHARDFTVSALHGDMDQKERDVIMREFRSGSSRVLITTDLLARGIDVQQVSLVINYDLPTNRENYIHR

SEQ ID NO: 41340 - protein, 325 aa, Homo sapiens [sequence omitted]

SEQ ID NO: 41341 - protein, 380 aa, Homo sapiens
MARLGAVRSHYCALLLAAALAVCAFYYLGSGRETFSSATKRLKEARAGAPAAPSPPALELARGSVAPAPGAKAKSLEGGGAGPVDYHLLMMFTKAEHNAALQAKARVALRSLLRLAKFEAHEVLNLHFVSEEASREVAKGLLRELLPPAAGFKCKVIFHDVAVLTDKLFPIVEAMQKHFSAGLGTYYSDSIFFLSVAMHQIMPKEILQIIQLDLDLKFKTNIRELFEEFDSFLPGAIIGIAREMQPVYRHTFWQFRHENPQTRVGGPPPEGLPGFNSGVMLLNLEAMRQSPLYSRLLEPAQVQQLADKYHFRGHLGDQDFFTMIGMEHPKLFHVLDCTWNRQLCTWWRDHGYSDVFEAYFRCEGHVKIYHGNCNTPIPED

SEQ ID NO: 41342 - protein, 40 aa, Homo sapiens
MELLPLWLCLGFHFLTVGWRNRSGTATAASQGVCKLVSFP

SEQ ID NO: 41343 - protein, 235 aa, Homo sapiens
MCSEIILRQEVLKDGFHRDLLIKVKFGESIEDLHTCRLLIKQDIPAGLYVDPYELASLRERNITEAVMVSENFDIEAPNYLSKESEVLIYARRDSQCIDCFQAFLPVHCRYHRPHSEDGEASIVVNNPDLLMFCDQAGSRRMIRFRFDSFDKTIEFPILKCWAHSEVAAPCALENEDICQWNKMKYKSVYKNVILQVPVGLTVHTSLVCSVTLLITILCSTLILVAVFKYGHFSL

SEQ ID NO: 41344 - protein, 627 aa, Homo sapiens
MKQAPEILGSANGKTPSCEVNRECSVFLSKAQLSSSLQEGVMQKFNGHDALPFIPADKLKDLTSRVFNGEPGAHDAKLRFESQEMKGIGTPPNTTPIKNGSPEIKLKITKTYMNGKPLFESSICGDSAADVSQSEENGQKPENKARRNRKRSIKYDSLLEQGLVEAALVSKISSPSDKKIPAKKESCPNTGRDKDHLLKYNVGDLVWSKVSGYPWWPCMVSADPLLHSYTKLKGQKKSARQYHVQFFGDAPERAWIFEKSLVAFEGEGQFEKLCQESAKQAPTKAEKIKLLKPISGKLRAQWEMGIVQAEEAASMSVEERKAKFTFLYVGDQLHLNPQVAKEAGIAAESLGEMAESSGVSEEAAENPKSVREECIPMKRRRRAKLCSSAETLESHPDIGKSTPQKTAEADPRRGVGSPPGRKKTTVSMPRSRKGDAASQFLVFCQKHRDEVVAEHPDASGEEIEELLRSQWSLLSEKQRARYNTKFALVAPVQAEEDSGNVNGKKRNHTKRIQDPTEDAEAEDTPRKRLRTDKHSLRKRDTITDKTARTSSYKAMEAASSLKSQAATKNLSDACKPLKKRNRASTAASSALGFSKSSSPSASLTENELLWEPTPVKLDLNPAALYCT

SEQ ID NO: 41345 - protein, 1345 aa, Homo sapiens
MKQAPEILGSANGKTPSCEVNRECSVFLSKAQLSSSLQEGVMQKFNGHDALPFIPADKLKDLTSRVFNGEPGAHDAKLRFESQEMKGIGTPPNTTPIKNGSPEIKLKITKTYMNGKPLFESSICGDSAADVSQSEENGQKPENKARRNRKRSIKYDSLLEQGLVEAALVSKISSPSDKKIPAKKESCPNTGRDKDHLLKYNVGDLVWSKVSGYPWWPCMVSADPLLHSYTKLKGQKKSARQYHVQFFGDAPERAWIFEKSLVAFEGEGQFEKLCQESAKQAPTKAEKIKLLKPISGKLRAQWEMGIVQAEEAASMSVEERKAKFTFLYVGDQLHLNPQVAKEAGIAAESLGEMAESSGVSEEAAENPKSVREECIPMKRRRRAKLCSSAETLESHPDIGKSTPQKTAEADPRRGVGSPPGRKKTTVSMPRSRKGDAASQFLVFCQKHRDEVVAEHPDASGEEIEELLRSQWSLLSEKQRARYNTKFALVAPVQAEEDSGNVNGKKRNHTKRIQDPTEDAEAEDTPRKRLRTDKHSLRKRDTITDKTARTSSYKAMEAASSLKSQAATKNLSDACKPLKKRNRASTAASSALGFSKSSSPSASLTENEVSDSPGDEPSESPYESADETQTEVSVSSKKSERGVTAKKEYVCQLCEKPGSLLLCEGPCCGAFHLACLGLSRRPEGRFTCSECASGIHSCFVCKESKTDVKRCVVTQCGKFYHEACVKKYPLTVFESRGFRCPLHSCVSCHASNPSNPRPSKGKMMRCVRCPVAYHSGDACLAAGCSVIASNSIICTAHFTARKGKRHHAHVNVSWCFVCSKGGSLLCCESCPAAFHPDCLNIEMPDGSWFCNDCRAGKKLHFQDIIWVKLGNYRWWPAEVCHPKNVPPNIQKMKHEIGEFPVFFFGSKDYYWTHQARVFPYMEGDRGSRYQGVRGIGRVFKNALQEAEARFREIKLQREARETQESERKPPPYKHIKVNKPYGKVQIYTADISEIPKCNCKPTDENPCGFDSECLNRMLMFECHPQVCPAGEFCQNQCFTKRQYPETKIIKTDGKGWGLVAKRDIRKGEFVNEYVGELIDEEECMARIKHAHENDITHFYMLTIDKDRIIDAGPKGNYSRFMNHSCQPNCETLKWTVNGDTRVGLFAVCDIPAGTELTFNYNLDCLGNEKTVCRCGASNCSGFLGDRPKTSTTLSSEEKGKKTKKKTRRRRAKGEGKRQSEDECFRCGDGGQLVLCDRKFCTKAYHLSCLGLGKRPFGKWECPWHHCDVCGKPSTSFCHLCPNSFCKEHQDGTAFSCTPDGRSYCCEHDLGAASVRSTKTEKPPPEPGKPKGKRRRRRGWRRVTEGK

SEQ ID NO: 41346 - protein, 340 aa, Homo sapiens [sequence omitted]

SEQ ID NO: 41347 - protein, 130 aa, Homo sapiens [sequence omitted]

SEQ ID NO: 41348 - protein, 297 aa, Homo sapiens
MTSLPLGVKVEDSAFGKPAGGGAGQAPSAAAATAAAMGADEEGAKPKVSPSLLPFSVEALMADHRKPGAKESALAPSEGVQAAGGSAQPLGVPPGSLGAPDAPSSPRPLGHFSVGGLLKLPEDALVKAESPEKPERTPWMQSPRFSPPPARRLSPPACTLRKHKTNRKPRTPFTTAQLLALERKFRQKQYLSIAERAEFSSSLSLTETQVKIWFQNRRAKAKRLQEAELEKLKMAAKPMLPPAAFGLSFPLGGPAAVAAAAGASLYGASGPFQRAALPVAPVGLYTAHVGYSMYHLT

SEQ ID NO: 41349 - protein, 8 aa, Homo sapiens
MAPVVTGH

SEQ ID NO: 41350 - protein, 1731 aa, Homo sapiens
MGETKVDQEELFTSISEIFSDLDPDVVYLMLSECDFKVENAMDCLLELSATDTKIEESSSQSFVASENQVGAAESKIMEKRPEEESEDSKMDSFLDMQLTEDLDSLIQNAFEKLNSSPDDQVYSFLPSQDVNSFNDSSEFINPDSSNMTPIFSTQNMNLNGENLENSGSTLSLNPLPSHSVLNESKCFIKDNTLALESNYPEDSLLSSSLNVASDSIAGCSSLNQKQKELLESECVEAQFSEAPVDLDASEPQACLNLPGLDLPGTGGDQKSTRVSDVFLPSEGFNFKPHKHPELPTKGKDVSYCPVLAPLPLLLPPPPPPPMWNPMIPAFDLFQGNHGFVAPVVTTAAHWRSVNYTFPPSVISHTSPTKVWRNKDGTSAYQVQETPVSQVVRKKTSYVGLVLVLLRGLPGSGKSFLARTLQEDNPSGVILSTDDYFYINGQYQFDVKYLGEAHEWNQNRAKEAFEKKISPIIIDNTNLQAWEMKPYVALSQKHKYKVLFREPDTWWKFKPKELARRNIHGVSKEKITRMLEHYQRFVSVPIIMSSSVPEKIERIELCAYSCEDRSTSPRDDEDIISEKEENILSLSLKHLEFTEEKNLDVTKETMLPENVAYLSNADLNKRRKEISDMNPSIQSALILETPHMYFSDSESKLQATDKSENEQIEMVAVKGYSKTDTDSSMERVSPSTCCSENNQEDCDLANSGPLQNEKSSPGEIVEERATVTKKAFGKQKSKSTLEKFPRHELSNFVGDWPVDKTIGQRTKRNRKTEKTSSVQSDKKYNYPQSHKLVNSVSVNTDCVQQRGSPHESVEDGRKSQCDDASEPLNSYKYDAYKNIDKNSFNIMGDWPSSDSLAQREHRSRMPKTGLSEPNLEIGTNDKMNEISLSTAHEACWGTSSQKLKTLGSSNLGSSEMLLSEMTCESQTCLSKKSHGQHTSLPLTFTNSAPTVSGVVEPQTLAECQEQMPKRDPGKEVGMCTQTEPQDFALLWKIEKNKISISDSIKVLTGRLDGFKPKVFNINTKSDVQEAIPYRVMYDKSTFVEESELTSADESENLNILCKLFGSFSLEALKDLYERCNKDIIWATSLLLDSETKLCEDTEFENFQKSCDGSQIGPFSLGLNLKEIISQRGTLENSNSPVPEFSHGIGISNADSQSTCDAERGNSEQAEMRAVTPENHESMTSIFPSAAVGLKNNNDILPNSQEELLYSSKQSFPGILKATTPKDMSETEKNLVVTETGDNIHSPSHFSDIFNFVSSTSNLELNEEIYFTDSLEIKRNENFPKDYVKFSDEEEFMNEDEKEMKEILMAGSSLSAGVSGEDKTEILNPTPAMAKSLTIDCLELALPPELAFQLNELFGPVGIDSGSLTVEDCVVHIDLNLAKVIHEKWKESVMERQRQEEVSCGKFMQDPSLVGHTGLDNPEQKSSQRTGKKLLKTLTASEMLPLLDHWNTQTKKVSLREIMSEEIALQEKHNLKRETLMFEKDCATKLKEKQLFKIFPAINQNFLVDIFKDHNYSLEHTVQFLNCVLEGDPVKTVVAQEFVHQNENVTSHTGQKSKEKKPKKLKETEETPSELSFQDFEYPDYDDYRAEAFLHQQKRMECYSKAKEAYRIGKKNVATFYAQQGTLHEQKMKEANHLAAIEIFEKVNASLLPQNVLDLHGLHVDEALEHLMRVLEKKTEEFKQNGGKPYLSVITGRGNHSQGGVARIKPAVIKYLISHSFRFSEIKPGCLKVMLK

SEQ ID NO: 41351 - protein, 1703 aa, Homo sapiens [sequence omitted]

SEQ ID NO: 41352 - protein, 297 aa, Homo sapiens [sequence omitted]

SEQ ID NO: 41353 - protein, 568 aa, Homo sapiens
MEWKETARWIKFEEKVEQGGERWSKPHVATLSLHSLFELRTCMEKGSIMLDREASSLPQLVEMIVDHQIETGLLKPELKDKVTYTLLRKHRHQTKKSNLRSLADIGKTVSSASRMFTNPDNGSPAMTHRNLTSSSLNDISDKPEKDQLKNKFMKKLPRDAEASNVLVGEVDFLDTPFIAFVRLQQAVMLGALTEVPVPTRFLFILLGPKGKAKSYHEIGRAIATLMSDEVFHDIAYKAKDRHDLIAGIDEFLDEVIVLPPGEWDPAIRIEPPKSLPSSDKRKNMYSGGENVQMNGDTPHDGGHGGGGHGDCEELQRTGRFCGGLIKDIKRKAPFFASDFYDALNIQALSAILFIYLATVTNAITFGGLLGDATDNMQGVLESFLGTAVSGAIFCLFAGQPLTILSSTGPVLVFERLLFNFSKDNNFDYLEFRLWIGLWSAFLCLILVATDASFLVQYFTRFTEEGFSSLISFIFIYDAFKKMIKLADYYPINSNFKVGYNTLFSCTCVPPDPGEGITLCVYARFVFGGRCRLHACKFSTCCHGPQELVLFFSLKNSATEFDVSLPEVF

SEQ ID NO: 41354 - protein, 130 aa, Homo sapiens
MRTKPQRPRATRSYLGQPCGSPRRTEETGETWERVAFSLFTHTCTQPLAGTVDTHLPSLLLPVILHPLGAASAGRALEPKADPHTCPYGRKESRGEKVRRGRAKSNSGPNVPGPPAAPQSLKSGSPSTRR

SEQ ID NO: 41355 - protein, 956 aa, Homo sapiens
MFHLDPSLTHTIFNPEVFQPQMALPTADGPYLQILEQPKQRGFRFRYVCEGPSHGGLPGASSEKNKKSYPQVKICNYVGPAKVIVQLVTNGKNIHLHAHSLVGKHCEDGICTVTAGPKDMVVGFANLGILHVTKKKVFETLEARMTEACIRGYNPGLLVHPDLAYLQAEGGGDRQLGDREKELIRQAALQQTKEMDLSVVRLMFTAFLPDSTGSFTRRLEPVVSDAIYDSKAPNASNLKIVRMDRTAGCVTGGEEIYLLCDKVQKDDIQIRFYEEEENGGVWEGFGDFSPTDVHRQFAIVFKTPKYKDINITKPASVFVQLRRKSDLETSEPKPFLYYPEIKDKEEVQRKRQKLMPNFSDSFGGGSGAGAGGGGMFGSGGGGGGTGSTGPGYSFPHYGFPTYGGITFHPGTTKSNAGMKHGTMDTESKKDPEGCDKSDDKNTVNLFGKVIETTEQDQEPSEATVGNGEVTLTYATGTKEESAGVQDNLFLEKAMQLAKRHANALFDYAVTGDVKMLLAVQRHLTAVQDENGDSVLHLAIIHLHSQLVRDLLEVTSGLISDDIINMRNDLYQTPLHLAVITKQEDVVEDLLRAGADLSLLDRLGNSVLHLAAKEGHDKVLSILLKHKKAALLLDHPNGDGLNAIHLAMMSNSLPCLLLLVAAGADVNAQEQKSGRTALHLAVEHDNISLAGCLLLEGDAHVDSTTYDGTTPLHIAAGRGSTRLAALLKAAGADPLVENFEPLYDLDDSWENAGEDEGVVPGTTPLDMATSWQVFDILNGKPYEPEFTSDDLLAQGDMKQLAEDVKLQLYKLLEIPDPDKNWATLAQKLGLGILNNAFRLSPAPSKTLMDNYEVSGGTVRELVEALRQMGYTEAIEVIQAASSPVKTTSQAHSLPLSPASTRQQIDELRDSDSVCDSGVETSFRKLSFTESLTSGASLLTLNKMPHDYGQEGPLEGKI

SEQ ID NO: 41356 - protein, 955 aa, Homo sapiens
MFHLDPSLTHTIFNPEVFQPQMALPTDGPYLQILEQPKQRGFRFRYVCEGPSHGGLPGASSEKNKKSYPQVKICNYVGPAKVIVQLVTNGKNIHLHAHSLVGKHCEDGICTVTAGPKDMVVGFANLGILHVTKKKVFETLEARMTEACIRGYNPGLLVHPDLAYLQAEGGGDRQLGDREKELIRQAALQQTKEMDLSVVRLMFTAFLPDSTGSFTRRLEPVVSDAIYDSKAPNASNLKIVRMDRTAGCVTGGEEIYLLCDKVQKDDIQIRFYEEEENGGVWEGFGDFSPTDVHRQFAIVFKTPKYKDINITKPASVFVQLRRKSDLETSEPKPFLYYPEIKDKEEVQRKRQKLMPNFSDSFGGGSGAGAGGGGMFGSGGGGGGTGSTGPGYSFPHYGFPTYGGITFHPGTTKSNAGMKHGTMDTESKKDPEGCDKSDDKNTVNLFGKVIETTEQDQEPSEATVGNGEVTLTYATGTKEESAGVQDNLFLEKAMQLAKRHANALFDYAVTGDVKMLLAVQRHLTAVQDENGDSVLHLAIIHLHSQLVRDLLEVTSGLISDDIINMRNDLYQTPLHLAVITKQEDVVEDLLRAGADLSLLDRLGNSVLHLAAKEGHDKVLSILLKHKKAALLLDHPNGDGLNAIHLAMMSNSLPCLLLLVAAGADVNAQEQKSGRTALHLAVEHDNISLAGCLLLEGDAHVDSTTYDGTTPLHIAAGRGSTRLAALLKAAGADPLVENFEPLYDLDDSWENAGEDEGVVPGTTPLDMATSWQVFDILNGKPYEPEFTSDDLLAQGDMKQLAEDVKLQLYKLLEIPDPDKNWATLAQKLGLGILNNAFRLSPAPSKTLMDNYEVSGGTVRELVEALRQMGYTEAIEVIQAASSPVKTTSQAHSLPLSPASTRQQIDELRDSDSVCDSGVETSFRKLSFTESLTSGASLLTLNKMPHDYGQEGPLEGKI

SEQ ID NO: 41357 - protein, 142 aa, Homo sapiens
MKSQYEVFRSSRLSSDATVLTPNTESSCDLMTKTKSTSGNDDSTSLDLEWEDEEGMNRMLPMRERSKTEEDILRAALKYSNKKTGSNPTSASDDSNGLEWENDFVSAEMDDNGNSEYSGFVNPVLELSDSGIRHSDTDQQTR

SEQ ID NO: 41358 - protein, 1644 aa, Homo sapiens
MNACVVPDGTYEVCSRTTGQAAAESSSAGTWTLNVLWKMCGIDVHMDPNIGKRLNALGNTLTTLTGEEDIDDIADLNSVNIADLSDEDEVDTMSPTIHTSSDGSSISGDGHKLTFGQRLVNHLLGLTPPNQRHSVPAEYLCDPEMWGSPQSSQSHLKACRAHSWGNEATDYRRQAASASQPGELRGRKIMKRIVDIRELNEQAKVIDDLKKLGASEGTINQEIQRYQQLESVAVNDIRRDVRKKLRRSSMRAASLKDKWGLSYKPSYSRSKSISASGRPPLKRMERASSRVGETEELPEIRVDAASPGPRVTFNIQDTLKNTVWGSTPQSSCPGEGYFQFPEETELDLLSVTIEGPSHYSSNSEGSCSVFSSPKTPGGFSPGIPFQTEEGRRDDSLSSTSEDSEKDEKDEDHERERFYIYRKPSHTSRKKATGFAAVHQLFTERWPTTPVNRSLSGTATERNIDFELDIRVEIDSGKCVLHPTTLLQEHDDISLRRSYDRSSRSLDQDSPSKKKKFQTNYASTTHLMTGKKVPSSLQTKPSDLETTVFYIPGVDVKLHYNSKTLKTESPNASRGSSLPRTLSKESKLYAKGKGSGGVKTAKLYAWVALQSLPEEMVISPCLLDFLEKALETIPITPVERNYTAVSSQDEDMGHFEIPDPMEESTTSLVSSSTSAYSSFPVDVVVYVRVQPSQIKFSCLPVSRVECMLKLPSLDLVFSSNRGELETLGTTYPAETLSPGGNATQSGTKTSASKTGIPGSSGLGSPLGRSRHSSSQSDLTSSSSSSSGLSFTACMSDFSLYVFHPYGAGKQKTAVSGLTPGSGGLGNVDEEPTSVTGRKDSLSINLEFVKVSLSRIRRSGGASFFESQSVSKSASKMDTTLINISAVCDIGSASFKYDMRRLSEILAFPRAWYRRSIARRLFLGDQTINLPTSGPGTPDSIEGVSQHLSPESSRKAYCKTWEQPSQSASFTHMPQSPNVFNEHMTNSTMSPGTVGQSLKSPASIRSRSVSDSSVPRRDSLSKTSTPFNKSNKAASQQGTPWETLVVFAINLKQLNVQMNMSNVMGNTTWTTSGLKSQGRLSVGSNRDREISMSVGLGRSQLDSKGGVVGGTIDVNALEMVAHISEHPNQQPSHKIQITMGSTEARVDYMGSSILMGIFSNADLKLQDEWKVNLYNTLDSSITDKSEIFVHGDLKWDIFQVMISRSTTPDLIKIGMKLQEFFTQQFDTSKRALSTWGPVPYLPPKTMTSNLEKSSQEQLLDAAHHRHWPGVLKVVSGCHISLFQIPLPEDGMQFGGSMSLHGNHMTLACFHGPNFRSKSWALFHLEEPNIAFWTEAQKIWEDGSSDHSTYIVQTLDFHLGHNTMVTKPCGALESPMATITKITRRRHENPPHGVASVKEWFNYVTATRNEELNLLRNVDANNTENSTTVKNSSLLSGFRGGSSYNHETETIFALPRMQLDFKSIHVQEPQEPSLQDASLKPKVECSVVTEFTDHICVTMDAELIMFLHDLVSAYLKEKEKAIFPPRILSTRPGQKSPIIIHDDNSSDKDREDSITYTTVDWRDFMCNTWHLEPTLRLISWTGRKIDPVGVDYILQKLGFHHARTTIPKWLQRGVMDPLDKVLSVLIKKLGTALQDEKEKKGKDKEEH

SEQ ID NO: 41359 - protein, 708 aa, Homo sapiens
MACRVVNKRRHMGLQQLSSFAETGRTFLGPLKSSKFIIDEECHESVLISSTVRLLESLDLTSAVGQLLNEAVQAQNNTYRTGISTLLFLVGAWSSAVEECLHLGVPISIIVSVMSEGLNFCSEEVVSLHVPVHNIFDCMDSTKTFSQLETFSVSLCPFLQVPSDTDLIEELHGLKDVASQTLTISNLSGRPLKSYELFKPQTKVEADNNTSRTLKNSLLADTCCRQSILIHSRHFNRTDNTEGVSKPDGFQEHVTATHKTYRCNDLVELAVGLSHGDHSSMKLVEEAVQLQYQNACVQQGNCTKPFMFDISRIFTCCLPGLPETSSCVCPGYITVVSVSNNPVIKELQNQPVRIVLIEGDLTENYRHLGFNKSANIKTVLDSMRLQEDSSEELWANHVLQVLIQFKVNLVLVQGNVSERLIEKCINSKRLVIGSVNGSVMQAFAEAAGAVQVAYITQVNEDCVGDGVCVTFWRSSPLDVVDRNNRIAILLKTEGINLVTAVLTNPVTAQMQIKEDRFWTCAYRLYYALKEEKVFLGGGAVEFLCLSCLHILAEQSLKKENHACSGWLHNTSSWLASSLAIYRPTVLKFLANGWQKYLSTLLYNTANYSSEFEASTYIQHHLQNATDSGSPSSYILNEYSKLNSRIFNSDISNKLEQIPRVYDVVTPKIEAWRRALDLVLLVLQTDSEIITGHGHTQINSQELTGFLFL

SEQ ID NO: 41360 - protein, 182 aa, Homo sapiens
MPQFTEAVSPSVLPPSALPLDLLNNAITAFSTLEDLIRYLEPERWQLDLEDLYRPTWQLLGKAFVFGRKSRVVDLNLLTEEVRLYSCTPRNFSVSIREELKRTDTIFWPGCLLVKRCGGNCACCLHNCNECQCVPSKVTKKYHEVLQLRPKTGVRGLHKSLTDVALEHHEECDCVCRGSTGG

SEQ ID NO: 41361 - protein, 1666 aa, Homo sapiens
MKNPPERTPQDLEIVYSYLHGMEALSNLREHQLRLMCETVRYERHEANEVLYYPDDIGTCWYILLSGSVFIKESMFLPRSSFGKRSAGSFRRGCECIVLEPSEMIVVDYMDENEEYFQRQASHRQSRRRFRKINQKGERQTIIDTVDPYPMGKPPLPRGYHTLPADFTKLHLTDSLHPQVTHVSSSHSGCSITSDSGSSSLSDIYQATESEAGDMDLSGLPETAVDSEDDDDEEDIERASDPLMSRDIVRDCLEKDPIDRTDDDIEQLLEFMHQLPAFANMTMSVRRELCAVMVFAVVERAGTIVLNDGEELDSWSVILNGSVEVTYPDGKAEILCMGNSFGVSPTMDKEYMKGVMRTKVDDCQFVCIAQQDYCRILNQVEKNMQKVEEEGEIVMVKEHRELDRTGTRKGHIVIKGTSERLTMHLVEEHSVVDPTFIEDFLLTYRTFLSSPMEVGKKLLEWFNDPSLRDKVTRVVLLWVNNHFNDFEGDPAMTRFLEEFENNLEREKMGGHLRLLNIACAAKAKRRLMTLTKPSREAPLPFILLGGSEKGFGIFVDSVDSGSKATEAGLKRGDQILEVNGQNFENIQLSKAMEILRNNTHLSITVKTNLFVFKELLTRLSEEKRNGAPHLPKIGDIKKASRYSIPDLAVDVEQVIGLEKVNKKSKANTVGGRNKLKKILDKTRISILPQKPYNDIGIGQSQDDSIVGLRQTKHIPTALPVSGTLSSSNPDLLQSHHRILDFSATPDLPDQVLRVFKADQQSRYIMISKDTTAKEVVIQAIREFAVTATPDQYSLCEVSVTPEGVIKQRRLPDQLSKLADRIQLSGRYYLKNNMETETLCSDEDAQELLRESQISLLQLSTVEVATQLSMRNFELFRNIEPTEYIDDLFKLRSKTSCANLKRFEEVINQETFWVASEILRETNQLKRMKIIKHFIKIALHCRECKNFNSMFAIISGLNLAPVARLRTTWEKLPNKYEKLFQDLQDLFDPSRNMAKYRNVLNSQNLQPPIIPLFPVIKKDLTFLHEGNDSKVDGLVNFEKLRMIAKEIRHVGRMASVNMDPALMFRTRKKKWRSLGSLSQGSTNATVLDVAQTGGHKKRVRRSSFLNAKKLYEDAQMARKVKQYLSNLELEMDEESLQTLSLQCEPATNTLPKNPGDKKPVKSETSPVAPRAGSQQKAQSLPQPQQQPPPAHKINQGLQVPAVSLYPSRKKVPVKDLPPFGINSPQALKKILSLSEEGSLERHKKQAEDTISNASSQLSSPPTSPQSSPRKGGSGNQLRSFGSGQLDLTSSSSSLGSYTLAPSGTVDNFSDSGHSEISSRSSIVSNSSFDSVPVSLHDERRQRHSVSIVETNLGMGRMERRTMIEPDQYSLGSYAPMSEGRGLYATATVISSPSTEELSQDQGDRASLDAADSGRGSWTSCSSGSHDNIQTIQHQRSWETLPFGHTHFDYSGDPAGLWASSSHMDQIMFSDHSTKYNRQNQSRESLEQAQSRASWASSTGYWGEDSEGDTGTIKRRGGKDVSIEAESSSLTSVTTEETKPVPMPAHIAVASSTTKGLIARKEGRYREPPPTPPGYIGIPITDFPEGHSHPARKPPDYNVALQRSRMVARSSDTAGPSSVQQPHGHPTSSRPVNKPQWHKPNESDPRLAPYQSQGFSTEEDEDEQVSAV

SEQ ID NO: 41362 - protein, 168 aa, Homo sapiens
MARKGYRLAVIARNLEGAKAAAGDLGGDHLAFSCDVAKEHDVQNTFEELEKHLGRVNFLVNAAGINRDGLLVRTKTEDMVSQLHTNLLGSMLTCKAAMRTMIQQQGGSIVNVGHRREMLLHKRSIVGLKGNSGQSVYSASKGGLVGFSRALAKEVARKKIRVNVVAPG

SEQ ID NO: 41363 - protein, 831 aa, Homo sapiens
MDFQTSEDDNLLDGDTAVGTHYTMTNGGSINSSTHLLDLLDEPIPGVGTYDDFHTIDWVREKCKDRERHRRINSKKKESAWEMTKSLYDAWSGWLVVTLTGLASGALAGLIDIAADWMTDLKEGICLSALWYNHEQCCWGSNETTFEERDKCPQWKTWAELIIGQAEGPGSYIMNYIMYIFWALSFAFLAVSLVKVFAPYACGSGIPEIKTILSGFIIRGYLGKWTLMIKTITLVLAVASGLSLGKEGPLVHVACCCGNIFSYLFPKYSTNEAKKREVLSAASAAGVSVAFGAPIGGVLFSLEEVSYYFPLKTLWRSFFAALVAAFVLRSINPFGNSRLVLFYVEYHTPWYLFELFPFILLGVFGGLWGAFFIRANIAWCRRRKSTKFGKYPVLEVIIVAAITAVIAFPNPYTRLNTSELIKELFTDCGPLESSSLCDYRNDMNASKIVDDIPDRPAGIGVYSAIWQLCLALIFKIIMTVFTFGIKVPSGLFIPSMAIGAIAGRIVGIAVEQLAYYHHDWFIFKEWCEVGADCITPGLYAMVGAAACLGGVTRMTVSLVVIVFELTGGLEYIVPLMAAVMTSKWVGDAFGREGIYEAHIRLNGYPFLDAKEEFTHTTLAADVMRPRRNDPPLAVLTQDNMTVDDIENMINETSYNGFPVIMSKESQRLVGFALRRDLTIAIESARKKQEGIVGSSRVCFAQHTPSLPAESPRPLKLRSILDMSPFTVTDHTPMEIVVDIFRKLGLRQCLVTHNGIVLGIITKKNILEHLEQLKQHVEPLAPPWHYNKKRYPPAYGPDGKPRPRFNNVQLNLTDEEREETEEEVYLLNSTTL

SEQ ID NO: 41364 - protein, 783 aa, Homo sapiens
MDFQTSEDDNLLDGDTAVGTHYTMTNGGSINSSTHLLDLLDEPIPGVGTYDDFHTIDWVREKCKDRERHRRINSKKKESAWEMTKSLYDAWSGWLVVTLTGLASGALAGLIDIAADWMTDLKEGICLSALWYNHEQCCWGSNETTFEERDKCPQWKTWAELIIGQAEGPGSYIMNYIMYIFWALSFAFLAVSLVKVFAPYACGSGIPEIKTILSGFIIRGYLGKWTLMIKTITLVLAVASGLSLGKEGPLVHVACCCGNIFSYLFPKYSTNEAKKREVLSAASAAGVSVAFGAPIGGVLFSLEEVSYYFPLKTLWRSFFAALVAAFVLRSINPFGNSRLVLFYVEYHTPWYLFELFPFILLGVFGGLWGAFFIRANIAWCRRRKSTKFGKYPVLEVIIVAAITAVIAFPNPYTRLNTSELIKELFTDCGPLESSSLCDYRNDMNASKIVDDIPDRPAGIGVYSAIWQLCLALIFKIIMTVFTFGIKVPSGLFIPSMAIGAIAGRIVGIAVEQLAYYHHDWFIFKEWCEVGADCITPGLYAMVGAAACLGGVTRMTVSLVVIVFELTGGLEYIVPLMAAVMTSKWVGDAFGREGIYEAHIRLNGYPFLDAKEEFTHTTLAADVMRPRRNDPPLAVLTQDNMTVDDIENMINETSYNGFPVIMSKESQRLVGFALRRDLTIAIESARKKQEGIVGSSRVCFAQHTPSLPAESPRPLKLRSILDMSPFTVTDHTPMEIVVDIFRKLGLRQCLVTHNGRLLGIITKKDILRHMAQTANQDPASIMFN

SEQ ID NO: 41365 - protein, 434 aa, Homo sapiens
MRTVHSVIKRTPRKYLAEIVLIDDFSNKEHLKEKLDEYIKLWNGLVKVFRNERREGLIQARSIGAQKAKLGQVLIYLDAHCEVAVNWYAPLVAPISKDRTTCTVPLIDYIDGNDYSIEPQQGGDEDGFARGAWDWSLLWKRIPLSHKEKAKRKHKTEPYRSPAMAGGLFAIEREFFFELGLYDPGLQIWGGENFEISYKIWQCGGKLLFVPCSRVGHIYRLEGWQGNPPPIYVGSSPTLKNYVRVVEVWWDEYKDYFYASRPESQALPYGDISELKKFREDHNCKSFKWFMEEIAYDITSHYPLPPKNVDWGEIRGFETAYCIDSMGKTNGGFVELGPCHRMGGNQLFRINEANQLMQYDQCLTKGADGSKVMITHCNLNEFKEWQYFKNLHRFTHIPSGKCLDRSEVLHQVFISNCDSSKTTQKWEMNNIHSV

SEQ ID NO: 41366 - protein, 48 aa, Homo sapiens
MNTVLSRANSLFAFSLSVMAALTFGCFITTAFKDRSVPVRLHVSRIML

SEQ ID NO: 41367 - protein, 668 aa, Homo sapiens [sequence omitted]

SEQ ID NO: 41368 - protein, 159 aa, Homo sapiens
MLLLDCNPEVDGLKHLLETGASVNAPPDPCKQSPVHLAAGSGLACFLLWQLQTGADLNQQDVLGEAPLHKAAKVGSLECLSLLVASDAQIDLCNKNGQTAEDLAWSCGFPDCAKFLTTIKCMQTIKASEHPDRNDCVAVLRQKRSLGSVENTSGKRKCW

SEQ ID NO: 41369 - protein, 534 aa, Homo sapiens
MQHGTSLDSTDTYPQHAQSLDGTTSSSIPLYRSSEEEKRVTVIKAPHYPGIGPVDESGIPTAIRTTVDRPKDWYKTMFKQIHMVHKPGLYNPPYSAQSHPAAKTQTYRPLSKSHSDNSPNAFKDASSPVPPPHVPPPVPPLRPRDRSSTEKHDWDPPDRKVDTRKFRSEPRSIFEYEPGKSSILQHERPASLYQSSIDRSLERPMSSASMASDFRKRRKSEPAVGPPRGLGDQSASRTSPGRVDLPGSSTTLTKSFTSSSPSSPSRAKDRESPRSYSSTLTDMGRSAPRERRGTPEKEKLPAKAVYDFKAQTSKELSFKKGDTVYILRKIDQNWYEGEHHGRVGIFPISYVEKLTPPEKAQPARPPPPAQPGEIGEAIAKYNFNADTNVELSLRKGDRVILLKRVDQNWYEGKIPGTNRQGIFPVSYVEVVKKNTKGAEDYPDPPIPHSYSSDRIHSLSSNKPQRPVFTHENIQGGGEPFQALYNYTPRNEDELELRESDVIDVMEKCDDGWFVGTSRRTKFFGTFPGNYVKRL

SEQ ID NO: 41370 - protein, 237 aa, Homo sapiens
MPGPAPGRGGSGVGLRGLSSLQAPQPSRVPWPMAAYSYRPGPGAGPGPAAGAALPDQSFLWNVFQRVDKDRSGVISDTELQQALSNGTWTPFNPVTVRSIISMFDRENKAGVNFSEFTGVWKYITDWQNVFRTYDRDNSGMIDKNELKQALSGFGYRLSDQFHDILIRKFDRQGRGQIAFDDFIQGCIVLQTLAPSPRPECGGANTAHCSLDPQAQAILTPRTPKVLGSQARVTMLA

SEQ ID NO: 41371 - protein, 697 aa, Homo sapiens
MIPPGECTYAGRKRRRPLQKQRPAVGAEKSNPSKRHRDRLNAELDHLASLLPFPPDIISKLDKLSVLRLSVSYLRVKSFFQVVQEQSSRQPAAGAPSPGDSCPLAGSAVLEGRLLLESLNGFALVVSAEGTIFYASATIVDYLGFHQTDVMHQNIYDYIHVDDRQDFCRQLHWAMDPPQVVFGQPPPLETGDDAILGRLLRAQEWGTGTPTEYSAFLTRCFICRVRCLLDSTSGFLTMQFQGKLKFLFGQKKKAPSGAMLPPRLSLFCIAAPVLLPSAAEMKMRSALLRAKPRADTAATADAKVKATTSLCESELHGKPNYSAGRSSRESGVLVLREQTDAGRWAQVPARAPCLCLRGGPDLVLDPKGGSGDREEEQHRMLSRASGVTGRRETPGPTKPLPWTAGKHSEDGARPRLQPSKNDPPSLRPMPRGSCLPCPCVQGTFRNSPISHPPSPSPSAYSSRTSRPMRDVGEDQVHPPLCHFPQRSLQHQLPQPGAQRFATRGYPMEDMKLQGVPMPPGDLCGPTLLLDVSIKMEKDSGCEGAADGCVPSQVWLGASDRSHPATFPTRMHLKTEPDSRQQVYISHLGHGVRGAQPHGRATAGRSRELTPFHPAHCACLEPTDGLPQSEPPHQLCARGRGEQSCTCRAAEAAPVVKREPLDSPQWATHSQGMVPGMLPKSALATLVPPQASGCTFLP

SEQ ID NO: 41372 - protein, 10 aa, Homo sapiens
MFSMYLTMCF

SEQ ID NO: 41373 - protein, 619 aa, Homo sapiens
MEVELSQGLADNTVIAKVNNVVWDLDRPLEEDCTLELLKFEDEEAQAVYWHSSAHIMGEAMERVYGGCLCYGPPIENGFYYDMYLEEGGVSSNDFSSLEALCKKIIKEKQAFERLEVKKETLLAMFKYNKFKCRILNEKVNTPTTTVYRCGPLIDLCRGPHVRHTGKIKALKIHKNSSTYWEGKADMETLQRIYGISFPDPKMLKEWEKFQEEAKNRDHRKIGRDQELYFFHELSPGSCFFLPKGAYIYNALIEFIRSEYRKRGFQEVVTPNIFNSRLWMTSGHWQHYSENMFSFEVEKELFALKPMNCPGHCLMFDHRPRSWRELPLRLADFGVLHRNELSGALTGLTRVRRFQQDDAHIFCAMEQIEDEIKGCLDFLRTVYSVFGFSFKLNLSTRPEKFLGDIEVWDQAEKQLENSLNEFGEKWELNSGDGAFYGPKIDIQIKDAIGRYHQCATIQLDFQLPIRFNLTYVSHDGDDKKRPVIVHRAILGSVERMIAILTENYGGKWPFWLSPRQVMVVPVGPTCDEYAQKVRQQFHDAKFMADIDLDPGCTLNKKIRNAQLAQYNFILVVGEKEKISGTVNIRTRDNKVHGERTISETIERLQQLKEFRSKQAEEEF

SEQ ID NO: 41374 - skipped

SEQ ID NO: 41375 - protein, 732 aa, Homo sapiens
MVTLLTFAFVIQMECVPYNSLCGYQIRMESRACESTRLLYCTTGVLLRKLQEDGLLSNVSHVIVDEVHERSVQSDFLLIILKEILQKRSDLHLILMSATVDSEKFSTYFTHCPILRISGRSYPVEVFHLEDIIEETGFVLEKDSEYCQKFLEEEEEVTINVTSKAGGIKKYQEYIPVQTGAHADLNPFYQKYSSRTQHAILYMNPHKINLDLILELLAYLDKSPQFRNIEGAVLIFLPGLAHIQQLYDLLSNDRRFYSERYKVIALHSILSTQDQAAAFTLPPPGVRKIVLATNIAETGITIPDVVFVIDTGRTKENKYHESSQMSSLVETFVSKASALQRQGRAGRVRDGFCFRMYTRERFEGFMDYSVPEILRVPLEELCLHIMKCNLGSPEDFLSKALDPPQLQVISNAMNLLRKIGACELNEPKLTPLGQHLAALPVNVKIGKMLIFGAIFGCLDPVATLAAVMTEKSPFTTPIGRKDEADLAKSALAMADSDHLTIYNAYLGWKKARQEGGYRSEITYCRRNFLNRTSLLTLEDVKQELIKLVKAAGFSSSTTSTSWEGNRASQTLSFQEIALLKAVLVAGLYDNVGKIIYTKSVDVTEKLACIVETAQGKAQVHPSSVNRDLQTHGWLLYQEKIRYARVYLRETTLITPFPVLLFGGDIEVQHRERLLSIDGWIYFQAPVKIAVIFKQLRVLIDSVLRKKLENPKMSLENDKILQIITELIKTENN

SEQ ID NO: 41376 - protein, 60 aa, Homo sapiens
MNPHKINLDLILELLAYLDKSPQFRNIEGAVLIFLPGLAHIQQLYDLLSNDRRFYSERVF

SEQ ID NO: 41377 - protein, 287 aa, Homo sapiens
MLVIKKGNTKDLQLSGFPVVGNLPSQPVKNGTGPSVYKGLVPKPAAPPTKPTQWKSQTKENKVGTSFPHESTFGVGNFNAFKSTAKNFSPSTNSVKEQPRLTKLTRMRTDKKSEFLKALKRDRVEEEHEDESRAGSEKDDDSFNLHNSNSTHQERDINRNFDENEIPQENGNASVISQQIIRSSTFPQTDVLSSSLEAEHRLLKEMGWQEDSENDETCAPLTEDEMREFQVISEQLQKNGLRKNGILKNGLICDFKFGPWKNSTFKPTTENDDTETSSSDTSDDDDV

SEQ ID NO: 41378 - protein, 169 aa, Homo sapiens
MRAILIDWLVQVQMKFRLLQETMYMTVSIIDRFMQNNCVPKKMLQLVGVTAMFIASKYEEMYPPEIGDFAFVTDNTYTKHQIRQMEMKILRALNFGLGRPLPLHFLRRASKIGEVDVEQHTLAKYLMELTMLDYDMVHFPPSQIAAGAFCLALKILDNGEWLCSTWLRM

SEQ ID NO: 41379 - protein, 113 aa, Homo sapiens
MINIYPTVQYPLEVLCLHLIESGNLTDEGQQYCCRLVEMDSKSGPGLIGLGIKALQDKKYEDAVRNLTEGLKESPVCTSGWYHLAEAQVKMHRPKEAVLSCSQGIFDTFWVDI

SEQ ID NO: 41380 - protein, 379 aa, Homo sapiens
MELYRLSKALADIVIPQEYGITKAEKLEIAKGYCTPLVRKIRSDLQRTQDDDTVNKLHPVYSRGVLSPERHVRTRLYFTSESHVHSLLSILRYGALCNESKDEQWKRAMDYLNVVNELNYMTQIVIMLYEDPNKDLSSEERFHVELHFSPGAKGCEEDKNLPSGYGYRPASRENEGRRPFKIDNDDEPHTSKRDEVDRAVILFKPMVSEPIHIHRKSPLPRSRKTATNDVVSENANYLRTPRTLVEQKQNPTVGFELYSMVPSICPLETLHNALSLKQVDEFLASIASPSSDVPRKTAEISSTALRSSPIMRKKVSLNTYTPAKILPTPPATLKSTKASSKPATSGPSSAVVPNTSSRKKNITSKTETHEHKKNTGKKK

SEQ ID NO: 41381 - protein, 44 aa, Homo sapiens [sequence omitted]

SEQ ID NO: 41382 - protein, 39 aa, Homo sapiens
MKEPQSWQNCLKMLCKRSSLSSLWPVKFSRRDLWQPHSQ

SEQ ID NO: 41383 - protein, 221 aa, Homo sapiens
MFETFNTPAVYMAIQAMLSLYTYGCTTGIVMDSSDGVTHTVPIYEGYALPRAILCLDVAGRDLTNYLMKILTEHSYSFTTMAEREIVCDIKEKLYYVTLDFEQEMATAASSSSLEKSYELSDGQVITIGNELSCCPEALFQPSFLSMESCDIHKTTFNSIMKCDMDIRKDLYTNTVLFGGNNMYPGIANRVQKIVTLVWMGSSILALLSTFQQMWVSKPGV

SEQ ID NO: 41384 - protein, 75 aa, Homo sapiens
MGREFGNLTRMRHVISYSLSPFEQRAYPHVFTKGIPNVLRRIRESFFRVVPRECLGPAGAGGWTPAAAAVTAPPL

SEQ ID NO: 41385 - protein, 174 aa, Homo sapiens [sequence omitted]

SEQ ID NO: 41386 - protein, 62 aa, Homo sapiens
MRLSLPLLLLLLGAWAIPGGLGDRAPLTATAPQLDDEEMYSAHMPAHLRCDACRAVAYQAHP

SEQ ID NO: 41387 - protein, 139 aa, Homo sapiens
MKSGDHTAAFSYFQKAAARGYSKAQYNAGLCHEHGRGTPRDISKAVLYYQLAASQGHSLAQYRYARCLLRDPASSWNPERQRAVSLLKQAADSGLREAQAFLGVLFTKEPYLDEQRAVKYLWLAANNGVCDLSGQACWG

SEQ ID NO: 41388 - protein, 860 aa, Homo sapiens
MIEFCPGGAVDAIMLELDRGLTEPQIQVVCRQMLEALNFLHSKRIIHRDLKAGNVLMTLEGDIRLADFGVSAKNLKTLQKRDSFIGTPYWMAPEVVMCETMKDTPYDYKADIWSLGITLIEMAQIEPPHHELNPMRVLLKIAKSDPPTLLTPSKWSVEFRDFLKIALDKNPETRPSAAQLLEHPFVSSITSNKALRELVAEAKAEVMEEIEDGRDEGEEEDAVDAASTLENHTQNSSEVSPPSLNADKPLEESPSTPLAPSQSQDSVNEPCSQPSGDRSLQTTSPPVVAPGNENGLAVPVPLRKSRPVSMDARIQVAQEKQVAEQGGDLSPAANRSQKASQSRPNSSALETLGGEKLANGSLEPPAQAAPGPSKRDSDCSSLCTSESMDYGTNLSTDLSLNKEMGSLSIKDPKLYKKTLKRTRKFVVDGVEVSITTSKIISEDEKKDEEMRFLRRQELRELRLLQKEEHRNQTQLSNKHELQLEQMHKRFEQEINAKKKFFDTELENLERQQKQQVEKMEQDHAVRRREEARRIRLEQDRDYTRFQEQLKLMKKEVKNEVEKLPRQQRKESMKQKMEEHTQKKQLLDRDFVAKQKEDLELAMKRLTTDNRREICDKERECLMKKQELLRDREAALWEMEEHQLQERHQLVKQQLKDQYFLQRHELLRKHEKEREQMQRYNQRMIEQLKVRQQQEKARLPKIQRSEGKTRMAMYKKSLHINGGGSAAEQREKIKQFSQQEEKRQKSERLQQQQKHENQMRDMLAQCESNMSELQQLQNEKCHLLVEHETQKLKALDESHNQNLKEWRDKLRPRKKALEEDLNQKKREQEMFFKLSEEAECPNPSTPSKAAKFFPYSSADAS

SEQ ID NO: 41389 - protein, 783 aa, Homo sapiens
MEGHVDRSSQPTARRIINSDPVDLDLVEENTFVGPPPATSISGGSVYPTEPNCSSATFTGNLSFLASLQLSSDVSSLSPTSNNSRSSSSSSNQKAPLPCPQQDVSRPPQALPCPLRPLPCPPRASPCPPRASSCPPRALSCPSQTMQCQLPALTHPPQEVPCPRQNIPGPPQDSLGLPQDVPGLPQSILHPQDVAYLQDMPRSPGDVPQSPSDVSPSPDAPQSPGGMPHLPGDVLHSPGDMPHSSGDVTHSPRDIPHLPGDRPDFTQNDVQNRDMPMDISALSSPSCSPSPQSETPLEKVPWLSVMETPARKEISLSEPAKPGSAHVQSRTPQGGLYNRPCLHRLKYFLRPPVHHLFFQTLIPDKDTRENKGQKLEPIPHRRLRMVTNTIEENFPLGTVQFLMDFVSPQHYPPREIVAHIIQKILLSGSETVDVLKEAYMLLMKIQQLHPANAKTVEWDWKLLTYVMEEEGQTLPGRVLFLRYVVQTLEDDFQQTLRRQRQHLQQSIANMVLSCDKQPHNVRDVIKWLVKAVTEDGLTQPPNGNQTSSGTGILKASSSHPSSQPNLTKNTNQLIVCQLQRMLSIAVEVDRTPTCSSNKIAEMMFGFVLDIPERSQREMFFTTMESHLLRCKVLEIIFLHSCETPTRLPLSLAQALYFLNNSTSLLKCQSDKSQWQTWDELVEHLQFLLSSYQHVLREHLRSSVIDRKDLIIKRIKPKPQQGDDITVVDVEKQIEAFRSRLIQMLGEPLVPQLQDKVHLLKLLLFYAADLNPDAEPFQKGWSGS

SEQ ID NO: 41390 - protein, 942 aa, Homo sapiens
MESRHRSPSGAGEGASCSDGPRGSLACPSPTCFSPQESPSKETLEAHGASISGTPEATTSGKPEPVSSVKTEPKSSDDRNPMFLEKMDFKSSKQADSTSIGKEDPGSSRKADPMFTGKAEPEILGKGDPVAPGRMDPMTVRKEDLGSLGKVDPLCSSKTYTVSPRKEDPGSLRKVDPVSSDKVDPVFPRKEEPRYSGKEHPVSSEKVAPTSAEKVDLVLSGKRDPGPSGKADPMPLESMDSASTGKTEPGLLGKLIPGSSGKNGPVSSGTGAPGSLGRLDPTCLGMADPASVGNVETVPATKEDSRFLGKMDPASSGEGRPVSGHTDTTASAKTDLTSLKNVDPMSSGKVDPVSLGKMDPMCSGKPELLSPGQAERVSVGKAGTVSPGKEDPVSSRREDPISAGSRKTSSEKVNPESSGKTNPVSSGPGDPRSLGTAGPPSAVKAEPATGGKGDPLSSEKAGLVASGKAAPTASGKAEPLAVGKEDPVSKGKADAGPSGQGDSVSIGKVVSTPGKTVPVPSGKVDPVSLGKAEAIPEGKVGSLPLEKGSPVTTTKADPRASGKAQPQSGGKAETKLPGQEGAAAPGEAGAVCLKKETPQASEKVDPGSCRKAEPLASGKGEPVSLGKADSAPSRKTESPSLGKVVPLSLEKTKPSSSSRQLDRKALGSARSPEGARGSEGRVEPKAEPVSSTEASSLGQKDLEAAGAERSPCPEAAAPPPGPRTRDNFTKAPSWEASAPPPPREDAGTQAGAQACVSVAVSPMSPQDGAGGSAFSFQAAPRAPSPPSRRDAGLQVSLGAAETRSVATGPMTPQAAAPPAFPEVRVRPGSALAAAVAPPEPAEPVRDVSWDEKGMTWEVYGAAMEVEVLGMAIQKHLERQIEEHGRQGAPAPPPAARAGPGRSGSVRTAPPDGAAKRPPGLFRALLQSVRRPRCCSRAGPTAE

SEQ ID NO: 41391 - protein, 213 aa, Homo sapiens
MRRFLSRKKIRHHIYVLNQVDHFRFNRAALINVGFLESSNSTDYIAMHDVDLLPLNEELDYGFPEAGPFHVASPELHPLYHYKTYVGGILLLSKQHYRLCNGMSNRFWGWGREDDEFYRRIKGAGLQLFRPSGITTGYKTFRHLHDPAWRKRDQKRIAAQKQEQFKVDREGGLNTVKYHVASRTALSVGGAPCTVLNIMLDCDKTATPWCTFS

SEQ ID NO: 41392 - protein, 317 aa, Homo sapiens
MELMDANLCQVIHMELDHERMSYLLYQMLCGIKHLHSAGIIHRDLKPSNIVVKSDCTLKILDFGLARTACTNFMMTPYVVTRYYRAPEVILGMGYKENVDIWSVGCIMGELVKGCVIFQGTDHIDQWNKVIEQLGTPSAEFMKKLQPTVRNYVENRPKYPGIKFEELFPDWIFPSESERDKIKTSQARDLLSKMLVIDPDKRISVDEALRHPYITVWYDPAEAEAPPPQIYDAQLEEREHAIEEWKELIYKEVMDWEERSKNGVVKDQPSDAAVSSNATPSQSSSINDISSMSTEQTLASDTDSSLDASTGPLEGCR

SEQ ID NO: 41393 - protein, 275 aa, Homo sapiens
MELMDANLCQVIHMELDHERMSYLLYQMLCGIKHLHSAGIIHRDLKPSNIVVKSDCTLKILDFGLARTACTNFMMTPYVVTRYYRAPEVILGMGYKENVDIWSVGCIMGELVKGCVIFQGTDHIDQWNKVIEQLGTPSAEFMKKLQPTVRNYVENRPKYPGIKFEELFPDWIFPSESERDKIKTSQARDLLSKMLVIDPDKRISVDEALRHPYITVWYDPAEAEAPPPQIYDAQLEEREHAIEEWKELIYKEVMDWEERSKNGVVKDQPSAQMQQ

SEQ ID NO: 41394 - protein, 53 aa, Homo sapiens [sequence omitted]

SEQ ID NO: 41395 - protein, 170 aa, Homo sapiens [sequence omitted]

SEQ ID NO: 41396 - protein, 28 aa, Homo sapiens
MGLTLSPRLECSEWCDHSLLQPETPGLK

SEQ ID NO: 41397 - protein, 486 aa, Homo sapiens
MLDCGHNICCACLARCWGTAETNVSCPQCRETFPQRHMRPNRHLANVTQLVKQLRTERPSGPGGEMGVCEKHREPLKLYCEEDQMPICVVCDRSREHRGHSVLPLEEAVEGFKEQIQNQLDHLKRVKDLKKRRRAQGEQARAELLSLTQMEREKIVWEFEQLYHSLKEHEYRLLARLEELDLAIYNSINGAITQFSCNISHLSSLIAQLEEKQQQPTRELLQDIGDTLSRAERIRIPEPWITPPDLQEKIHIFAQKCLFLTESLKQFTEKMQSDMEKIQELREAQLYSVDVTLDPDTAYPSLILSDNLRQVRYSYLQQDLPDNPERFNLFPCVLGSPCFIAGRHYWEVEVGDKAKWTIGVCEDSVCRKGGVTSAPQNGFWAVSLWYGKEYWALTSPMTALPLRTPLQRVGIFLDYDAGEVSFYNVTERCHTFTFSHATFCGPVRPYFSLSYSGGKSAAPLIICPMSGIDGFSGHVGNHGHSMETSP

SEQ ID NO: 41398 - protein, 877 aa, Homo sapiens
MQDRTIPDSDISASSSWSDSTAARHSRLESSDGDGAWCPAGSVFPKEEEYLQVDLQRLHLVALVGTQGRHAGGLGKEFSRSYRLRYSRDGRRWMGWKDRWGQEVISGNEDPEGVVLKDLGPPMVARLVRFYPRADRVMSVCLRVELYGCLWRDGLLSYTAPVGQTMYLSEAVYLNDSTYDGHTVGGLQYGGLGQLADGVVGLDDFRKSQELRVWPGYDYVGWSNHSFSSGYVEMEFEFDRLRAFQAMQVHCNNMHTLGARLPGGVECRFRRGPAMAWEGEPMRHNLGGNLGDPRARAVSVPLGGRVARFLQCRFLFAGPWLLFSEISFISDVVNNSSPALGGTFPPAPWWPPGPPPTNFSSLELEPRGQQPVAKAEGSPTAILIGCLVAIILLLLLIIALMLWRLHWRRLLSKAERRVLEEELTVHLSVPGDTILINNRPGPREPPPYQEPRPRGNPPHSAPCVPNGSALLLSNPAYRLLLATYARPPRGPGPPTPAWAKPTNTQAYSGDYMEPEKPGAPLLPPPPQNSVPHYAEADIVTLQGVTGGNTYAVPALPPGAVGDGPPRVDFPRSRLRFKEKLGEGQFGEVHLCEVDSPQDLVSLDFPLNVRKGHPLLVAVKILRPDATKNARNDFLKEVKIMSRLKDPNIIRLLGVCVQDDPLCMITDYMENGDLNQFLSAHQLEDKAAEGAPGDGQAAQGPTISYPMLLHVAAQIASGMRYLATLNFVHRDLATRNCLVGENFTIKIADFGMSRNLYAGDYYRVQGRAVLPIRWMAWECILMGKFTTASDVWAFGVTLWEVLMLCRAQPFGQLTDEQVIENAGEFFRDQGRQVYLSRPPACPQGLYELMLRCWSRESEQRPPFSQLHRFLAEDALNTV

SEQ ID NO: 41399 - protein, 840 aa, Homo sapiens
MQDRTIPDSDISASSSWSDSTAARHSRLESSDGDGAWCPAGSVFPKEEEYLQVDLQRLHLVALVGTQGRHAGGLGKEFSRSYRLRYSRDGRRWMGWKDRWGQEVISGNEDPEGVVLKDLGPPMVARLVRFYPRADRVMSVCLRVELYGCLWRDGLLSYTAPVGQTMYLSEAVYLNDSTYDGHTVGGLQYGGLGQLADGVVGLDDFRKSQELRVWPGYDYVGWSNHSFSSGYVEMEFEFDRLRAFQAMQVHCNNMHTLGARLPGGVECRFRRGPAMAWEGEPMRHNLGGNLGDPRARAVSVPLGGRVARFLQCRFLFAGPWLLFSEISFISDVVNNSSPALGGTFPPAPWWPPGPPPTNFSSLELEPRGQQPVAKAEGSPTAILIGCLVAIILLLLLIIALMLWRLHWRRLLSKAERRVLEEELTVHLSVPGDTILINNRPGPREPPPYQEPRPRGNPPHSAPCVPNGSAYSGDYMEPEKPGAPLLPPPPQNSVPHYAEADIVTLQGVTGGNTYAVPALPPGAVGDGPPRVDFPRSRLRFKEKLGEGQFGEVHLCEVDSPQDLVSLDFPLNVRKGHPLLVAVKILRPDATKNARNDFLKEVKIMSRLKDPNIIRLLGVCVQDDPLCMITDYMENGDLNQFLSAHQLEDKAAEGAPGDGQAAQGPTISYPMLLHVAAQIASGMRYLATLNFVHRDLATRNCLVGENFTIKIADFGMSRNLYAGDYYRVQGRAVLPIRWMAWECILMGKFTTASDVWAFGVTLWEVLMLCRAQPFGQLTDEQVIENAGEFFRDQGRQVYLSRPPACPQGLYELMLRCWSRESEQRPPFSQLHRFLAEDALNTV

SEQ ID NO: 41400 - protein, 1909 aa, Homo sapiens
MMPPFMYPPYLPFPPPYGPQGPYRYPTPDGPSRFPRVAGPRGSGPPMRLVEPVGRPSILKEDNLKEFDQLDQENDDGWAGAHEEVDYTEKLKFSDEEDGRDSDEEGAEGHRDSQSASGEERPPEADGKKGNSPNSEPPTPKTAWAETSRPPETEPGPPAPKPPLPPPHRGPAGNWGPPGDYPDRGGPPCKPPAPEDEDEAWRQRRKQSSSEISLAVERARRRREEEERRMQEERRAACAEKLKRLDEKFGAPDKRLKAEPAAPPAAPSTPAPPPAVPKELPAPPAPPPASAPTPETEPEEPAQAPPAQSTPTPGVAAAPTLVSGGGSTSSTSSGSFEASPVEPQLPSKEGPEPPEEVPPPTTPPVPKVEPKGDGIGPTRQPPSQGLGYPKYQKSLPPRFQRQQQEQLLKQQQQHQWQQHQQGSAPPTPVPPSPPQPVTLGAVPAPQAPPPPPKALYPGALGRPPPMPPMNFDPRWMMIPPYVDPRLLQGRPPLDFYPPGVHPSGLVPRERSDSGGSSSEPFDRHAPAMLRERGTPPVDPKLAWVGDVFTATPAEPRPLTSPLRQAADEDDKGMRSETPPVPPPPPYLASYPGFPENGAPGPPISRFPLEEPGPRPLPWPPGSDEVAKIQTPPPKKEPPKEETAQLTGPEAGRKPARGVGSGGQGPPPPRRESRTETRWGPRPGSSRRGIPPEEPGAPPRRAGPIKKPPPPTKVEELPPKPLEQGDETPKPPKPDPLKITKGKLGGPKETPPNGNLSPAPRLRRDYSYERVGPTSCRGRGRGEYFARGRGFRGTYGGRGRGARSREFRSYREFRGDDGRGGGTGGPNHPPAPRGRTASETRSEGSEYEEIPKRRRQRGSETGSETHESDLAPSDKEAPTPKEGTLTQVPLAPPPPGAPPSPAPARFTARGGRVFTPRGVPSRRGRGGGRPPPQVCPGWSPPAKSLAPKKPPTGPLPPSKEPLKEKLIPGPLSPVARGGSNGGSNVGMEDGERPRRRRHGRAQQQDKPPRFRRLKQERENAARGSEGKPSLTLPASAPGPEEALTTVTVAPAPRRAAAKSPDLSNQNSDQANEEWETASESSDFTSERRGDKEAPPPVLLTPKAVGTPGGGGGGAVPGISAMSRGDLSQRAKDLSKRSFSSQRPGMERQNRRPGPGGKAGSSGSSSGGGGGGPGGRTGPGRGDKRSWPSPKNRSRPPEERPPGLPLPPPPPSSSAVFRLDQVIHSNPAGIQQALAQLSSRQGSVTAPGGHPRHKPGLPQAPQGPSPRPPTRYEPQRVNSGLSSDPHFEEPGPMVRGVGGTPRDSAGVSPFPPKRRERPPRKPELLQEESLPPPHSSGFLGSKPEGPGPQAESRDTGTEALTPHIWNRLHTATSRKSYRPSSMEPWMEPLSPFEDVAGTEMSQSDSGVDLSGDSQVSSGPCSQRSSPDGGLKGAAEGPPKRPGGSSPLNAVPCEGPPGSEPPRRPPPAPHDGDRKELPREQPLPPGPIGTERSQRTDRGTEPGPIRPSHRPGPPVQFGTSDKDSDLRLVVGDSLKAEKELTASVTEAIPVSRDWELLPSAAASAEPQSKNLDSGHCVPEPSSSGQRLYPEVFYGSAGPSSSQISGGAMDSQLHPNSGGFRPGTPSLHPYRSQPLYLPPGPAPPSALLSGLALKGQFLDFSTMQATELGKLPAGGVLYPPPSFLYSPAFCPSPLPDTSLLQVRQDLPSPSDFYSTPLQPGGQSGFLPSGAPAQQMLLPMVDSQLPVVNFGSLPPAPPPAPPPLSLLPVGPALQPPSLAVRPPPAPATRVLPSPARPFPASLGRAELHPVELKPFQDYQKLSSNLGGPGSSRTPPTGRSFSGLNSRLKATPSTYSGVFRTQRVDLYQQASPPDALRWIPKPWERTGPPPREGPSRRAEEPGSRGDKEPGLPPPR

SEQ ID NO: 41401 - protein, 200 aa, Homo sapiens [sequence omitted]

SEQ ID NO: 41402 - protein, 254 aa, Homo sapiens [sequence omitted]

SEQ ID NO: 41403 - protein, 104 aa, Homo sapiens
MAILIWFVFISLPPLFPAIPDAKGLSNPSEVEVLREKVYASLETYCKQKYPEQQGRFAKLLLRLPALRSIGLKCLEHLFFFKLIGDTPIDTFLMEMLEAPHQLA

SEQ ID NO: 41404 - protein, 310 aa, Homo sapiens
MASMSSAQIVSASVLQNKFSPPSPLPQAVFSTSSRFWSSPPLLGQQPGPSQDIKPFAQPAYPIQPPLPPTLSSYEPLAPLPSAAASVPVWQDRTIASSRLRLLEYSAFMEVQRDPDTYSKHLFVHIGQTNPAFSDPPLEAVDVRQIYDKFPEKKGGLKELYEKGPPNAFFLVKFWADLNSTIQEGPGAFYGVSSQYSSADSMTISVSTKVCSFGKQVVEKVETEYARLENGRFVYRIHRSPMCEYMINFIHKLKHLPEKYMMNSVLENFTILQVVTSRDSQETLLVIAFVFEVSTSEHGAQHHVYKLVKD

SEQ ID NO: 41405 - protein, 463 aa, Homo sapiens
MTGSTPCSSMSNHTKERVTMTKVTLENFYSNLIAQHEEREMRQKKLEKVMEEEGLKDEEKRLRRSAHARKETEFLRLKRTRLGLEDFESLKVIGRGAFGEVRLVQKKDTGHVYAMKILRKADMLEKEQVGHIRAERDILVEADSLWVVKMFYSFQDKLNLYLIMEFLPGGDMMTLLMKKDTLTEEETQFYIAETVLAIDSIHQLGFIHRDIKPDNLLLDSKGHVKLSDFGLCTGLKKAHRTEFYRNLNHSLPSDFTFQNMNSKRKAETWKRNRRQLAFSTVGTPDYIAPEVFMQTGYNKLCDWWSLGVIMYEMLIGYPPFCSETPQETYKKVMNWKETLTFPPEVPISEKAKDLILRFCCEWEHRIGAPGVEEIKSNSFFEGVDWEHIRERPAAISIEIKSIDDTSNFDEFPESDILKPTVATSNHPETDYKNKDWVFINYTYKRFEGLTARGAIPSYMKAAK

SEQ ID NO: 41406 - protein, 433 aa, Homo sapiens
MVEYITHSRDVVTEAIYPEAVTMFSVNLFRTLPPSSNPTGAEFDPEEDEPTLEAAWPHLQLVYEFFLRFLESPDFQPNIAKKYIDQKFVLALLDLFDSEDPRERDFLKTILHRIYGKFLGLRAYIRRQINHIFYRFIYETEHHNGIAELLEILGSIINGFALPLKEEHKMFLIRVLLPLHKVKSLSVYHPQVIVGLLKFWPKTHSPKEVMFLNELEEILDVIEPSEFSKVMEPLFRQLAKCVSSPHFQVAERALYYWNNEYIMSLISDNAARVLPIMFPALYRNSKSHWNKTIHGLIYNALKLFMEMNQKLFDDCTQQYKAEKQKGRFRMKEREEMWQKIEELARLNPQYPMFRAPPPLPPVYSMETETPTAEDIQLLKRTVETEAVQMLKDIKKEKVLLRRKSELPQDVYTIKALEAHKRAEEFLTASQEAL

SEQ ID NO: 41407 - protein, 545 aa, Homo sapiens
MENIELGLSEAQVMLALASHLSTVESEKQKLRAQVRRLCQENQWLRDELAGTQQRLQRSEQAVAQLEEEKKHLEFLGQLRQYDEDGHTSEEKEGDATKDSLDDLFPNEEEEDPSNGLSRGQGATAAQQGGYEIPARLRTLHNLVIQYAAQGRYEVAVPLCKQALEDLERTSGRGHPDVATMLNILALVYRDQNKYKEAAHLLNDALSIRESTLGPDHPAVAATLNNLAVLYGKRGKYKEAEPLCQRALEIREKVLGTNHPDVAKQLNNLALLCQNQGKYEAVERYYQRALAIYEGQLGPDNPNVARTKNNLASCYLKQGKYAEAETLYKEILTRAHVQEFGSVDDDHKPIWMHAEEREEMSKSRHHEGGTPYAEYGGWYKACKVSSPTVNTTLRNLGALYRRQGKLEAAETLEECALRSRRQGTDPISQTKVAELLGESDGRRTSQEGPGDSVKFEGGEDASVAVEWSGDGSGTLQRSGSLGKIRDVLRRSSELLVRKLQGTEPRPSSSNMKRAASLNYLNQPSAAPLQVSRGLSASTMDLSSSS

SEQ ID NO: 41408 - protein, 170 aa, Homo sapiens [sequence omitted]

SEQ ID NO: 41409 - protein, 1196 aa, Homo sapiens
MLGFSGPLLLSLLVGFLEEGQEPLSHGLLYALGLAGGAVLGAVLQNQYGYEVYKVTLQARGAVLNILYCKALQLGPSRPPTGEALNLLGTDSERLLNFAGSFHEAWGLPLQLAITLYLLYQQVGVAFVGGLILALLLVPVNKVIATRIMASNQEMLQHKDARVKLVTELLSGIRVIKFCGWEQALGARVEACRARELGRLRVIKYLDAACVYLWAALPVVISIVIFITYVLMGHQLTATKVFTALALVRMLILPLNNFPWVINGLLEAKVSLDRIQLFLDLPNHNPQAYYSPDPPAEPSTVLELHGALFSWDPVGTSLETFISHLEVKKGMLVGIVGKVGCGKSSLLAAIAGELHRLRGHVAVRGLSKGFGLATQEPWIQFATIRDNILFGKTFDAQLYKEVLEACALNDDLSILPAGDQTEVGEKGVTLSGGQRARIALARAVYQEKELYLLDDPLAAVDADVANHLLHRCILGMLSYTTRLLCTHRTEYLERADAVLLMEAGRLIRAGPPSEILPLVQAVPKAWAENGQESDSATAQSVQNPEKTKEGLEEEQSTSGRLLQEESKKEGAVALHVYQAYWKAVGQGLALAILFSLLLMQATRNAADWWLSHWISQLKAENSSQEAQPSTSPASMGLFSPQLLLFSPGNLYIPVFPLPKAAPNGSSDIRFYLTVYATIAGVNSLCTLLRAVLFAAGTLQAAATLHRRLLHRVLMAPVTFFNATPTGRILNRFSSDVACADDSLPFILNILLANAAGLLGLLAVLGSGLPWLLLLLPPLSIMYYHVQRHYRASSRELRRLGSLTLSPLYSHLADTLAGLSVLRATGATYRFEEENLRLLELNQRCQFATSATMQWLDIRLQLMGAAVVSAIAGIALVQHQQGLANPGLVGLSLSYALSLTGLLSGLVSSFTQTEAMLVSVERLEEYTCDLPQEPQGQPLQLGTGWLTQGGVEFQDVVLAYRPGLPNALDGVTFCVQPGEKLGIVGRTGSGKSSLLLVLFRLLEPSSGRVLLDGVDTSQLELAQLRSQLAIIPQEPFLFSGTVRENLDPQGLHKDRALWQALKQCHLSEVITSMGGLDGELGEGGRSLSLGQRQLLCLARALLTDAKILCIDEATASVDQKTDQLLQQTICKRFANKTVLTIAHRLNTILNSDRVLVLQAGRVVELDSPATLRNQPHSLFQQLLQSSQQGVPASLGGP

SEQ ID NO: 41410 - protein, 1202 aa, Homo sapiens [sequence omitted]

SEQ ID NO: 41411 - protein, 491 aa, Homo sapiens
MLPFLLATLGTTALNNSNPKDYCYSARIRSTVLQGLPFGGVPTVLALDFMCFLALLFLFSILRKVAWDYGRLALVTDADRLRRQERDRVEQEYVASAMHGDSHDRYERLTSVSSSVDFDQRDNGFCSWLTAIFRIKDDEIRDKCGGDAVHYLSFQRHIIGLLVVVGVLSVGIVLPVNFSGDLLENNAYSFGRTTIANLKSGNNLLWLHTSFAFLYLLLTVYSMRRHTSKMRYKEDDLVKRTLFINGISKYAESEKIKKHFEEAYPNCTVLEARPCYNVARLMFLDAERKKAERGKLYFTNLQSKENVPTMINPKPCGHLCCCVVRGCEQVEAIEYYTKLEQKLKEDYKREKEKVNEKPLGMAFVTFHNETITAIILKDFNVCKCQGCTCRGEPRPSSCSESLHISNWTVSYAPDPQNIYWEHLSIRGFIWWLRCLVINVVLFILLFFLTTPAIIITTMDKFNVTKPVEYLNVRPHAPVTFHAGSQHTDTRP

SEQ ID NO: 41412 - protein, 5526 aa, Homo sapiens
MSSSADFSDEDDFSQKSGSASPAPGDTLPWNLPKHERSKRKIQGGSVLDPAERAVLRIADERDKVQKKTFTKWINQHLMKVRKHVNDLYEDLRDGHNLISLLEVLSGDTLPREKGRMRFHRLQNVQIALDYLKRRQVKLVNIRNDDITDGNPKLTLGLIWTIILHFQISDIHVTGESEDMSAKERLLLWTQQATEGYAGIRCENFTTCWRDGKLFNAIIHKYRPDLIDMNTVAVQSNLANLEHAFYVAEKIGVIRLLDPEDVDVSSPDEKSVITYVSSLYDAFPKVPEGGEGIGANDVEVKWIEYQNMVNYLIQWIRHHVTTMSERTFPNNPVELKALYNQYLQFKETEIPPKETEKSKIKRLYKLLEIWIEFGRIKLLQGYHPNDIEKEWGKLIIAMLEREKALRPEVERLEMLQQIANRVQRDSVICEDKLILAGNALQSDSKRLESGVQFQNEAEIAGYILECENLLRQHVIDVQILIDGKYYQADQLVQRVAKLRDEIMALRNECSSVYSKGRILTTEQTKLMISGITQSLNSGFAQTLHPSLTSGLTQSLTPSLTSSSMTSGLSSGMTSRLTPSVTPAYTPGFPSGLVPNFSSGVEPNSLQTLKLMQIRKPLLKSSLLDQNLTEEEINMKFVQDLLNWVDEMQVQLDRTEWGSDLPSVESHLENHKNVHRAIEEFESSLKEAKISEIQMTAPLKLTYAEKLHRLESQYAKLLNTSRNQERHLDTLHNFVSRATNELIWLNEKEEEEVAYDWSERNTNIARKKDYHAELMRELDQKEENIKSVQEIAEQLLLENHPARLTIEAYRAAMQTQWSWILQLCQCVEQHIKENTAYFEFFNDAKEATDYLRNLKDAIQRKYSCDRSSSIHKLEDLVQESMEEKEELLQYKSTIANLMGKAKTIIQLKPRNSDCPLKTSIPIKAICDYRQIEITIYKDDECVLANNSHRAKWKVISPTGNEAMVPSVCFTVPPPNKEAVDLANRIEQQYQNVLTLWHESHINMKSVVSWHYLINEIDRIRASNVASIKTMLPGEHQQVLSNLQSRFEDFLEDSQESQVFSGSDITQLEKEVNVCKQYYQELLKSAEREEQEESVYNLYISEVRNIRLRLENCEDRLIRQIRTPLERDDLHESVFRITEQEKLKKELERLKDDLGTITNKCEEFFSQAAASSSVPTLRSELNVVLQNMNQVYSMSSTYIDKLKTVNLVLKNTQAAEALVKLYETKLCEEEAVIADKNNIENLISTLKQWRSEVDEKRQVFHALEDELQKAKAISDEMFKTYKERDLDFDWHKEKADQLVERWQNVHVQIDNRLRDLEGIGKSLKYYRDTYHPLDDWIQQVETTQRKIQENQPENSKTLATQLNQQKMLVSEIEMKQSKMDECQKYAEQYSATVKDYELQTMTYRAMVDSQQKSPVKRRRMQSSADLIIQEFMDLRTRYTALVTLMTQYIKFAGDSLKRLEEEEKSLEEEKKEHVEKAKELQKWVSNISKTLKDAEKAGKPPFSKQKISSEEISTKKEQLSEALQTIQLFLAKHGDKMTDEERNELEKQVKTLQESYNLLFSESLKQLQESQTSGDVKVEEKIVAERQQEYKEKLQGICDLLTQTENRLIGHQEAFMIGDGTVELKKYQSKQEELQKDMQGSAQALAEVVKNTENFLKENGEKLSQEDKALIEQKLNEAKIKCEQLNLKAEQSKKELDKVVTTAIKEETEKVAAVKQLEESKTKIENLLDWLSNVDKDSERAGTKHKQVIEQNGTHFQEGDGKSAIGEEDEVNGNLLETDVDGQVGTTQENLNQQYQKVKAQHEKIISQHQAVIIATQSAQVLLEKQGQYLSPEEKEKLQKNMKELKVHYETALAESEKKMKLTHSLQEELEKFDADYTEFEHWLQQSEQELENLEAGADDINGLMTKLKRQKSFSEDVISHKGDLRYITISGNRVLEAAKSCSKRDGGKVDTSATHREVQRKLDHATDRFRSLYSKCNVLGNNLKDLVDKYQHYEDASCGLLAGLQACEATASKHLSEPIAVDPKNLQRQLEETKALQGQISSQQVAVEKLKKTAEVLLDARGSLLPAKNDIQKTLDDIVGRYEDLSKSVNERNEKLQITLTRSLSVQDGLDEMLDWMGNVESSLKEQGQVPLNSTALQDIISKNIMLEQDIAGRQSSINAMNEKVKKFMETTDPSTASSLQAKMKDLSARFSEASHKHKETLAKMEELKTKVELFENLSEKLQTFLETKTQALTEVDVPGKDVTELSQYMQESTSEFLEHKKHLEVLHSLLKEISSHGLPSDKALVLEKTNNLSKKFKEMEDTIKEKKEAVTSCQEQLDAFQVLVKSLKSWIKETTKKVPIVQPSFGAEDLGKSLEDTKKLQEKWSLKTPEIQKVNNSGISLCNLISAVTTPAKAIAAVKSGGAVLNGEGTATNTEEFWANKGLTSIKKDMTDISHGYEDLGLLLKDKIAELNTKLSKLQKAQEESSAMMQWLQKMNKTATKWQQTPAPTDTEAVKTQVEQNKSFEAELKQNVNKVQELKDKLTELLEENPDTPEAPRWKQMLTEIDSKWQELNQLTIDRQQKLEESSNNLTQFQTVEAQLKQWLVEKELMVSVLGPLSIDPNMLNTQRQQVQILLQEFATRKPQYEQLTAAGQGILSRPGEDPSLRGIVKEQLAAVTQKWDSLTGQLSDRCDWIDQAIVKSTQYQSLLRSLSDKLSDLDNKLSSSLAVSTHPDAMNQQLETAQKMKQEIQQEKKQIKVAQALCEDLSALVKEEYLKAELSRQLEGILKSFKDVEQKAENHVQHLQSACASSHQFQQMSRDFQAWLDTKKEEQNKSHPISAKLDVLESLIKDHKDFSKTLTAQSHMYEKTIAEGENLLLKTQGSEKAALQLQLNTIKTNWDTFNKQVKERENKLKESLEKALKYKEQVETLWPWIDKCQNNLEEIKFCLDPAEGENSIAKLKSLQKEMDQHFGMVELLNNTANSLLSVCEIDKEVVTDENKSLIQKVDMVTEQLHSKKFCLENMTQKFKEFQEVSKESKRQLQCAKEQLDIHDSLGSQAYSNKYLTMLQTQQKSLQALKHQVDLAKRLAQDLVVEASDSKGTSDVLLQVETIAQEHSTLSQQVDEKCSFLETKLQGIGHFQNTIREMFSQFAEFDDELDSMAPVGRDAETLQKQKETIKAFLKKLEALMASNDNANKTCKMMLATEETSPDLVGIKRDLEALSKQCNKLLDRAQAREEQVEGTIKRLEEFYSKLKEFSILLQKAEEHEESQGPVGMETETINQQLNMFKVFQKEEIEPLQGKQQDVNWLGQGLIQSAAKSTSTQGLEHDLDDVNARWKTLNKKVAQRAAQLQEALLHCGRFQDALESLLSWMVDTEELVANQKPPSAEFKVVKAQIQEQKLLQRLLDDRKSTVEVIKREGEKIATTAEPADKVKILKQLSLLDSRWEALLNKAETRNRQLEGISVVAQQFHETLEPLNEWLTTIEKRLVNCEPIGTQASKLEEQIAQHKALEDDIINHNKHLHQAVSIGQSLKVLSSREDKDMVQSKLDFSQVWYIEIQEKSHSRSELLQQALCNAKIFGEDEVELMNWLNEVHDKLSKLSVQDYSTEGLWKQQSELRVLQEDILLRKQNVDQALLNGLELLKQTTGDEVLIIQDKLEAIKARYKDITKLSTDVAKTLEQALQLARRLHSTHEELCTWLDKVEVELLSYETQVLKGEEASQAQMRPKELKKEAKNNKALLDSLNEVSSALLELVPWRAREGLEKMVAEDNERYRLVSDTITQKVEEIDAAILRSQQFDQAADAELSWITETEKKLMSLGDIRLEQDQTSAQLQVQKTFTMEILRHKDIIDDLVKSGHKIMTACSEEEKQSMKKKLDKVLKNYDTICQINSERYLQLERAQSLVNQFWETYEELWPWLTETQSIISQLPAPALEYETLRQQQEEHRQLRELIAEHKPHIDKMNKTGPQLLELSPGEGFSIQEKYVAADTLYSQIKEDVKKRAVALDEAISQSTQFHDKIDQILESLERIVERLRQPPSISAEVEKIKEQISENKNVSVDMEKLQPLYETLKQRGEEMIARSGGTDKDISAKAVQDKLDQMVFIWENIHTLVEEREAKLLDVMELAEKFWCDHMSLIVTIKDTQDFIRDLEDPGIDPSVVKQQQEAAETIREEIDGLQEELDIVINLGSELIAACGEPDKPIVKKSIDELNSAWDSLNKAWKDRIDKLEEAMQAAVQYQDGLQAVFDWVDIAGGKLASMSPIGTDLETVKQQIEELKQFKSEAYQQQIEMERLNHQAELLLKKVTEESDKHTVQDPLMELKLIWDSLEERIINRQHKLEGALLALGQFQHALDELLAWLTHTEGLLSEQKPVGGDPKAIEIELAKHHVLQNDVLAHQSTVEAVNKAGNDLIESSAGEEASNLQNKLEVLNQRWQNVLEKTEQRKQQLDGALRQAKGFHGEIEDLQQWLTDTERHLLASKPLGGLPETAKEQLNVHMEVCAAFEAKEETYKSLMQKGQQMLARCPKSAETNIDQDINNLKEKWESVETKLNERKTKLEEALNLAMEFHNSLQDFINWLTQAEQTLNVASRPSLILDTVLFQIDEHKVFANEVNSHREQIIELDKTGTHLKYFSQKQDVVLIKNLLISVQSRWEKVVQRLVERGRSLDDARKRAKQFHEAWSKLMEWLEESEKSLDSELEIANDPDKIKTQLAQHKEFQKSLGAKHSVYDTTNRTGRSLKEKTSLADDNLKLDDMLSELRDKWDTICGKSVERQNKLEEALLFSGQFTDALQALIDWLYRVEPQLAEDQPVHGDIDLVMNLIDNHKAFQKELGKRTSSVQALKRSARELIEGSRDDSSWVKVQMQELSTRWETVCALSISKQTRLEAALRQAEEFHSVVHALLEWLAEAEQTLRFHGVLPDDEDALRTLIDQHKEFMKKLEEKRAELNKATTMGDTVLAICHPDSITTIKHWITIIRARFEEVLAWAKQHQQRLASALAGLIAKQELLEALLAWLQWAETTLTDKDKEVIPQEIEEVKALIAEHQTFMEEMTRKQPDVDKVTKTYKRRAADPSSLQSHIPVLDKGRAGRKRFPASSLYPSGSQTQIETKNPRVNLLVSKWQQVWLLALERRRKLNDALDRLEELREFANFDFDIWRKKYMRWMNHKKSRVMDFFRRIDKDQDGKITRQEFIDGILSSKFPTSRLEMSAVADIFDRDGDGYIDYYEFVAALHPNKDAYKPITDADKIEDEVTRQVAKCKCAKRFQVEQIGDNKYRFFLGNQFGDSQQLRLVRILRSTVMVRVGGGWMALDEFLVKNDPCRAKGRTNMELREKFILADGASQGMAAFRPRGRRSRPSSRGASPNRSTSVSSQAAQAASPQVPATTTPKILHPLTRNYGKPWLTNSKMSTPCKAAECSDFPVPSAEGTPIQGSKLRLPGYLSGKGFHSGEDSGLITTAAARVRTQFADSKKTPSRPGSRAGSKAGSRASSRRGSDASDFDISEIQSVCSDVETVPQTHRPTPRAGSRPSTAKPSKIPTPQRKSPASKLDKSSKR

SEQ ID NO: 41413 - protein, 2358 aa, Homo sapiens
MSVKPTLLSLYEIYYLPLGKTLKPGLQGLLTGILPGLEEGSEYYERTNMLLEKVAAAVDQSAFYSALWGSLLTSPAVRLPGITYVLAHLNRKLSMEDQLYIIGSDIELMVEAVSTSVQDSSVLVQRSTLDLILFCFPFHMSQATRPDMIRILSAALHVVLRRDMSLNRRLYAWLLGPRSTRHSNPEEHATYYFTTFSKELLVQAMVGILQVNGFGEENTLMQDLKPFRILISLLDKPELGPVILEDVLIEVFRTLYSQCKAELDLQTEPPFSKDHAQLSSKLRENKKTAELIKTANLLFNSFEPYYMWDYVARWFEECCRRTLHVRLQIGPGDSNDSSELQLTNFCLLVDFLLDIVSLPTRSMRVLCQETYIEIQTEHLPQLLLRMISALTSHLQTLHLSELTDSLRLCSKILSKVQPPLLSASTGGVLQFPSGQNNSVKEWEDKKVSSVSHENPTEVFEDGENPPSSRSSESGFTEFIQYQADRTDDIDRELSEGQGAAAIPIGSTSSETETASTVGSEETIIQTPSVVTQGTATRSRKTAQKTAMQCCLEYVQQFLTRLINLYIIQNNSFSQSLATEHQGDLGREQGETSKWDRNSQGDVKEKNISKQKTSKEYLSAFLAACQLFLECSSFPVYIAEGNHTSELRSEKLETDCEHVQPPQWLQTLMNACSQASDFSVQSVAISLVMDLVGLTQSVAMVTGENINSVEPAQPLSPNQGRVAVVIRPPLTQGNLRYIAEKTEFFKHVALTLWDQLGDGTPQHHQKSVELFYQLHNLVPSSSICEDVISQQLTHKDKKIRMEAHAKFAVLWHLTRDLHINKSSSFVRSFDRSLFIMLDSLNSLDGSTSSVGQAWLNQVLQRHDIARVLEPLLLLLLHPKTQRVSVQRVQAERYWNKSPCYPGEESDKHFMQNFACSNVSQVQLITSKGNGEKPLTMDEIENFSLTVNPLSDRLSLLSTSSETIPMVVSDFDLPDQQIEILQSSDSGCSQSSAGDNLSYEVDPETVNAQEDSQMPKESSPDDDVQQVVFDLICKVVSGLEVESASVTSQLEIEAMPPKCSDIDPDEETIKIEDDSIQQSQNALLSNESSQFLSVSAEGGHECVANGISRNSSSPCISGTTHTLHDSSVASIETKSRQRSHSSIQFSFKEKLSEKVSEKETIVKESGKQPGAKPKVKLARKKDDDKKKSSNEKLKQTSVFFSDGLDLENWYSCGEGDISEIESDMGSPGSRKSPNFNIHPLYQHVLLYLQLYDSSRTLYAFSAIKAILKTNPIAFVNAISTTSVNNAYTPQLSLLQNLLARHRISVMGKDFYSHIPVDSNHNFRSSMYIEILISLCLYYMRSHYPTHVKVTAQDLIGNRNMQMMSIEILTLLFTELAKVIESSAKGFPSFISDMLSKCKVQKVILHCLLSSIFSAQKWHSEKMAGKNLVAVEEGFSEDSLINFSEDEFDNGSTLQSQLLKVLQRLIVLEHRVMTIPEENETGFDFVVSDLEHISPHQPMTSLQYLHAQPITCQGMFLCAVIRALHQHCACKMHPQWIGLITSTLPYMGKVLQRVVVSVTLQLCRNLDNLIQQYKYETGLSDSRPLWMASIIPPDMILTLLEGITAIIHYCLLDPTTQYHQLLVSVDQKHLFEARSGILSILHMIMSSVTLLWSILHQADSSEKMTIAASASLTTINLGATKNLRQQILELLGPISMNHGVHFMAAIAFVWNERRQNKTTTRTKVIPAASEEQLLLVELVRSISVMRAETVIQTVKEVLKQPPAIAKDKKHLSLEVCMLQFFYAYIQRIPVPNLVDSWASLLILLKDSIQLSLPAPGQFLILGVLNEFIMKNPSLENKKDQRDLQDVTHKIVDAIGAIAGSSLEQTTWLRRNLEVKPSPKIMVDGTNLESDVEDMLSPAMETANITPSVYSVHALTLLSEVLAHLLDMVFYSDEKERVIPLLVNIMHYVVPYLRNHSAHNAPSYRACVQLLSSLSGYQYTRRAWKKEAFDLFMDPSFFQMDASCVNHWRAIMDNLMTHDKTTFRDLMTRVAVAQSSSLNLFANRDVELEQRAMLLKRLAFAIFSSEIDQYQKYLPDIQERLVESLRLPQVPTLHSQVFLFFRVLLLRMSPQHLTSLWPTMITELVQVFLLMEQELTADEDISRTSGPSVAGLETTYTGGNGFSTSYNSQRWLNLYLSACKFLDLALALPSENLPQFQMYRWAFIPEASDDSGLEVRRQGIHQREFKPYVVRLAKLLRKRAKDKEEDFKTVILEGLEMAKHQKNPEEDNSGRTLGWEPGHLLLTICTVRSMEQLLPFFNVLSQVFNSKVTSRCGGHSGSPILYSNAFPNKDMKLENHKPCSSKARQKIEEMVEKDFLEGMIKT

SEQ ID NO: 41414 - protein, 62 aa, Homo sapiens
MAAVYTIALRYTRTSDKELYFSTTAVCITEVIKLLLSVGILAKKNRFGGKRYQQFDFGDLVT

SEQ ID NO: 41415 - protein, 440 aa, Homo sapiens [sequence omitted]

SEQ ID NO: 41416 - protein, 176 aa, Homo sapiens [sequence omitted]

SEQ ID NO: 41417 - protein, 91 aa, Homo sapiens [sequence omitted]

SEQ ID NO: 41418 - protein, 927 aa, Homo sapiens
MIPFTNANYDSHPMLYFSRAEVAELQLRAASSHEHIAARLTEAVHTMLSSPLEYLPPWDPKDYSARWNEIFGNNLGALAMFCVLYPENIEARDMAKDYMERMAAQPSWLVKDAPWDEVPLAHSLVGFATAYDFLYNYLSKTQQEKFLEVIANASGYMYETSYRRGWGFQYLHNHQPTNCMALLTGSLVLMNQGYLQEAYLWTKQVLTIMEKSLVLLREVTDGSLYEGVAYGSYTTRSLFQYMFLVQRHFNINHFGHPWLKQHFAFMYRTILPGFQRTVAIADSNYNWFYGPESQLVFLDKFVMRNGSGNWLADQIRRNRVVEGPGTPSKGQRWCTLHTEFLWYDGSLKSVPPPDFGTPTLHYFEDWGVVTYGSALPAEINRSFLSFKSGKLGGRAIYDIVHRNKYKDWIKGWRNFNAGHEHPDQNSFTFAPNGVPFITEALYGPKYTFFNNVLMFSPAVSKSCFSPWVGQVTEDCSSKWSKYKHDLAASCQGRVVAAEEKNGVVFIRGEGVGAYNPQLNLKNVQRNLILLHPQLLLLVDQIHLGEESPLETAASFFHNVDVPFEETVVDGVHGAFIRQRDGLYKMYWMDDTGYSEKATFASVTYPRGYPYNGTNYVNVTMHLRSPITRAAYLFIGPSIDVQSFTVHGDSQQLDVFIATSKHAYATYLWTGEATGQSAFAQVIADRHKILFDRNSAIKSSIVPEVKDYAAIVEQNLQHFKPVFQLLEKQILSRVRNTASFRKTAERLLRFSDKRQTEEAIDRIFAISQQQQQQSKSKKNRRAGKRYKFVDAVPDIFAQIEVNEKKIRQKAQILAQKELPIDEDEEMKDLLDFADVTYEKHKNGGLIKGRFGQARMVTTTHSRAPSLSASYTRLFLILNIAIFFVMLAMQLTYFQRAQSLHGQRCLYAVLLIDSCILLWLYSSCSQSQC

SEQ ID NO: 41419 - protein, 33 aa, Homo sapiens
MAMTMRTTGNEPGTQAPMSLCKASLLPSAESRD

SEQ ID NO: 41420 - protein, 25 aa, Homo sapiens
MSEKSTKIGAILNSQTRKNQGLEIK

SEQ ID NO: 41421 - protein, 716 aa, Homo sapiens
MELCGATRLGYFGRSQFYIALKLVAVAQSGFPLRVESINTVKDLPLPRFVASKNEQESRHAASYSSDSENQGSYSGVIPPPPGRGQVKKGSVSHDTVQPRTSADAQEPASPVVSPQQSPPTSPHTWRKHSRHPSGGNSERPLAGPGPFWSPFGEAQSGSSAGDAVWSGHSPPPPQENWVSFADTPPTSTLLTMHPASVQDQTTVRTVASATTAIEIRRQSSSYDDPWKITDEQRQYYVNQFKTIQPDLNGFIPGSAAKEFFTKSKLPILELSHIWELSDFDKDGALTLDEFCAAFHLVVARKNGYDLPEKLPESLMPKLIDLEDSADVGDQPGEVGYSGSPAEAPPSKSPSMPSLNQTWPELNQSSEDTAIVHPVPIRMTPSKIHMQEMELKRTGSDHTNPTSPLLVKPSDLLEENKINSSVKFASGNTVDGYSSSDSFTSDPEQIGSNVTRQRSHSGTSPDNTAPPPPPPRPQPSHSRSSSLDMNRTFTVTTGQQQAGVVAHPPAVPPRPQPSQAPGPAVHRPVDADGLITHTSTSPQQIPEQPNFADFSQFEVFAASNVNDEQDDEAEKHPEVLPAEKASDPASSLRVAKTDSKTEEKTAASAPANVSKGTTPLAPPPKPVRRRLKSEDELRPEVDEHTQKTGVLAAVLASQPSIPRSVGKDKKAIQASIRRNKETNTVLARLNSELQQQLKDVLEERISLEVQLEQLRPFSHL

SEQ ID NO: 41422 - protein, 102 aa, Homo sapiens
MTARGKTSDIEANQPLETNKENSSSVTVSDPEMENKAGQTLENSSLMAELLSDVPFTLAPHVLAVQGTITDLPDHLLSYDGSENLSRFWYDFTLENSVLCDS

SEQ ID NO: 41423 - protein, 651 aa, Homo sapiens
MPQDSLILEKSQNWSSQKMDHILICCVCLGDNSEDADEIIQCDNCGITVHEGCYGVDGESDSIMSSASENSTEPWFCDACKCGVSPSCELCPNQDGIFKETDAGRWVHIVCALYVPGVAFGDIDKLRPVTLTEMNYSKYGAKECSFCEDPRFARTGVCISCDAGMCRAYFHVTCAQKEGLLSEAAAEEDIADPFFAYCKQHADRLDRKWKRKNYLALQSYCKMSLQEREKQLSPEAQARINARLQQYRAKAELARSTRPQAWVPREKLPRPLTSSASAIRKLMRKAELMGISTDIFPVDNSDTSSSVDGRRKHKQPALTADFVNYYFERNMRMIQIQENMAEQKNIKDKLENEQEKLHVEYNKLCESLEELQNLNGKLRSEGQGIWALLGRITGQKLNIPAILRAPKERKPSKKEGGTQKTSTLPAVLYSCGICKKNHDQHLLLLCDTCKLHYHLGCLDPPLTRMPRKTKNSYWQCSECDQAGSSDMEADMAMETLPDGTKRSRRQIKEPVKFVPQDVPPEPKKIPIRNTRTRGRKRSFVPEEEKHEERVPRERRQRQSVLQKKPKAEDLRTECATCKGTGDNENLVRCDECRLCYHFGCLDPPLKKSPKQTGYGWICQECDSSSSKEDENEAERKNISQELNMEQKNPKK

SEQ ID NO: 41424 - protein, 877 aa, Homo sapiens
MKREARTIKIDRRLTGANIIDEPLQQVIQFSLRDYVQYWYYTLSDDESFLLEIRQTLQNALIQFATRSKEIDWQPYFTTRIVDDFGTHLRVFRKAQQKITEKDDQVKGTAEDLVDTFFEVEVEMEKEVCRDLVCTSPKDEEGFLRDLCEVLLYLLLPPGDFQNKIMRYFVREILARGILLPLINQLSDPDYINQYVIWMIRDSNCNYEAFMNIIKLSDNIGELEAVRDKAAEELQYLRSLDTAGDDINTIKNQINSLLFVKKVCDSRIQRLQSGKEINTVKLAANFGKLCTVPLDSILVDNVALQFFMDYMQQTGGQAHLFFWMTVEGYRVTAQQQLEVLLSRQRDGKHQTNQTKGLLRAAAVGIYEQYLSEKASPRVTVDDYLVAKLADTLNHEDPTPEIFDDIQRKVYELMLRDERFYPSFRQNALYVRMLAELDMLKDPSFRGSDDGDGESFNGSPTGSINLSLDDLSNVSSDDSVQLHAYISDTGVCNDHGKTYALYAITVHRRNLNSEEMWKTYRRYSDFHDFHMRITEQFESLSSILKLPGKKTFNNMDRDFLEKRKKDLNAYLQLLLAPEMMKASPALAHYVYDFLENKAYSKGKGDFARKMDTFVNPLRNSMRNVSNAVKSLPDSLAEGMTKMSDNMGKMSERLGQDIKQSFFKVPPLIPKTDSDPEHRRVSAQLDDNVDDNIPLRVMLLLMDEVFDLKERNQWLRRNIKNLLQQLIRATYGDTINRKIVDHVDWMTSPEQVADSVKRFRDAFWPNGILAEAVPCRDKSIRMRTRVAGKTKLLAIMPDELKHIIGAETTRKGILRVFEMFQHNQLNRRMVYVFLEGFLETLFPQYKFRELFNKLHSRSKQMQKYKQKLQTTQAPSLQKR

SEQ ID NO: 41425 - protein, 59 aa, Homo sapiens
MRYHLLSPEDREELVDGTRPRRKKHDYRIALFGGSQPQSCRYFNPKLKRDAYSSTRAWK

SEQ ID NO: 41426 - protein, 850 aa, Homo sapiens
MSDEKNLGVSQKLVSPSRSTSSCSSKQGSRQDSWEVVEGLRGEMNYTQEPPVQKGFLLKKRKWPLKGWHKRFFYLDKGILKYAKSQTDIEREKLHGCIDVGLSVMSVKKSSKCIDLDTEEHIYHLKVKSEEVFDEWVSKLRHHRMYRQNEIAMFPHEVNHFFSGSTITDSSSGVFDSISSRKRSSISKQNLFQTGSNVSFSCGGETRVPLWLQSSEDMEKCSKDLAHCHAYLVEMSQLLQSMDVLHRTYSAPAINAIQGGSFESPKKEKRSHRRWRSRAIGKDAKGTLQVPKPFSGPVRLHSSNPNLSTLDFGEEKNYSDGSETSSEFSKMQEDLCHIAHKVYFTLRSAFNIMSAEREKLKQLMEQDASSSPSAQVIGLKNALSSENSRDENRALVHQLSNESRLSITDSLSEFFDAQEVLLSPSSSENEISDDDSYVSDISDNLSLDNLSNDLDNERQTLGPVLDSGREAKSRRRTCLPAPCPSSSNISLWNILRNNIGKDLSKVAMPVELNEPLNTLQRLCEELEYSELLDKAAQIPSPLERMVYVAAFAISAYASSYYRAGSKPFNPVLGETYECIREDKGFQFFSEQVSHHPPISACHAESRNFVFWQDVRWKNKFWGKSMEIVPIGTTHVTLPVFGDHFEWNKVTSCIHNILSGQRWIEHYGEIVIKNLHDDSCYCKVNFIKAKYWSTNAHEIEGTVFDRSGKAVHRLFGKWHESIYCGGGSSSACVWRANPMPKGYEQYYSFTQFALELNEMDPSSKSLLPPTDTRFRPDQRFLEEGNLEEAEIQKQRIEQLQRERRRVLEENHVEHQPRFFRKSDDDSWVSNGTYLELRKDLGFSKLDHPVLW

SEQ ID NO: 41427 - protein, 819 aa, Homo sapiens
MSDEKNLGVSQKLVSPSRSTSSCSSKQGSRQDSWEVVEGLRGEMNYTQEPPVQKGFLLKKRKWPLKGWHKRFFYLDKGILKYAKSQTDIEREKLHGCIDVGLSVMSVKKSSKCIDLDTEEHIYHLKVKSEEVFDEWVSKLRHHRMYRQNEIAMFPHEVNHFFSGSTITDSSSGVFDSISSRKRSSISKQNLFQTGSNVSFSCGGETRVPLWLQSSEDMEKCSKDLAHCHAYLVEMSQLLQSMDVLHRTYSAPAINAIQVPKPFSGPVRLHSSNPNLSTLDFGEEKNYSDGSETSSEFSKMQEDLCHIAHKVYFTLRSAFNIMSAEREKLKQLMEQDASSSPSAQVIGLKNALSSENSRDENRALVHQLSNESRLSITDSLSEFFDAQEVLLSPSSSENEISDDDSYVSDISDNLSLDNLSNDLDNERQTLGPVLDSGREAKSRRRTCLPAPCPSSSNISLWNILRNNIGKDLSKVAMPVELNEPLNTLQRLCEELEYSELLDKAAQIPSPLERMVYVAAFAISAYASSYYRAGSKPFNPVLGETYECIREDKGFQFFSEQVSHHPPISACHAESRNFVFWQDVRWKNKFWGKSMEIVPIGTTHVTLPVFGDHFEWNKVTSCIHNILSGQRWIEHYGEIVIKNLHDDSCYCKVNFIKAKYWSTNAHEIEGTVFDRSGKAVHRLFGKWHESIYCGGGSSSACVWRANPMPKGYEQYYSFTQFALELNEMDPSSKSLLPPTDTRFRPDQRFLEEGNLEEAEIQKQRIEQLQRERRRVLEENHVEHQPRFFRKSDDDSWVSNGTYLELRKDLGFSKLDHPVLW

SEQ ID NO: 41428 - protein, 60 aa, Homo sapiens
MHSSLFKMPRTWMTHSQDPPPVTYIGEPARRPLQETLHLFHLTSHLAASSTIEMNLTLII

SEQ ID NO: 41429 - protein, 101 aa, Homo sapiens [sequence omitted]

SEQ ID NO: 41430 - protein, 236 aa, Homo sapiens
MAVAAEFRDSLGDFIEHYAQLGPSSPEQLAAGAEEGGGPRRALKSEFLVRENRKYYLDLKENQRGRFLRIRQTVNRGGGGFGAGPGPGGLQSGQTIALPAQGLIEFRDALAKLIDDYGGEDDELAGGPGGGAGGPGGGLYGELPEGTSITVDSKRFFFDVGCNKYGVFLRVSEVKPSYRNAITVPFKAWGKFGGAFCRYADEMKEIQERQRDKLYERRGGGSGGGEESEGEEVDED

SEQ ID NO: 41431 - protein, 141 aa, Homo sapiens
MARHGLPLLPLLSLLVGAWLKLGNGQATSMVQLQGGRFLMGTNSPDSRDGDGPVREATVKPFAIDIFPVTNKDFRDFVREKKYRTEAEMFGWSFVFEDFVSDELRNKATQPMKSVLWWLPVEKAFWRQVRADSATSFSTPA

SEQ ID NO: 41432 - protein, 51 aa, Homo sapiens
MRVLRGASWIDTADGSANHRARVTTRTGTGSGPVLTPGFFPDHALPSPHAP

SEQ ID NO: 41433 - protein, 140 aa, Homo sapiens
MAPPASRAPQMRAAPRPAPVAQPPAAAPPSAVGSSAAAPRQPGLMAQMATTAAGVAVGSAVGHTLGHAITGGFSGGSNAEPARPDITYQEPQGTQPAQQQQPCLYEIKQFLECAQNQGDIKLCEGFNEVLKQCRLANGLA

SEQ ID NO: 41434 - protein, 878 aa, Homo sapiens
MDLNRVIKLLEETDKDGLEEKQLKFVKKLVQCYQNGLPLRDLAQIFKILNLCSGKIKNQPRFIESAYDIIKLCGLPFLKKKVSDEITYAEDTANSIALLGDLMKIPSSELRIQICYQQASSSYKIQMAEVGGLAKTMVQSMTLLENQLVEKLWVLKVLQHLSTSEVNCTIMMKAQAASGICTHLNDPDPSGQLLFRSSEILWNLLEKSSKEEVIQQLSNLECLLALKEVFKNLFMRGFSHYDRQLRNDILVITTIIAQNPEAPMIECGFTKDLILFATFNEVKSQNLLVKGLKLSNSYEDFELKKLLFNVIVILCKDLPTVQLLIDGKVILALFTYVKKPEKQKIIDWSAAQHEELQLHAIATLSSVAPLLIEEYMSCQGNARVLAFLEWCESEDPFFSHGNSFHGTGGRGNKFAQMRYSLRLLRAVVYLEDETVNKDLCEKGTIQQMIGIFKNIISKPNEKEEAIVLEIQSDILLILSGLCENHIQRKEIFGTEGVDIVLHVMKTDPRKLQSGLGYNVLLFSTLDSIWCCILGCYPSEDYFLEKEGIFLLLDLLALNQKKFCNLILGIMVEFCDNPKTAAHVNAWQGKKDQTAASLLIKLWRKEEKELGVKRDKNGKIIDTKKPLFTSFQEEQKIIPLPANCPSIAVMDVSENIRAKIYAILGKLDFENLPGLSAEDFVTLCIIHRYLDFKIGEIWNEIYEEIKLEKLRPVTTDKKALEAITTASENIGKMVASLQSDIIESQACQDMQNEQKVYAKIQATHKQRELANKSWEDFLARTSNAKTLKKAKSLQEKAIEASRYHKRPQNAIFHQTHIKGLNTTVPSGGVVTVESTPARLVGGPLVDTDIALKKLPIRGGALQRVKAVKIVDAPKKSIPT

SEQ ID NO: 41435 - protein, 413 aa, Homo sapiens
MDQLHMHFTQAIHNTVFQVVLGYVELCAGNTDTKFQKLQYKDLCTHVTPDSYIPCLADLCKALWEVMLSYYRTMEWHEKHDNEDTASASEGSNMIGTEETNFDRGYIKKKLEHGLTRIWQDVQLKVKTYLLGTDLSIFKYDDFIFVLDIISRLMQVGEEFCGSKSEVLQESIRKQSVNYFKNYHRTRLDELRMFLENETWELCPVKSNFSILQLHEFKFMEQSRSPSVSPSKQPVSTSSKTVTLFEQYCSGGNPFEIQANHKDEETEDVLASNGYESDEQEKSAYQEYDSDSDVPEELKRDYVDEQTGDGPVKSVSRETLKSRKKSDYSLNKVNAPILTNTTLNVIRLVDGVSLCCLGWSTVAHLHSLQAPPPGFKPFSCLSLPRSWDYRRPPPRPANFLYFLFFSRDGVSPC

SEQ ID NO: 41436 - protein, 555 aa, Homo sapiens
MEGIVIVKVEEEDEEDHFQKERNKVESSPQVLSRSTTMNERALLSSYLVAYRVAKEKMAHTAAEKIILPACMDMVRTIFDDKSADKLRTIPLSDNTISRRICTIAKHLEAMLITRLQSGIDFAIQLDESTDIASCPTLLVYVRYVWQDDFVEDLLCCLNLNSHITGLDLFTELENCLLGQYKLNWKHCKGISSDGTANMTGKHSRLTEKLLEATHNNAVWNHCFIHREALVSKEISPSLMDVLKNAVKTVNFIKGSSLNSRLLEIFCSEIGVNHTHLLFHTEVRWLSQGKVLSRVYELRNEIYIFLVEKQSHLANIFEDDIWVTKLAYLSDIFGILNELSLKMQGKNNDIFQYLEHILGFQKTLLLWQARLKSNRPSYYMFPTLLQHIEENIINEDCLKEIKLEILLHLTSLSQTFNYYFPEEKFESLKENIWMKDPFAFQNPESIIELNLEPEEENELLQLSSSFTLKNYYKILSLSAFWIKIKDDFPLLSRKSILLLLPFTTTYLCELGFSILTRLKTKKRNRLNSAPDMRVALSSCVPDWKELMNRQAHPSH

SEQ ID NO: 41437 - protein, 647 aa, Homo sapiens
MTTLQNKEECGKGPKRIFAPPAQKSYSLLPCSPNSPKEETPGISSPETEARISLPKASLKKKEEKATMKNVPSREQEKKRKAQINKQAEKKEKEKSSLTNAEFEEIVQIVLQKSLQECLGMGSGLDFAETSCAQPVVSTQSDKEPGITASATDTDNANGEEVPHTQEISVSWEGEAAPEIRTSKLGQPDPAPSKKKSNRLTLSKRKKEAHEKVEKTQGGHEHRQEDRLKKTVQDHSQIRDQQKGEISGFGQCLVWVQCSFPNCGKWRRLCGNIDPSVLPDNWSCDQNTDVQYNRCDIPEETWTGLESDVAYASYIPGSIIWAKQYGYPWWPGMIESDPDLGEYFLFTSHLDSLPSKYHVTFFGETVSRAWIPVNMLKNFQELSLELSVMKKRRNDCSQKLGVALMMAQEAEQISIQERVNLFGFWSRFNGSNSNGERKDLQLSGLNSPGSCLEKKEKEEELEKEEGEKTDPILPIRKRVKIQTQKTKPRGLGGDAGTADGRGRTLQRKIMKRSLGRKSTAPPAPRMGRKEGQGNSDSDQPGPKKKFKAPQSKALAASFSEGKEVRTVPKNLGLSACKGACPSSAKEEPRHREPLTQEAGSVPLEDEASSDLDLEQLMEDVGRELGQSGELQHSNSDGEDFPVALFGK

SEQ ID NO: 41438 - protein, 403 aa, Homo sapiens
MAFKGTKKRSQLDLELEIENMGAHLNAYTSREQTVYYAKAFSKDLPRAVEILADIIQNSTLGEAEIERERGVILREMQEVETNLQEVVFDYLHATAYQNTALGRTILGPTENIKSISRKDLVDYITTHYKGPRIVLAAAGGVSHDELLDLAKFHFGDSLCTHKGEIPALPPCKFTGSEIRVRDDKMPLAHLAIAVEAVGWAHPDTICLMVANTLIGNWDRSFGGGMNLSSKLAQLTCHGNLCHSFQSFNTSYTDTGLWGLYMVCESSTVADMLHVVQKEWMRLCTSVTESEVARARNLLKTNMLLQLDGSTPICEDIGRQMLCYNRRIPIPELEARIDAVNAETIREVCTKYIYNRSPAIAAVGYNHRSELHEWKWNKLFSKRQTISYSYVNILLPQPQPQYV

SEQ ID NO: 41439 - protein, 524 aa, Homo sapiens
MATGLSEHHNMVWEVKTNQMPNAVQKLLLVMDKRASGMNDSLELLQCNENLPSSPGYNSCDEHMELDDLPELQAVQSDPTQSGMYQLSSDVSHQEYPRSSWNQNTSDIPETTYRENEVDWLTELANIATSPQSPLMQCSFYNRSSPVHIIATSKSLHSYARPPPVSSSSKSEPAFPHHHWKEETPVRHERANSESESGIFCMSSLSDDDDLGWCNSWPSTVWHCFLKGTRLCFHKGSNKEWQDVEDFARAEGCDNEEDLQMGIHKGYGSDGLKLLSHEESVSFGESVLKLTFDPGTVEDGLLTVECKLDHPFYVKNKGWSSFYPSLTVVQHGIPCCEVHIGDVCLPPGHPDAINFDDSGVFDTFKSYDFTPMDSSAVYVLSSMARQRRASLSCGGPGGQDFARSGFSKNCGSPGSSQLSSNSLYAKAVKNHSSGTVSATSPNKCKRPMNAFMLFAKKYRVEYTQMYPGKDNRAISVILGDRWKKMKNEERRMYTLEAKALAEEQKRLNPDCWKRKRTNSGSQQH

SEQ ID NO: 41440 - protein, 243 aa, Homo sapiens
MKLFRSQRNLYISGFSLFFWLVLRRLVTLITQLAKELSNKGVLKTQAENTNKAAKKFMEENEKLKRILKSHGKDEECVLEAENKKLVEDQEKLKTELRKTSDALSKAQNDVMEMKMQSERLSKEYDQLLKEHSELQKQREILPHRRGESTVTTEAEIGVMEPQQRNADSHQKLEEAKNRFFPRASSSRSMALQIPIKLILDFLASRTMGINLLFQAIKFVIICYCCHSKLIQEHAGQICNGLN

SEQ ID NO: 41441 - protein, 472 aa, Homo sapiens
MDTVTEADMAIAMALMGGIGFIHHNCTPEFQANEKFEQGFITDPVVLSPSHTVGDVLEAKMRHGFSGIPITETGTMGSKLVGIVTSRDIDFLAEKDHTTLLSEVMTPRIELVVAPAGVTLKEANEILQRSKKGKLPIVNDCDELVAIIARTDLKKNRDYPLASKDSQKQLLCGAAVGTREDDKYRLDLLTQAGVDVIVLDSSQGNSVYQIAMVHYIKQKYPHLQVIGGNVVTAAQAKNLIDAGVDGLRVGMGCGSICITQEVMACGRPQGTAVYKVAEYARRFGVPIIADGGIQTVGHVVKALALGASTVMMGSLLAATTEAPGEYFFSDGVRLKKYRGMGSLDAMEKSSSSQKRYFSEGDKVKIAQGVSGSIQDKGSIQKFVPYLIAGIQHGCQDIGARSLSVLRSMMYSGELKFEKRTMSAQIEGGVHGLHSYTFLPFTKSGCTEDSGGGRGGGGDAPQCPLLGTASLHN

SEQ ID NO: 41442 - protein, 35 aa, Homo sapiens
MFGLWKPMVFLAIAAVALYVLPNMRQQESEFCLME

SEQ ID NO: 41443 - protein, 104 aa, Homo sapiens
MCSSALVVFVFGALTEWLRFYNKWLYCCLWIVNGLLQSTGWPCVVAVMGNWFGKAGRGVVFGLWSACASVGNILGACLASSVLQYGYEICKDHLSPLSSSMPFW

SEQ ID NO: 41444 - protein, 321 aa, Homo sapiens [sequence omitted]

SEQ ID NO: 41445 - protein, 541 aa, Homo sapiens
MATEGAAQLGNRVAGMVCSLWVLLLVSSVLALEEVLLDTTGETSEIGWLTYPPGGWDEVSVLDDQRRLTRTFEACHVAGAPPGTGQDNWLQTHFVERRGAQRAHIRLHFSVRACSSLGVSGGTCRETFTLYYRQAEEPDSPDSVSSWHLKRWTKVDTIAADESFPSSSSSSSSSSSSAAWAVGPHGAGQRAGLQLNVKERSFGPLTQRGFYVAFQDTGACLALVAVRLFSYTCPAVLRSFASFPETQASGAGGASLVAAVGTCVAHAEPEEDGVGGQAGGSPPRLHCNGEGKWMVAVGGCRCQPGYQPARGDKACQACPRGLYKASAGNAPCSPCPARSHAPNPAAPVCPCLEGFYRASSDPPEAPCTGPPSAPQELWFEVQGSALMLHWRLPRELGGRGDLLFNVVCKECEGRQEPASGGGGTCHRCRDEVHFDPRQRGLTESRVLVGGLRAHVPYILEVQAVNGVSELSPDPPQAAAINVSTSHEGELFSLAFRIPCLRSFEPPSLLLISSLVHPCRPPLKADPAPRDSYPHNNFPFAL

SEQ ID NO: 41446 - protein, 312 aa, Homo sapiens
MHPHHQETLKKNRVVLAKQLLLSELLEHLLEKDIITLEMRELIQAKVGSFSQNVELLNLLPKRGPQAFDAFCEALRETKQGHLEDMLLTTLSGLQHVLPPLSCDYDLSLPFPVCESCPLYKKLRLSTDTVEHSLDNKDGPVCLQVKPCTPEFYQTHFQLAYRLQSRPRGLALVLSNVHFTGEKELEFRSGGDVDHSTLVTLFKLLGYDVHVLCDQTAQEMQEKLQNFAQLPAHRVTDSCIVALLSHGVEGAIYGVDGKLLQLQEVFQLFDNANCPSLQNKPKMFFIQACRGGAIGSLGHLLLFTAATASLAL

SEQ ID NO: 41447 - protein, 605 aa, Homo sapiens
MPFQFPPFPDRAPVFPDRMMREPQLPTAEISLWTVVAAIQAVERKVDAQASQLLNLEGRTGTAEKKLADCEKTAVEFGNHMESKWAVLGTLLQEYGLLQRRLENLENLLRNRNFWVLRLPPGSKGEAPKVPVTFVDIAVYFSEDEWKNLDEWQKELYNNLVKENYKTLMSLDAEGSVPKPDAPVQAEPREEPCVWEQRHPEEREIPMDPEAGAEPLVPAQDASSQVKREDTLCVRGQRGLEERAIPTESITDSPISAQDLLSRIKQEEHQCVWDQQDLADRDIPTDPNSESLISAHDILSWIKQEEQPYPWGPRDSMDGELGLDSGPSDSLLMVKNPPPAPPQPQPQPQPPQPQLQSQPQPQSLPPIAVAENPGGPPSRGLLDDGFQVLPGERGSGEAPPGGDRSTGGGGGDGGGGGGGAEAGTGAGGGCGSCCPGGLRRSLLLHGARSKPYSCPECGKSFGVRKSLIIHHRSHTKERPYECAECEKSFNCHSGLIRHQMTHRGERPYKCSECEKTYSRKEHLQNHQRLHTGERPFQCALCGKSFIRKQNLLKHQRIHTGERPYTCGECGKSFRYKESLKDHLRVHSGGPGPGAPRQLPPPPERD

SEQ ID NO: 41448 - protein, 347 aa, Homo sapiens
MAADEVAGGARKATKSKLFEFLVHGVRPGMPSGARMPHQGAPMGPPGSPYMGSPAVRPGLAPAGMEPARKRAAPPPGQSQAQSQGQPVPTAPARSRSAKRRKMADKILPQRIRELVPESQAYMDLLAFERKLDQTIMRKRVDIQEALKRPMKQKRKLRLYISNTFNPAKPDAEDSDGSIASWELRVEGKLLDDPSKQKRKFSSFFKSLVIELDKDLYGPDNHLVEWHRTPTTQETDGFQVKRPGDLSVRCTLLLMLDYQPPQFKLDPRLARLLGLHTQSRSAIVQALWQYVKTNRLQDSHDKEYINGDKYFQQVTSLLNPGIWGAGGVLQQGKYLYQGNYHPSLLDS

SEQ ID NO: 41449 - protein, 564 aa, Homo sapiens [sequence omitted]

SEQ ID NO: 41450 - protein, 509 aa, Homo sapiens
MIFNERDQELRDLGYQKHAFNMLISDRLGYHRDVPDTRNAACKEKFYPPDLPAASVVICFYNEAFSALLRTVHSVIDRTPAHLLHEIILVDDDSDFDDLKGELDEYVQKYLPGKIKVIRNTKREGLIRGRMIGAAHATGEVLVFLDSHCEVNVMWLQPLLAAIREDRHTVVCPVIDIISADTLAYSSSPVVRGGFNWGLHFKWDLVPLSELGRAEGATAPIKSPTMAGGLFAMNRQYFHELGQYDSGMDIWGGENLEISFRIWMCGGKLFIIPCSRVGHIFRKRRPYGSPEGQDTMTHNSLRLAHVWLDEYKEQYFSLRPDLKTKSYGNISERVELRKKLGCKSFKWYLDNVYPEMQISGSHAKPQQPIFVNRGPKRPKVLQRGRLYHLQTNKCLVAQGRPSQKGGLVVLKACDYSDPNQIWIYNEEHELVLNSLLCLDMSETRSSDPPRLMKCHGSGGSQQWTFGKNNRLYQVSVGQCLRAVDPLGQKGSVAMAICDGSSSQQWHLEG

SEQ ID NO: 41451 - protein, 27 aa, Homo sapiens
MKIHLCMVIFLNFMAQKEQEKQKCFIT

SEQ ID NO: 41452 - protein, 289 aa, Homo sapiens
MFESFNVPGLYIAVQAVLALAASWTSRQVGERTLTGIVIDSGDGVTHVIPVAEGYVIGSCIKHIPIAGRDITYFIQQLLREREVGIPPEQSLETAKAIKEKYCYICPDIVKEFAKYDVDPRKWIKQYTGINAINQKKFVIDVGYERFLGPEIFFHPEFANPDFMESISDVVDEVIQNCPIDVRRPLYKNVVLSGGSTMFRDFGRRLQRDLKRVVDARLRLSEELSGGRIKPKPVEVQVVTHHMQRYAVWFGGSMLASTPEFFQVCHTKKDYEEYGPSICRHNPVFGVMS

SEQ ID NO: 41453 - protein, 105 aa, Homo sapiens
MSGEVSWMQAVCAGTRAPATDEVAGVHRSLLRSSRGFQGRLTRFLGRRFMTAEFLLEDPSSGSLIPQESSWKTRACEGSAAAPRQPDSQPRTAGVDMHGSLDAIS

SEQ ID NO: 41454 - protein, 839 aa, Homo sapiens
MKRRGGRGPRRGPAGGGEKALKRLKLAVEEFVHATSEGEAPGGCEGRGAPVSFRPGGRKSRKELRKEKRHLRKARRLQRTAGPEQGPGLGGRSGAEEASGHRQDTEERARPAPSRDPSPPRKPRPSRVKAKATAATAKTRPSAAATAAARKRALLAANEEEDREIRKLERCLGLNKRKKKDGSSSVPLSFARDGLDYILGALESGKNSGLYDSSGEEEEDAGQTLPESDLESDSQDESEEEEEGDVEKEKKAQEAEAQSEDDDEDTEEEQGEEKEKGAQEKRRGKRVRFAEDEEKSENSSEDGDITDKSLCGSGEKYIPPHVRQAEETVDFKKKEELERLKKHVKGLLNRLSEPNMASISGQLEELYMAHSRKDMNDTLTSALMGACVTASAMPSRLMMEHVLLVSILHHTVGIEVGAHFLEAVVRKFDAIYKYGSEGKECDNLFTVIAHLYNFHVVQSLLIFDILKKLIGTFTEKDIELILLMLKNVGFSLRKDDALSLKELITEAQTKASGAGSEFQDQTRIRFMLETMLALKNNDMRKIPGYDPEPVEKLRKLQRALVRNAGSGSETQLRVSWDSVLSAEQTGRWWIVGSAWSGAPMIDNSHHTHLQKQLVGTVSSKILELARKQRMNTDIRRNIFCTIMTSEDFLDAFEKLLKLGLKDQQEREIIHVLMDCCLQEKTYNPFYAFLASKFCEYERRFQMTFQFSIWDKFRDLENLPATNFSNLVHLVAHLLKTKSLSLSILKVVEFSELDKPRVRFLRKVLSILLMETEVEDLSLIFTRVSDNPKLGVLREGLKLFISHFLLKNAQAHRSADEANVLREKADLATKCLQGKASLRM

SEQ ID NO: 41455 - protein, 291 aa, Homo sapiens
MEWSSRRSIFRMNGDKFRKFIKAPPRNYSMIVMFTALQPQRQCSVCRQANEEYQILANSWRYSSAFCNKLFFSMVDYDEGTDVFQQLNMNSAPTFMHFPPKGRPKRADTFDLQRIGFAAEQLAKWIADRTDVHIRVFRPPNYSGTIALALLVSLVGGLLYLRRNNLEFIYNKTGWAMVSLCIVFAMTSGQMWNHIRGPPYAHKNPHNGQVSYIHGSSQAQFVAESHIILVLNAAITMGMVLLNEAATSKGDVGKRRIICLVGLGLVVFFFSFLLSIFRSKYHGYPYSFLIK

SEQ ID NO: 41456 - protein, 2013 aa, Homo sapiens
MNDQDLPNWSNENVDDRLNNMDWGAQQKKANRSSEKNKKKFGVESDKRVTNDISPESSPGVGRRRTKTPHTFPHSRYMSQMSVPEQAELEKLKQRINFSDLDQRSIGSDSQGRATAANNKRQLSENRKPFNFLPMQINTNKSKDASTNPPNRETIGSAQCKELFASALSNDLLQNCQVSEEDGRGEPAMESSQIVSRLVQIRDYITKASSMREDLVEKNERSANVERLTHLIDHLKEQEKSYMKFLKKILARDPQQEPMEEIENLKKQHDLLKRMLQQQEQLRALQGRQAALLALQHKAEQAIAVMDDSVVAETAGSLSGVSITSELNEELNDLIQRFHNQLRDSQPPAVPDNRRQAESLSLTREVSQSRKPSASERLPDEKVELFSKMRVLQEKKQKMDKLLGELHTLRDQHLNNSSSSPQRSVDQRSTSAPSASVGLAPVVNGESNSLTSSVPYPTASLVSQNESENEGHLNPSEKLQKLNEVRKRLNELRELVHYYEQTSDMMTDAVNENRKDEETEESEYDSEHENSEPVTNIRNPQVASTWNEVNSHSNAQCVSNNRDGRTVNSNCEINNRSAANIRALNMPPSLDCRYNREGEQEIHVAQGEDDEEEEEEAEEEGVSGASLSSHRSSLVDEHPEDAEFEQKINRLMAAKQKLRQLQDLVAMVQDDDAAQGVISASASNLDDFYPAEEDTKQNSNNTRGNANKTQKDTGVNEKAREKFYEAKLQQQQRELKQLQEERKKLIDIQEKIQALQTACPDLQLSAASVGNCPTKKYMPAVTSTPTVNQHETSTSKSVFEPEDSSIVDNELWSEMRRHEMLREELRQRRKQLEALMAEHQRRQGLAETASPVAVSLRSDGSENLCTPQQSRTEKTMATWGGSTQCALDEEGDEDGYLSEGIVRTDEEEEEEQDASSNDNFSVCPSNSVNHNSYNGKETKNRWKNNCPFSADENYRPLAKTRQQNISMQRQENLRWVSELSYVEEKEQWQEQINQLKKQLDFSVSICQTLMQDQQTLSCLLQTLLTGPYSVMPSNVASPQVHFIMHQLNQCYTQLTWQQNNVQRLKQMLNELMRQQNQHPEKPGGKERGSSASHPPSPSLFCPFSFPTQPVNLFNIPGFTNFSSFAPGMNFSPLFPSNFGDFSQNISTPSEQQQPLAQNSSGKTEYMAFPKPFESSSSIGAEKPRNKKLPEEEVESSRTPWLYEQEGEVEKPFIKTGFSVSVEKSTSSNRKNQLDTNGRRRQFDEESLESFSSMPDPVDPTTVTKTFKTRKASAQASLASKDKTPKSKSKKRNSTQLKSRVKNIRYESASMSSTCEPCKSRNRHSAQTEEPVQAKVFSRKNHEQLEKIIKCNRSTEISSETGSDFSMFEALRDTIYSEVATLISQNESRPHFLIELFHELQLLNTDYLRQRALYALQDIVSRHISESHEKGENVKSVNSGTWIASNSELTPSESLATTDDETFEKNFERETHKISEQNDADNASVLSVSSNFEPFATDDLGNTVIHLDQALARMREYERMKTEAESNSNMRCTCRIIEDGDGAGAGTTVNNLEETPVIENRSSQQPVSEVSTIPCPRIDTQQLDRQIKAIMKEVIPFLKEHMDEVCSSQLLTSVRRMVLTLTQQNDESKEFVKFFHKQLGSILQDSLAKFAGRKLKDCGEDLLVEISEVLFNELAFFKLMQDLDNNSITVKQRCKRKIEATGVIQSCAKEAKRILEDHGSPAGEIDDEDKDKDETETVKQTQTSEVYDGPKNVRSDISDQEEDEESEGCPVSINLSKAETQALTNYGSGEDENEDEEMEEFEEGPVDVQTSLQANTEATEENEHDEQVLQRDFKKTAESKNVPLEREATSKNDQNNCPVKPCYLNILEDEQPLNSAAHKESPPTVDSTQQPNPLPLRLPEMEPLVPRVKEVKSAQETPESSLAGSPDTESPVLVNDYEAESGNISQKSDEEDFVKVEDLPLKLTIYSEADLRKKMVEEEQKNHLSGEICEMQTEELAGNSETLKEPETVGAQSI

SEQ ID NO: 41457 - protein, 1849 aa, Homo sapiens
MNDQDLPNWSNENVDDRLNNMDWGAQQKKANRSSEKNKKKFGVESDKRVTNDISPESSPGVGRRRTKTPHTFPHSRYMSQMSVPEQAELEKLKQRINFSDLDQRSIGSDSQGRATAANNKRQLSENRKPFNFLPMQINTNKSKDASTNPPNRETIGSAQCKELFASALSNDLLQNCQVSEEDGRGEPAMESSQIVSRLVQIRDYITKASSMREDLVEKNERSANVERLTHLIDHLKEQEKSYMKFLKKILARDPQQEPMEEIENLKKQHDLLKRMLQQQEQLRALQGRQAALLALQHKAEQAIAVMDDSVVAETAGSLSGVSITSELNEELNDLIQRFHNQLRDSQPPAVPDNRRQAESLSLTREVSQSRKPSASERLPDEKVELFSKMRVLQEKKQKMDKLLGELHTLRDQHLNNSSSSPQRSVDQRSTSAPSASVGLAPVVNGESNSLTSSVPYPTASLVSQNESENEGHLNPSEKLQKLNEVRKRLNELRELVHYYEQTSDMMTDAVNENRKDEETEESEYDSEHENSEPVTNIRNPQVASTWNEVNSHSNAQCVSNNRDGRTVNSNCEINNRSAANIRALNMPPSLADCRYNREGEQEIHVAQGEDDEEEEEEAEEEGVSGASLSSHRSSLVDEHPEDAEFEQKINRLMAAKQKLRQLQDLVAMVQDDDAAQGVISASASNLDDFYPAEEDTKQNSNNTRGNANKTQKDTGVNEKAREKFYEAKLQQQQRELKQLQEERKKLIDIQEKIQALQTACPDLQLSAASVGNCPTKKYMPAVTSTPTVNQHETSTSKSVFEPEDSSIVDNELWSEMRRHEMLREELRQRRKQLEALMAEHQRRQGLAETASPVAVSLRSDGSENLCTPQQSRTEKTMATWGGSTQCALDEEGDEDGYLSEGIVRTDEEEEEEQDASSNDNFSVCPSNSVNHNSYNGKETKNRWKNNCPFSADENYRPLAKTRQQNISMQRQENLRWVSELSYVEEKEQWQEQINQLKKQLDFSVSICQTLMQDQQTLSCLLQTLLTGPYSVMPSNVASPQVHFIMHQLNQCYTQLTWQQNNVQRLKQMLNELMRQQNQHPEKPGGKERGSSASHPPSPSLFCPFSFPTQPVNLFNIPGFTNFSSFAPGMNFSPLFPSNFGDFSQNISTPSEQQQPLAQNSSGKTEYMAFPKPFESSSSIGAEKPRNKKLPEEEVESSRTPWLYEQEGEVEKPFIKTGFSVSVEKSTSSNRKNQLDTNGRRRQFDEESLESFSSMPDPVDPTTVTKTFKTRKASAQASLASKDKTPKSKSKKRNSTQLKSRVKNIKTGSDFSMFEALRDTIYSEVATLISQNESRPHFLIELFHELQLLNTDYLRQRALYALQDIVSRHISESHEKGENVKSVNSGTWIASNSELTPSESLATTDDETFEKNFERETHKISEQNDADNASVLSVSSNFEPFATDDLGNTVIHLDQALARMREYERMKTEAESNSNMRCTCRIIEDGDGAGAGTTVNNLEETPVIENRSSQQPVSEVSTIPCPRIDTQQLDRQIKAIMKEVIPFLKEHMDEVCSSQLLTSVRRMVLTLTQQNDESKEFVKFFHKQLGSILQDSLAKFAGRKLKDCGEDLLVEISEVLFNELAFFKLMQDLDNNSITVKQRCKRKIEATGVIQSCAKEAKRILEDHGSPAGEIDDEDKDKDETETVKQTQTSEVYDGPKNVRSDISDQEEDEESEGCPVSINLSKAETQALTNYGSGEDENEDEEMEEFEEGPVDVQTSLQANTEATEENEHDEQEAESGNISQKSDEEDFVKVEDLPLKLTIYSEADLRKKMVEEEQKNHLSGEICEMQTEELAGNSETLKEPETVGAQSI

SEQ ID NO: 41458 - protein, 2005 aa, Homo sapiens
MNDQDLPNWSNENVDDRLNNMDWGAQQKKANRSSEKNKKKFGVESDKRVTNDISPESSPGVGRRRTKTPHTFPHSRYMSQMSVPEQAELEKLKQRINFSDLDQRSIGSDSQGRATAANNKRQLSENRKPFNFLPMQINTNKSKDASTNPPNRETIGSAQCKELFASALSNDLLQNCQVSEEDGRGEPAMESSQIVSRLVQIRDYITKASSMREDLVEKNERSANVERLTHLIDHLKEQEKSYMKFLKKILARDPQQEPMEEIENLKKQHDLLKRMLQQQEQLRALQGRQAALLALQHKAEQAIAVMDDSVVAETAGSLSGVSITSELNEELNDLIQRFHNQLRDSQPPAVPDNRRQAESLSLTREVSQSRKPSASERLPDEKVELFSKMRVLQEKKQKMDKLLGELHTLRDQHLNNSSSSPQRSVDQRSTSAPSASVGLAPVVNGESNSLTSSVPYPTASLVSQNESENEGHLNPSEKLQKLNEVRKRLNELRELVHYYEQTSDMMTDAVNENRKDEETEESEYDSEHENSEPVTNIRNPQVASTWNEVNSHSNAQCVSNNRDGRTVNSNCEINNRSAANIRALNMPPSLDCRYNREGEQEIHVAQGEDDEEEEEEAEEEGVSGASLSSHRSSLVDEHPEDAEFEQKINRLMAAKQKLRQLQDLVAMVQDDDAAQGVISASASNLDDFYPAEEDTKQNSNNTRGNANKTQKDTGVNEKAREKFYEAKLQQQQRELKQLQEERKKLIDIQEKIQALQTACPDLQLSAASVGNCPTKKYMPAVTSTPTVNQHETSTSKSVFEPEDSSIVDNELWSEMRRHEMLREELRQRRKQLEALMAEHQRRQGLAETASPVAVSLRSDGSENLCTPQQSRTEKTMATWGGSTQCALDEEGDEDGYLSEGIVRTDEEEEEEQDASSNDNFSVCPSNSVNHNSYNGKETKNRWKNNCPFSADENYRPLAKTRQQNISMQRQENLRWVSELSYVEEKEQWQEQINQLKKQLDFSVSICQTLMQDQQTLSCLLQTLLTGPYSVMPSNVASPQVHFIMHQLNQCYTQLTWQQNNVQRLKQMLNELMRQQNQHPEKPGGKERGSSASHPPSPSLFCPFSFPTQPVNLFNIPGFTNFSSFAPGMNFSPLFPSNFGDFSQNISTPSEQQQPLAQNSSGKTEYMAFPKPFESSSSIGAEKPRNKKLPEEEVESSRTPWLYEQEGEVEKPFIKTGFSVSVEKSTSSNRKNQLDTNGRRRQFDEESLESFSSMPDPVDPTTVTKTFKTRKASAQASLASKDKTPKSKSKKRNSTQLKSRVKNIRYESASMSSTCEPCKSRNRHSAQTEEPVQAKVFSRKNHEQLEKIIKCNRSTEISSETGSDFSMFEALRDTIYSEVATLISQNESRPHFLIELFHELQLLNTDYLRQRALYALQDIVSRHISESHEKGENVKSVNSGTWIASNSELTPSESLATTDDETFEKNFERETHKISEQNDADNASVLSVSSNFEPFATDDLGNTVIHLDQALARMREYERMKTEAESNSNMRCTCRIIEDGDGAGAETPVIENRSSQQPVSEVSTIPCPRIDTQQLDRQIKAIMKEVIPFLKEHMDEVCSSQLLTSVRRMVLTLTQQNDESKEFVKFFHKQLGSILQDSLAKFAGRKLKDCGEDLLVEISEVLFNELAFFKLMQDLDNNSITVKQRCKRKIEATGVIQSCAKEAKRILEDHGSPAGEIDDEDKDKDETETVKQTQTSEVYDGPKNVRSDISDQEEDEESEGCPVSINLSKAETQALTNYGSGEDENEDEEMEEFEEGPVDVQTSLQANTEATEENEHDEQVLQRDFKKTAESKNVPLEREATSKNDQNNCPVKPCYLNILEDEQPLNSAAHKESPPTVDSTQQPNPLPLRLPEMEPLVPRVKEVKSAQETPESSLAGSPDTESPVLVNDYEAESGNISQKSDEEDFVKVEDLPLKLTIYSEADLRKKMVEEEQKNHLSGEICEMQTEELAGNSETLKEPETVGAQSI

SEQ ID NO: 41459 - protein, 151 aa, Homo sapiens
METFDCLPLAALLNQQFLCVHGGMSPEITSLDDIRKLDRFTEPPAFGPVCDLLWSDPSEDYGNEKTLEHYTHNTVRGCSYFYSYPAVCEFLQNNNLLSIIRAHEAQDAGYRMYRKSQATGFPSLITIFSAPNYLDVYNNKESATHSFDYPQ

SEQ ID NO: 41460 - protein, 5 aa, Homo sapiens
MPDLL

SEQ ID NO: 41461 - protein, 244 aa, Homo sapiens
MELFRIGGKSPDTNYLFMGDYVDRGYYSVETVTLLVALKVRYPERITILRGNHESRQITQVYGFYDECLRKYGNANVWKYFTDLFDYLPLTALVDGQIFCLHGGLSPSIDTLDHIRALDRLQEVPHEGPMCDLLWSDPDDRGGWGISPRGAGYTFGQDISETFNHANGLTLVSRAHQLVMEGYNWCHDRNVVTIFSAPNYCYRCGNQAAIMELDDTLKYSFLQFDPAPRRGEPHVTRRTPDYFL

SEQ ID NO: 41462 - protein, 536 aa, Homo sapiens
MLSAHTGHLLHPEYLQPLSSTPVSPIELDAKKSPLALLAQTCSQIGKPDPPPSSKLNSVAAAANGLGAEKDPGRSAPGAASAAAALKQLGDSPAEDKSSFKPYSKGSGGGDSRKDSGSSSVSSTSSSSSSSPGDKAGFRVPSAACPPFPPHGAPVSASSSSSSPGGSRGGSPHHSDCKNGGGVGGGELDKKDQEPKPSPEPAAVSRGGGGEPGAHGGAESGASGRKSEPPSALVGAGHVAPVSPYKPGHSVFPLPPSSIGYHGSIVGAYAGYPSQFVPGLDPSKSGLVGGQLSGGLGLPPGKPPSSSPLTGASPPSFLQGLCRDPYCLGGYHGASHLGGSSCSTCSAHDPAGPSLKAGGYPLVYPGHPLQPAALSSSAAQAALPGHPLYTYGFMLQNEPLPHSCNWVAASGPCDKRFATSEELLSHLRTHTALPGAEKLLAAYPGASGLGSAAAAAAAAASCHLHLPPPAAPGSPGSLSLRNPHTLGLSRYHPYGKSHLSTAGGLAVPSLPTAGPYYSPYALYGQRLASASALGYQ

SEQ ID NO: 41463 - protein, 706 aa, Homo sapiens
MGKTPPGPGLGPAPEPDQLLLSTLPVSLGFPRAAVAPYWTSPEKMEKKLHAVPAAKTVKFKCPSSGTPNPTLRWLKNGKEFKPDHRIGGYKVRYATWSIIMDSVVPSDKGNYTCIVENEYGSINHTYQLDVVERSPHRPILQAGLPANKTVALGSNVEFMCKVYSDPQPHIQWLKHIEVNGSKIGPDNLPYVQILKTAGVNTTDKEMEVLHLRNVSFEDAGEYTCLAGNSIGLSHHSAWLTVLEALEERPAVMTSPLYLEIIIYCTGAFLISCMVGSVIVYKMKSGTKKSDFHSQMAVHKLAKSIPLRRQVTVSADSSASMNSGVLLVRPSRLSSSGTPMLAGVSEYELPEDPRWELPRDRLVLGKPLGEGCFGQVVLAEAIGLDKDKPNRVTKVAVKMLKSDATEKDLSDLISEMEMMKMIGKHKNIINLLGACTQDGPLYVIVEYASKGNLREYLQARRPPGLEYCYNPSHNPEEQLSSKDLVSCAYQVARGMEYLASKKCIHRDLAARNVLVTEDNVMKIADFGLARDIHHIDYYKKTTNGRLPVKWMAPEALFDRIYTHQSDVWSFGVLLWEIFTLGGSPYPGVPVEELFKLLKEGHRMDKPSNCTNELYMMMRDCWHAVPSQRPTFKQLVEDLDRIVALTSNQEYLDLSMPLDQYSPSFPDTRSSTCSSGEDSVFSHEPLPEEPCLPRHPAQLANGGLKRR

SEQ ID NO: 41464 - protein, 717 aa, Homo sapiens
MERLIDPRTKSTETILHTPQKPTAKFPRTPENSAKKKLLRGGLAERLNGLQNRERSAISLWRHQCISYQKTLSGRKSGVLTVKILELHEECAMQVAMCEQLLGSPATSSSQSVAPRPGAGLKVLFTKETAGYLRGRPQDTVRIFPPWQKLIIPSGSCPVILNTYFCEKVVAKEDSEKTCEVYCPDIPLPRRSISLAQMFVIKGLTNNSPEIQVVCSGVATTGTAWTHGHKEAKQRIPTSTPLRDSLLDVVESQGAASWPGAGVRVVVQRVYSLPSRDSTRGQQGASSGHTDPAGTRACLLVQDACGMFGEVHLEFTMSKARQLEGKSCSLVGMKVLQKVTRGRTAGIFSLIDTLWPPAIPLKTPGRDQPCEEIKTHLPPPALCYILTAHPNLGQIDIIDEDPIYKLYQPPVTRCLRDILQMNDLGTRCSFYATVIYQKPQLKSLLLLEQREIWLLVTDVTLQTKEERDPRLPKTLLVYVAPLCVLGSEVLEALAGAAPHSLFFKDALRDQGRIVCAERTVLLLQKPLLSVVSGASSCELPGPVMLDSLDSATPVNSICSVQGTVVGVDESTAFSWPVCDMCGNGRLEQRPEDRGAFSCGDCSRVVTSPVLKRHLQVFLDCRSRPQCRVKVKVGARPEHARTPSSLQHSEELRSEECPRKGSGVVKLFCPVRNRPPDQLHWIGGNRASECRRGLCRTLAVAAGSVNFAMWLQGWWWWW

SEQ ID NO: 41465 - protein, 1346 aa, Homo sapiens
MLEALDGFFFVVNLEGNVVFVSENVTQYLRYNQEELMNKSVYSILHVGDHTEFVKNLLPKSIVNGGSWSGEPPRRNSHTFNCRMLVKPLPDSEEEGHDNQEAHQKYETMQCFAVSQPKSIKEEGEDLQSCLICVARRVPMKERPVLPSSESFTTRQDLQGKITSLDTSTMRAAMKPGWEDLVRRCIQKFHAQHEGESVSYAKRHHHEVLRQGLAFSQIYRFSLSDGTLVAAQTKSKLIRSQTTNEPQLVISLHMLHREQNVCVMNPDLTGQTMGKPLNPISSNSPAHQALCSGNPGQDMTLSSNINFPINGPKEQMGMPMGRFGGSGGMNHVSGMQATTPQGSNYALKMNSPSQSSPGMNPGQPTSMLSPRHRMSPGVAGSPRIPPSQFSPAGSLHSPVGVCSSTGNSHSYTNSSLNALQALSEGHGVSLGSSLASPDLKMGNLQNSPVNMNPPPLSKMGSLDSKDCFGLYGEPSEGTTGQAESSCHPGEQKETNDPNLPPAVSSERADGQSRLHDSKGQTKLLQLLTTKSDQMEPSPLASSLSDTNKDSTGSLPGSGSTHGTSLKEKHKILHRLLQDSSSPVDLAKLTAEATGKDLSQESSSTAPGSEVTIKQEPVSPKKKENALLRYLLDKDDTKDIGLPEITPKLERLDSKTDPASNTKLIAMKTEKEEMSFEPGDQPGSELDNLEEILDDLQNSQLPQLFPDTRPGAPAGSVDKQAIINDLMQLTAENSPVTPVGAQKTALRISQSTFNNPRPGQLGRLLPNQNLPLDITLQSPTGAGPFPPIRNSSPYSVIPQPGMMGNQGMIGNQGNLGNSSTGMIGNSASRPTMPSGEWAPQSSAVRVTCAATTSAMNRPVQGGMIRNPAASIPMRPSSQPGQRQTLQSQVMNIGPSELEMNMGGPQYSQQQAPPNQTAPWPESILPIDQASFASQNRQPFGSSPDDLLCPHPAAESPSDEGALLDQLYLALRNFDGLEEIDRALGIPELVSQSQAVDPEQFSSQDSNIMLEQKAPVFPQQYASQAQMAQGSYSPMQDPNFHTMGQRPSYATLRMQPRPGLRPTGLVQNQPNQLRLQLQHRLQAQQNRQPLMNQISNVSNVNLTLRPGVPTQAPINAQMLAQRQREILNQHLRQRQMHQQQQVQQRTLMMRGQGLNMTPSMVAPSGMPATMSNPRIPQANAQQFPFPPNYGISQQPDPGFTGATTPQSPLMSPRMAHTQSPMMQQSQANPAYQAPSDINGWAQGNMGGNSMFSQQSPPHFGQQANTSMYSNNMNINVSMATNTGGMSSMNQMTGQISMTSVTSVPTSGLSSMGPEQVNDPALRGGNLFPNQLPGMDMIKQEGDTTRKYC

SEQ ID NO: 41466 - protein, 127 aa, Homo sapiens
MEASRHKVISGTTLGYLSPKDMNQPSSSFFSISPTSNSSATIARELLMNGTSSTAEAIGLKGSSPTPPCSPVQPSKQLEYLARIQGFQVHYCDRQSGKECVTCLTLAPVQMTFHAIGSSIEASHDQV

SEQ ID NO: 41467 - protein, 86 aa, Homo sapiens
MPRSLRRAQAVSRARWSGTRSFYRRWSPYRRKYQKGTRVRLRLLDLELTSRFLGATTDTTVLEANAVLLGIQESKDSRSKEEHHEK

SEQ ID NO: 41468 - protein, 866 aa, Homo sapiens
MNRRTLAFRGGGLVTASGGGSTNNNAGGEASAWPPQPQPRQPPPPAPPALQPPNGRGADEEVELEGLEPQDLEASAGPAAGAAEEAKELLLPQDAGGPTSLGGGAGGPLLAERNRRTLAFRGGGGGGLGNNGSSRGRPETSVWPLRHFNGRGPATVDLELDALEGKELMQDGASLSDSTEDEEEGASLGDGSGAEGGSCSSSRRSGGDGGDEVEGSGVGAGEGETVQHFPLARPKSLMQKLQCSFQTSWLKDFPWLRYSKDTGLMSCGWCQKTPADGGSVDLPPVGHDELSRGTRNYKKTLLLRHHVSTEHKLHEANAQESEIPSEEGYCDFNSRPNENSYCYQLLRQLNEQRKKGILCDVSIVVSGKIFKAHKNILVAGSRFFKTLYCFSNKESPNQNNTTHLDIAAVQGFSVILDFLYSGNLVLTSQNAIEVMTVASYLQMSEVVQTCRNFIKDALNISIKSEAPESVVVDYNNRKPVNRDGLSSSRDQKIASFWATRNLTNLASNVKIENDGCNVDEGQIENYQMNDSSWVQDGSPEMAENESEGQTKVFIWNNMGSQGIQETGKTRRKNQTTKRFIYNIPPNNETNLEDCSVMQPPVAYPEENTLLIKEEPDLDGALLSGPDGDRNVNANLLAEAGTSQDGGDAGTSHDFKYGLMPGPSNDFKYGLIPGTSNDFKYGLIPGASNDFKYGLLPESWPKQETWENGESSLIMNKLKCPHCSYVAKYRRTLKRHLLIHTGVRSFSCDICGKLFTRREHVKRHSLVHKKDKKYKCMVCKKIFMLAASVGIRHGSRRYGVCVDCADKSQPGGQEGVDQGQDTEFPRDEEYEENEVGEADEELVDDGEDQNDPSRWDESGEVCMSLDD

SEQ ID NO: 41469 - protein, 270 aa, Homo sapiens
MGNPGTFKRGLLLSALSYLGFETYQVISQAAVVHATAKVEEILEQADYLYESGETEKLYQLLTQYKESEDAELLWRLARASRDVAQLSRTSEEEKKLLVYEALEYAKRALEKNESSFASHKWYAICLSDVGDYEGIKAKIANAYIIKEHFEKAIELNPKDATSIHLMGIWCYTFAEMPWYQRRIAKMLFATPPSSTYEKALGYFHRAEQVDPNFYSKNLLLLGKTYLKLHNKKLAAFWLMKAKDYPAHTEEDKQIQTEAAQLLTSFSEKN

SEQ ID NO: 41470 - protein, 35 aa, Homo sapiens
MGIWCYTFAEMPWYQRRIAKMLFATPPSSTYEKVV

SEQ ID NO: 41471 - protein, 37 aa, Homo sapiens
MIKRVLLERLENTRKLRELTEGRTLDWPQNRITEGHY

SEQ ID NO: 41472 - protein, 98 aa, Homo sapiens
MAGKQAVSASGKWLDGIRKWYYNAAGFNKLGLMRDDTIYEDEDVKEAIRRLPENLYNDRMFRIKRALDLNLKHQILPKEQWTKYEEVAQLYLPDSVAH

SEQ ID NO: 41473 - protein, 807 aa, Homo sapiens
MSLHRQMGSDRDLQSSASSVSLPSVKKAPKKRRISIGSLFRRKKDNKRKSRELNGGVDGIASIESIHSEMCTDKNSIFSTNTSSDNGLTSISKQIGDFIECPLCLLRHSKDRFPDIMTCHHRSCVDCLRQYLRIEISESRVNISCPECTERFNPHDIRLILSDDVLMEKYEEFMLRRWLVADPDCRWCPAPDCGYAVIAFGCASCPKLTCGREGCGTEFCYHCKQIWHPNQTCDAARQERAQSLRLRTIRSSSISYSQESGAAADDIKPCPRCAAYIIKMNDGSCNHMTCAVCGCEFCWLCMKEISDLHYLSPSGCTFWGKKPWSRKKKILWQLGTLVGAPVGIALIAGIAIPAMIIGIPVYVGRKIHNRYEGKDVSKHKRNLAIAGGVTLSVIVSPVVAAVTVGIGVPIMLAYVYGVVPISLCRSGGCGVSAGNGKGVRIEFDDENDINVGGTNTAVDTTSVAEARHNPSIGEGSVGGLTGSLSASGSHMDRIGAIRDNLSETASTMALAGASITGSLSGSAMVNCFNRLEVQADVQKERYSLSGESGTVSLGTVSDNASTKAMAGSILNSYIPLDKEGNSMEVQVDIESKPSKFRHNSGSSSVDDGSATRSHAGGSSSGLPEGKSSATKWSKEATAGKKSKSGKLRKKGNMKINETREDMDAQLLEQQSTNSSEFEAPSLSDSMPSVADSHSSHFSEFSCSDLESMKTSCSHGSSDYHTRFATVNILPEVENDRLENSPHQCSISVVTQTASCSEVSQLNHIAEEHGNNGIKPNVDLYFGDALKETNNNHSHQTMELKVAIQTEI

SEQ ID NO: 41474 - protein, 785 aa, Homo sapiens
MSFQKPKGTIEYTVESRDSLNSIALKFDTTPNELVQLNKLFSRAVVTGQVLYVPDPEYVSSVESSPSLSPVSPLSPTSSEAEFDKTTNPDVHPTEATPSSTFTGIRPARVVSSTSEEEEAFTEKFLKINCKYITSGKGTVSGVLLVTPNNIMFDPHKNDPLVQENGCEEYGIMCPMEEVMSAAMYKEILDSKIKESLPIDIDQLSGRDFCHSKKMTGSNTEEIDSRIRDAGNDSASTAPRSTEESLSEDVFTESELSPIREELVSSDELRQDKSSGASSESVQTVNQAEVESLTVKSESTGTPGHLRSDTEHSTNEVGTLCHKTDLNNLEMAIKEDQIADNFQGISGPKEDSTSIKGNSDQDSFLHENSLHQEESQKENMPCGETAEFKQKQSVNKGKQGKEQNQDSQTEAEELRKLWKTHTMQQTKQQRENIQQVSQKEAKHKITSADGHIESSALLKEKQRHRLHKFLCLRVGKPMRKTFVSQASATMQQYAQRDKKHEYWFAVPQERTDHLYAFFIQWSPEIYAEDTGEYTREPGFIVVKKIEESETIEDSSNQAAAREWEVVSVAEYHRRIDALNTEELRTLCRRLQITTREDINSKQVATVKADLESESFRPNLSDPSELLLPDQIEKLTKHLPPRTIGYPWTLVYGTGKHGTSLKTLYRTMTGLDTPVLMVIKDSDGQVFGALASEPLKVSDGFYGTGETFVFTFCPEFEVFKWTGDNMFFIKGDMDSLAFGGGGGEFALWLDGDLYHGRSHSCKTFGNRTLSKKEDFFIQDIEIWAFE

SEQ ID NO: 41475 - protein, 647 aa, Homo sapiens
MESCFDFTLCKKNGFKVYVYPQQKGEKIAESYQNILAAIEGSRFYTSDPSQACLFVLSLDTLDRDQLSPQYVHNLRSKVQSLHLWNNGRNHLIFNLYSGTWPDYTEDVGFDIGQAMLAKASISTENFRPNFDVSIPLFSKDHPRTGGERGFLKFNTIPPLRKYMLVFKGKRYLTGIGSDTRNALYHVHNGEDVVLLTTCKHGKDWQKHKDSRCDRDNTEYEKYDYREMLHNATFCLVPRGRRLGSFRFLEALQAACVPVMLSNGWELPFSEVINWNQAAVIGDERLLLQIPSTIRSIHQDKILALRQQTQFLWEAYFSSVEKIVLTTLEIIQDRIFKHISRNSLIWNKHPGGLFVLPQYSSYLGDFPYYYANLGLKPPSKFTAVIHAVTPLVSQSQPVLKLLVAAAKSQYCAQIIVLWNCDKPLPAKHRWPATAVPVVVIEGESKVMSSRFLPYDNIITDAVLSLDEDTVLSTTEVDFAFTVWQSFPERIVGYPARSHFWDNSKERWGYTSKWTNDYSMVLTGAAIYHKYYHYLYSHYLPASLKNMVDQLANCEDILMNFLVSAVTKLPPIKVTQKKQYKETMMGQTSRASRWADPDHFAQRQSCMNTFASWFGYMPLIHSQMRLDPVLFKDQVSILRKKYRDIERL

SEQ ID NO: 41476 - protein, 20 aa, Homo sapiens
MPRIPLGSREAKLRGTASCR

SEQ ID NO: 41477 - protein, 288 aa, Homo sapiens [sequence omitted]

SEQ ID NO: 41478 - protein, 44 aa, Homo sapiens
MGISCCQSFLCNFSAADGGLRASVTLLGAGLLLSLLPALLRFGP

SEQ ID NO: 41479 - protein, 176 aa, Homo sapiens
MDGQIQGSVELAAPGQAKIAGGAAVSDSSSTSMNVYSLSVDPNTWQTLLHERHLRQPEHKVLQQLRSRGDNVYVVTEVLQTQKEVEVTRTHKREGSGRFSLPGATCLQGEGQGHLSQKKTVTIPSGSTLAFRVAQLVIDSDLGELELGVSRAQALAEKQGGLGRATRQLGLPWAPG

SEQ ID NO: 41480 - protein, 305 aa, Homo sapiens
MLNDSGSAHSMPKYSRQFSLEHVHGSGPYSAPSPAYSSSSLYAPDAVASSGPIISDITELAPASPMASPGGSIDERPLSSSPLVRVKEEPPSPPQSPRVEEASPGRPSSVDTLLSPTALIDSILRESEPAPASVTALTDARGHTDTEGRPPSPPPTSTPEKCLSVACLDKNELSDHLDAMDSNLDNLQTMLSSHGFSVDTSALLDLFSPSVTVPDMSLPDLDSSLASVRRRAGGEGERDQRECSQYRLHPTDPRAPVSPGAPQASRGREQQPGFREAAGALHSAAAVPAGPRLRGHREQRPAGAV

SEQ ID NO: 41481 - protein, 85 aa, Homo sapiens
MRKLWLTYSSQTTAILGALLGSCCPQLQVLEVSTGINRNSIPLQLPVEALQKGCPQLQVPGALPLPPVTPSPIYSLDLAPRCCGC

SEQ ID NO: 41482 - protein, 203 aa, Homo sapiens
MCAGCFIHLLADARLKEEQATCPNCRCEISKSLCCRNLAVEKAVSELPSECGFCLRQFPRSLLERHQKEECQDRVTQCKYKRIGCPWHGPFHELTVHEAACAHPTKTGSELMEILDGMDQSHRKEMQLYNSIFSLLSFEKIGYTGEAPRRLLHATQVWVGGLAARSLGAAGSGHWALTAPDSRALDKLPVDRWTPRSRRQAGD

SEQ ID NO: 41483 - protein, 208 aa, Homo sapiens
MGSPTLPTGPAHQGVGVLRSGAPLSEARRTSYRRRLPSVWSWARRPWEPSALSTRTLHPPDPQFLVTFFSRLRPNRSGRYEAAFPFLSPCGRERNFLRCEDRPVVFTHLLTADHGPPRLSYCGGGEALAVPFEPARLLPLAANGRLYHPAPERAGGVGLVRSALAFELSACFEYGPGAPALPSHVRWQGRRLALTMDLAPLLLAARSP

SEQ ID NO: 41484 - protein, 157 aa, Homo sapiens
MKNFITCFKDPQFLVTFFSRLRPNRSGRYEAAFPFLSPCGRERNFLRCEDRPVVFTHLLTADHGPPRLSYCGGGEALAVPFEPARLLPLAANGRLYHPAPERAGGVGLVRSALAFELSACFEYGPGAPALPSHVRWQGRRLALTMDLAPLLLAARSP

SEQ ID NO: 41485 - protein, 71 aa, Homo sapiens [sequence omitted]

SEQ ID NO: 41486 - protein, 32 aa, Homo sapiens
MHSLFGDYRAQMEAEWREALRALRAGEELATG

SEQ ID NO: 41487 - protein, 1118 aa, Homo sapiens
MTSVSSDHCRGAREKPQISAAQSTQPQKQVVQATAEQMRLAQVIFDKNDSDFEAKVKQLMEVTGKNQDECIVALHDCNGDVNKAINILLEGNSDTTSWETVGCKKKNFAKENSENKENREKKSEKESSRGRGNNNRKGRGGNRGREFRGEENGIDCNQVDKPSDRGKRARGRGFGRGRGRGAGRFSTQGMGTFNPADYSDSTSTDVCGTKLVVWEAAQNGADEGTELASNTHNIAQDLSNKSSYGLKGAWKNSVEEWTTEDWTEDLSETKVFTASSAPAENHILPGQSIDLVALLQKPVPHSQASEANSFETSQQQGFGQALVFTNSQHNNQMAPGTGSSTAVNSCSPQSLSSVLGSGFGELAPPKMANITSSQILDQLKAPSLGQFTTTPSTQQNSTSHPTTTTSWDLKPPTSQSSVLSHLDFKSQPEPSPVLSQLSQRQQHQSQAVTVPPPGLESFPSQAKLRESTPGDSPSTVNKLLQLPSTTIENISVSVHQPQPKHIKLAKRRIPPASKIPASAVEMPGSADVTGLNVQFGALEFGSEPSLSEFGSAPSSENSNQIPISLYSKSLSEPLNTSLSMTSAVQNSTYTTSVITSCSLTSSSLNSASPVAMSSSYDQSSVHNRIPYQSPVSSSESAPGTIMNGHGGGRSQQTLDTPKTTGPPSALPSVSSLPSTTSCTALLPSTSQHTGDLTSSPLSQLSSSLSSHQSSLSAHAALSSSTSHTHASVESASSHQSSATFSTAATSVSSSASSGASLSSSMNTANSLCLGGTPASASSSSSRAAPLVTSGKAPPNLPQGVPPLLHNQYLVGPGGLLPAYPIYGYDELQMLQSRLPVDYYGIPFAAPTALASRDGSLANNPYPGDVTKFGRGDSASPAPATTPAQPQQSQSQTHHTAQQPFVNPALPPGYSYTGLPYYTGMPSAFQYGPTMFVPPASAKQHGVNLSTPTPPFQQASGYGQHGYSTGYDDLTQGTAAGDYSKGGYAGSSQAPNKSAGSGPGKGVSVSSSTTGLPDMTGSVYNKTQTFDKQGFHAGTPPPFSLPSVLGSTGPLASGAAPGYAPPPFLHILPAHQQPHSQLLHHHLPQDAQSGSGQRSQPSSLQPKSQASKPAYGNSPYWTN

SEQ ID NO: 41488 - protein, 322 aa, Homo sapiens
MALKYHPDKNKEPNAEEKFKEIAEAYDVLSDPKKRGLYDQYGEEGLKTGGGTSGGSSGSFHYTFHGDPHATFASFFGGSNPFDIFFASSRSTRPFSGFDPDDMDVDEDEDPFGAFGRFGFNGLSRGPRRAPEPLYPRRKVQDPPVVHELRVSLEEIYHGSTKRMKITRRRLNPDGRTVRTEDKILHIVIKRGWKEGTKITFPKEGDATPDNIPADIVFVLKDKPHAHFRRDGTNVLYSALISLKEALCGCTVNIPTIDGRVIPLPCNDVIKPGTVKRLRGEGLPFPKVPTQRGDLIVEFKVRFPDRLTPQTRQILKQHLPCS

SEQ ID NO: 41489 - protein, 926 aa, Homo sapiens [sequence omitted]

SEQ ID NO: 41490 - protein, 144 aa, Homo sapiens
MEQNPLRSEPALVPPKDEEAAVSTEEPRINLPHLLEEEVEFSTDLIDSYPGHETLWCHRRHIFYLQHHLNGSQLSQAMEVDGLNDSSKQGYSQETKRLKRTPVPDSLGLEMEHRFIDQVLSTCRNVEQARFASAYRKWLVTLSQ

SEQ ID NO: 41491 - protein, 1231 aa, Homo sapiens
MWSIGVITYILLSGASPFLGDTKQETLANVSAVNYEFEDEYFSNTSALAKDFIRRLLVKDPKKRMTIQDSLQHPWIKPKDTQQALSRKASAVNMEKFKKFAARKKWKQSVRLISLCQRLSRSFLSRSNMSVARSDDTLDEEDSFVMKAIIHAINDDNVPGLQHLLGSLSNYDVNQPNKHGTPPLLIAAGCGNIQILQLLIKRGSRIDVQDKGGSNAVYWAARHGHVDTLKFLSENKCPLDVKDKSGEMALHVAARYGHADVAQLLCSFGSNPNIQDKEEETPLHCAAWHGYYSVAKALCEAGCNVNIKNREGETPLLTASARGYHDIVECLAEHGADLNACDKDGHIALHLAVRRCQMEVIKTLLSQGCFVDYQDRHGNTPLHVACKDGNMPIVVALCEANCNLDISNKYGRTPLHLAANNGILDVVRYLCLMGASVEALTTDGKTAEDLARSEQHEHVAGLLARLRKDTHRGLFIQQLRPTQNLQPRIKLKLFGHSGSGKTTLVESLKCGLLRSFFRRRRPRLSSTNSSRFPPSPLASKPTVSVSINNLYPGCENVSVRSRSMMFEPGLTKGMLEVFVAPTHHPHCSADDQSTKAIDIQNAYLNGVGDFSVWEFSGNPVYFCCYDYFAANDPTSIHVVVFSLEEPYEIQLNQVIFWLSFLKSLVPVEEPIAFGGKLKNPLQVVLVATHADIMNVPRPAGGEFGYDKDTSLLKEIRNRFGNDLHISNKLFVLDAGASGSKDMKVLRNHLQEIRSQIVSVCPPMTHLCEKIISTLPSWRKLNGPNQLMSLQQFVYDVQDQLNPLASEEDLRRIAQQLHSTGEINIMQSETVQDVLLLDPRWLCTNVLGKLLSVETPRALHHYRGRYTVEDIQRLVPDSDVEELLQILDAMDICARDLSSGTMVDVPALIKTDNLHRSWADEEDEVMVYGGVRIVPVEHLTPFPCGIFHKVQVNLCRWIHQQSTEGDADIRLWVNGCKLANRGAELLVLLVNHGQGIEVQVRGLETEKIKCCLLLDSVCSTIENVMATTLPGLLTVKHYLSPQQLREHHEPVMIYQPRDFFRAQTLKETSLTNTMGGYKESFSSIMCFGCHDVYSQASLGMDIHASDLNLLTRRKLSRLLDPPDPLGKDWCLLAMNLGLPDLVAKYNTSNGAPKDFLPSPLHALLREWTTYPESTVGTLMSKLRELGRRDAADFLLKASSVFKINLDGNGQEAYASSCNSGTSYNSISSVVSR

SEQ ID NO: 41492 - protein, 511 aa, Homo sapiens
MYEALKEMDSNTVIERFPTIGQLLAKACWNPFILAYDESQKILIWCLCCLINKEPQNSGQSKLNSWIQGVLSHILSALRFDKEVALFTQGLGYAPIDYYPGLLKNMVLSLASELRENHLNGFNTQRRMAPERVASLSRVCVPLITLTDVDPLVEALLICHGREPQEILQPEFFEAVNEAILLKKISLPMSAVVCLWLRHLPSLEKAMLHLFEKLISSERNCLRRIECFIKDSSLPQAACHPAIFRVVDEMFRCALLETDGALEIIATIQVFTQCFVEALEKASKQLRFALKTYFPYTSPSLAMVLLQDPQDIPRGHWLQTLKHISELLREAVEDQTHGSCGGPFESWFLFIHFGGWAEMVAEQLLMSAAEPPTALLWLLAFYYGPRDGRQQRAQTMVQVKAVLGHLLAMSRSSSLSAQDLQTVAGQGTDTDLRAPAQQLIRHLLLNFLLWAPGGHTIAWDVITLMAHTAEITHEIIGFLDQTLYRWNRLGIESPRSEKLARELLKELRTQV

SEQ ID NO: 41493 - protein, 104 aa, Homo sapiens
MEETRPEGSYFSKYSEAAELRSTASLLATQESDVMVGPFKLRSRKQRTLSMIEEEIRAAQEREEELKRQRQVLQSTQSPRTKNAPSLPSRTCYKTAPGPRGHTG

SEQ ID NO: 41494 - protein, 463 aa, Homo sapiens
MLKGKSQAFLEMASEEAAVTMVNYYTPITPHLRSQPVYIQYSNHRELKTDNLPNQARAQAALQAVSAVQSGSLALSGGPSNEGTVLPGQSPVLRIIIENLFYPVTLEVLHQIFSKFGTVLKIITFTKNNQFQALLQYADPVNAHYAKMALDGQNIYNACCTLRIDFSKLTSLNVKYNNDKSRDFTRLDLPTGDGQPSLEPPMAAAFGAPGIISSPYAGAAGFAPAIGFPQATGLSVPAVPGALGPLTITSSAVTGRMAIPGASGIPGNSVLLVTNLNPDLITPHGLFILFGVYGDVHRVKIMFNKKENALVQMADANQAQLAMNHLSGQRLYGKVLRATLSKHQAVQLPREGQEDQGLTKDFSNSPLHRFKKPGSKNFQNIFPPSATLHLSNIPPSVTVDDLKNLFIEAGCSVKAFKFFQKDRKMALIQLGSVEEAIQALIELHNHDLGENHHLRVSFSKSTI

SEQ ID NO: 41495 - protein, 508 aa, Homo sapiens
MALEEGKGPGAEDSPPSKEPSPGQELPPGQDLPPNKDSPSGQEPAPSQEPLSSKDSATSEGSPPGPDAPPSKDVPPCQEPPPAQDLSPCQDLPAGQEPLPHQDPLLTKDLPAIQESPTRDLPPCQDLPPSQVSLPAKALTEDTMSSGDLLAATGDPPAAPRPAFVIPEVRLDSTYSQKAGAEQGCSGDEEDAEEAEEVEEGEEGEEDEDEDTSDDNYGERSEAKRSSMIETGQGAEGGLSLRVQNSLRRRTHSEGSLLQEPRGPCFASDTTLHCSDGEGAASTWGMPSPSTLKKELGRNGGSMHHLSLFFTGHRKMSGADTVGDDDEASRKRKSKNLAKDMKNKLGIFRRRNESPGAPPAGKADKMMKSFKPTSEEALKWGESLEKLLVHKYGLAVFQAFLRTEFSEENLEFWLACEDFKKVKSQSKMASKAKKIFAEYIAIQACKEVNLDSYTREHTKDNLQSVTRGCFDLAQKRIFGLMEKDSYPRFLRSDLYLDLINQKKMSPPL

SEQ ID NO: 41496 - protein, 325 aa, Homo sapiens
MKQLEDHEAFETSSLIGHSARVYALYYKDGLLCTGSDDLSAKLWDVSTGQCVYGIQTHTCAAVKFDEQKLVTGSFDNTVACWEWSSGARTQHFRGHTGAVFSVDYNDELDILVSGSADFTVKVWALSAGTCLNTLTGHTEWVTKVVLQKCKVKSLLHSPGDYILLSADKYEIKIWPIGREINCKCLKTLSVSEDRSICLQPRLHFDGKYIVCSSALGLYQWDFASYDILRVIKTPEIANLALLGFGDIFALLFDNRYLYIMDLRTESLISRWPLPEYRKSKRGSSFLAGEASWLNGLDGHNDTGLVFATSMPDHSIHLVLWKEHG

SEQ ID NO: 41497 - protein, 166 aa, Homo sapiens
MAYSAVPVRHFATKKAKGSLDKIAVVTADGKLALNQISQISMKSPQLILVNMASFPECTAAAIKAIRESGMNLNPEVEGTLIRVPIPQVTREHREMLVKLAKQNTNKAKDSLRKVRTNSMNKLKKSKDTVSEDTIRLIEKQISQMADDTVAELDRHLAVKTKELLG

SEQ ID NO: 41498 - protein, 180 aa, Homo sapiens
MTVVTMASARVQDLIGLICWQYTSEGREPKLNDNVSAYCLHIAEDDGEVDTDFPPLDSNEPIHKFGFSTLALVEKYSSPGLTSKESLFVRINAAHGFSLIQVDNTKVTMKEILLKAVKRRKGSQKVSGPQYRLEKQSEPNVAVDLDSTLESQSAWEFCLVRENSTLAASLHARFVRCKLA

SEQ ID NO: 41499 - protein, 39 aa, Homo sapiens
MTPEDPEETQPLLGPPGGRSTSPKSPTQQSGGCSAPVCS

SEQ ID NO: 41500 - protein, 702 aa, Homo sapiens [sequence omitted]

SEQ ID NO: 41501 - protein, 132 aa, Homo sapiens
MLGSGLGAEIDSAECVFRMNQAPTVGFEADVGQRSTLRVVSHTSVPLLLRNYSHYFQKARDTLYMVWGQGRHMDRVLGGRTYRTLLQLTRMYPGLQVYTFTERMMAYCDQIFQDETGKNRLVMRLREVHEQM

SEQ ID NO: 41502 - protein, 859 aa, Homo sapiens
MEDLIPLVNRLQDAFSAIGQNADLDLPQIAVVGGQSAGKSSVLENFVGRDFLPRGSGIVTRRPLVLQLVNATTEYAEFLHCKGKKFTDFEEVRLEIEAETDRVTGTNKGISPVPINLRVYSPHVLNLTLVDLPGMTKVPVGDQPPDIEFQIRDMLMQFVTKENCLILAVSPANSDLANSDALKVAKEVDPQGQRTIGVITKLDLMDEGTDARDVLENKLLPLRRGYIGVVNRSQKDIDGKKDITAALAAERKFFLSHPSYRHLADRMGTPYLQKVLNQQLTNHIRDTLPGLRNKLQSQLLSIEKEVEEYKNFRPDDPARKTKALLQMVQQFAVDFEKRIEGSGDQIDTYELSGGARINRIFHERFPFELVKMEFDEKELRREISYAIKNIHGIRTGLFTPDMAFETIVKKQVKKIREPCLKCVDMVISELISTVRQCTKKLQQYPRLREEMERIVTTHIREREGRTKEQVMLLIDIELAYMNTNHEDFIGFANAQQRSNQMNKKKTSGNQVIRKGWLTINNIGIMKGGSKEYWFVLTAENLSWYKDDEEKEKKYMLSVDNLKLRDVEKGFMSSKHIFALFNTEQRNVYKDYRQLELACETQEEVDSWKASFLRAGVYPERVGDKEKASETEENGSDSFMHSMDPQLERQVETIRNLVDSYMAIVNKTVRDLMPKTIMHLMINNTKEFIFSELLANLYSCGDQNTLMEESAEQAQRRDEMLRMYHALKEALSIIGDINTTTVSTPMPPPVDDSWLQVQSVPAGRRSPTSSPTPQRRAPAVPPARPGSRGPAPGPPPAGSALGGAPPVPSRPGASPDPFGPPPQVPSRPNRAPPGVPSRKGPASPTRPAAPRPAEAPLLDL

SEQ ID NO: 41503 - protein, 265 aa, Homo sapiens
MPVASVAPSASMPGSHLPPLYLDGHVFASQPRLVPQTIPQQQSYQQAAAAQQIPISLHTSLQAQAQLGLRGGLPVSQSQEIFSSLQPFRSQVYMHPSLSPPSTMILSGGTALKPPYSAFPGMQPLEMVKPQSGSPYQPMSGNQALVYEGQLSQAAGLGASQMLDSQLPQLTMPLPRYGSGQQPLILPQSIQLPPGQSLSVGAPRRIPPPGSQPPVLNTSREPSQMEMKGFHFADSKQNVPSGGPVPSPQTYRQNNEWMRNPAWEP

SEQ ID NO: 41504 - protein, 234 aa, Homo sapiens
MELLGQNEVEQRQRKVVILSQDRFYKVLTAEQKAKALKGQYNFDHPDAFDNDLMHRTLKNIVEGKTVEVPTYDFVTHSRLPETTVVYPADVVLFEGILVFYSQEIRDMFHLRLFVDTDSDVRLSRRVLRDVRRGRDLEQILTQYTTFVKPAFEEFCLPTKKYADVIIPRGVDNMVAINLIVQHIQDILNGDICKWHRGGSNGRSYKRTFSEPGDHPGMLTSGKRSHLESSSRPH

SEQ ID NO: 41505 - protein, 1082 aa, Homo sapiens
MSGKIEKADSQRSHLSSFTMKLMDKFHSPKIKRTPSKKGKPAEVSVKIPEKPVNKEATDRFLPEGYPLPLDLEQQAVEFMSTSAVASRSQRQKNLSWLEEKEKEVVSALRYFKTIVDKMAIDKKVLEMLPGSASKVLEAILPLVQNDPRIQHSSALSSCYSRVYQSLANLIRWSDQVMLEGVNSEDKEMVTTVKGVIKAVLDGVKELVRLTIEKQGRPSPTSPVKPSSPASKPDGPAELPLTDREVEILNKTTGMSQSTELLPDATDEEVAPPKPPLPGIRVVDNSPPPALPPKKRQSAPSPTRVAVVAPMSRATSGSSLPVGINRQDFDVDCYAQRRLSGGSHSYGGESPRLSPCSSIGKLSKSDEQLSSLDRDSGQCSRNTSCETLDHYDPDYEFLQQDLSNADQIPQQTAWNLSPLPESLGESGSPFLGPPFQLPLGGHPQPDGPLAPGQQTDTPPALPEKKRRSAASQTADGSGCRVSYERHPSQYDNISGEDLQSTAPIPSVPYAPFAAILPFQHGGSSAPVEFVGDFTAPESTGDPEKPPPLPEKKNKHMLAYMQLLEDYSEPQPSMFYQTPQNEHIYQQKNKLLMEVYGFSDSFSGVDSVQELAPPPALPPKQRQLEPPAGKDGHPRDPSAVSGVPGKDSRDGSERAPKSPDALESAQSEEEVDELSLIDHNEIMSRLTLKQEGDDGPDVRGGSGDILLVHATETDRKDLVLYCEAFLTTYRTFISPEELIKKLQYRYEKFSPFADTFKKRVSKNTFFVLVRVVDELCLVELTEEILKLLMELVFRLVCNGELSLARVLRKNILDKVDQKKLLRCATSSQPLAARGVAARPGTLHDFHSHEIAEQLTLLDAELFYKIEIPEVLLWAKEQNEEKSPNLTQFTEHFNNMSYWVRSIIMLQEKAQDRERLLLKFIKIMKHLRKLNNFNSYLAILSALDSAPIRRLEWQKQTSEGLAEYCTLIDSSSSFRAYRAALSEVEPPCIPYLGLILQDLTFVHLGNPDYIDGKVNFSKRWQQFNILDSMRCFQQAHYDMRRNDDIINFFNDFSDHLAEEALWELSLKIKPRNITRRKTDREEKT

SEQ ID NO: 41506 - protein, 96 aa, Homo sapiens
MGLEVFDEIVQNIVGTALMILVAIGFKTKLAALTLVVWLFAINVYFNAFWTIPVYKPMHDFLKYDFFQTMSVIGGLLLVVALGPGGVSMDEKKKEW

SEQ ID NO: 41507 - protein, 652 aa, Homo sapiens
MEASCLELALEGERLCKAGDFKTGVAFFEAAVQVGTEDLKTLSAIYSQLGNAYFYLKEHGRALEYHKHDLLLARTIGDRMGEAKASGNLGNTLKVLGRFDEAAVCCQRHLSIAQEQGDKVGEARALYNIGNVYHAKGKQLSWNAANATQDPGHLPPDVRETLCKASEFYERNLSLVKELGDRAAQGRAYGNLGNTHYLLGNFTEATTFHKERLAIAKEFGDKAAERRAYSNLGNAHVFLGRFDVAAEYYKKTLQLSRQLRDQAVEAQACYSLGNTYTLLQDYERAAEYHLRHLLIAQELADRVGEGRACWSLGNAYVSMGRPAQALTFAKKHLQISQEIGDRHGELTARMNVAQLQLVLGRLTSPAASEKPDLAGYEAQGARPKRTQRLSAETWDLLRLPLEREQNGDSHHSGDWRGPSRDSLPLPVRSRKYQEGPDAERRPREGSHSPLDSADVRVHVPRTSIPRAPSSDEECFFDLLTKFQSSRMDDQRCPLDDGQAGAAEATAAPTLEDRIAQPSMTASPQTEEFFDLIASSQSRRLDDQRASVGSLPGLRITHSNAGHLRGHGEPQEPGDDFFNMLIKYQSSRIDDQRCPPPDVLPRGPTMPDEDFFSLIQRVQAKRMDEQRVDLAGGPEQGAGGPPEPQQQCQPGAS

SEQ ID NO: 41508 - protein, 702 aa, Homo sapiens
MNQALQRRFAKGVQYNMKIVIRGDRNTGKTALWHRLQGRPFVEEYIPTQEIQVTSIHWSYKTTDDIVKVEVWDVVDKGKCKKRGDGLKMENDPQEAESEMALDAEFLDVYKNCNGVVMMFDITKQWTFNYILRELPKVPTHVPVCVLGNYRDMGEHRVILPDDVRDFIDNLDRPPGSSYFRYAESSMKNSFGLKYLHKFFNIPFLQLQRETLLRQLETNQLDMDATLEELSVQQETEDQNYGIFLEMMEARSRGHASPLAANGQSPSPGSQSPVVPAGAVSTGSSSPGTPQPAPQLPLNAAPPSSVPPVPPSEALPPPACPSAPAPRRSIISRLFGTSPATEAAPPPPEPVPAAEGPATVQSVEDFVPDDRLDRSFLEDTTPARDEKKVGAKAAQQDSDSDGEALGGNPMVAGFQDDVDLEDQPRGSPPLPAGPVPSQDITLSSEEEAEVAAPTKGPAPAPQQCSEPETKWSSIPASKPRRGTAPTRTAAPPWPGGVSVRTGPEKRSSTRPPAEMEPGKGEQASSSESDPEGPIAAQMLSFVMDDPDFESEGSDTQRRADDFPVRDDPSDVTDEDEGPAEPPPPPKLPLPAFRLKNDSDLFGLGLEEAGPKESSEEGKEGKTPSKEKKKKKKKGKEEEEKAAKKKSKHKKSKDKEEGKEERRRRQQRPPRSRERTAADELEAFLGGGAPGGRHPGGGDYEEL

SEQ ID NO: 41509 - protein, 663 aa, Homo sapiens
MYPPPPPPPHRDFISVTLSFGENYDNSKSWRRRSCWRKWKQLSRLQRNMILFLLAFLLFCGLLFYINLADHWKALAFRLEEEQKMRPEIAGLKPANPPVLPAPQKADTDPENLPEISSQKTQRHIQRGPPHLQIRPPSQDLKDGTQEEATKRQEAPVDPRPEGDPQRTVISWRGAVIEPEQGTELPSRRAEVPTKPPLPPARTQGTPVHLNYRQKGVIDVFLHAWKGYRKFAWGHDELKPVSRSFSEWFGLGLTLIDALDTMWILGLRKEFEEARKWVSKKLHFEKDVDVNLFESTIRILGGLLSAYHLSGDSLFLRKAEDFGNRLMPAFRTPSKIPYSDVNIGTGVAHPPRWTSDSTVAEVTSIQLEFRELSRLTGDKKFQEAVEKVTQHIHGLSGKKDGLVPMFINTHSGLFTHLGVFTLGARADSYYEYLLKQWIQGGKQETQLLEDYVEAIEGVRTHLLRHSEPSKLTFVGELAHGRFSAKMDHLVCFLPGTLALGVYHGLPASHMELAQELMETCYQMNRQMETGLSPEIVHFNLYPQPGRRDVEVKPADRHNLLRPETVESLFYLYRVTGDRKYQDWGWEILQSFSRFTRVPSGGYSSINNVQDPQKPEPRDKMESFFLGETLKYLFLLFSDDPNLLSLDAYVFNTEAHPLPIWTPA

SEQ ID NO: 41510 - protein, 247 aa, Homo sapiens
MAAAVVVAEGDSDSRPGQELLVAWNTVSTGLVPPAALGLVSSRTSGAVPPKEEELRAAVEVLRGHGLHSVLEEWFVEVLQNDLQANISPEFWNAISQCENSADEPQCLLLLLDAFGLLESRLDPYLRSLELLEKWTRLGLLMGTGAQGLREEVHTMLRGVLFFSTPRTFQEMIQRLYGCFLRVYMQSKRKGEGGTDPELEGELDSRYARRRYYRLLQSPLCAGCSSDKQQCWCRQALEQFHQLSQVL

SEQ ID NO: 41511 - protein, 439 aa, Homo sapiens
MPDVVQTRQQAFREKLAQQQASAAAAAAAATAAATAATTTSAGVSHQNPSKNREATVNGEENRAHSVNNHAKPMEIDGEVEIPSSKATVLRGHESEVFICAWNPVSDLLASGSGDSTARIWNLNENSNGGSTQLVLRHCIREGGHDVPSNKDVTSLDWNTNGTLLATGSYDGFARIWTEDGNLASTLGQHKGPIFALKWNRKGNYILSAGVDKTTIIWDAHTGEAKQQFPFHSAPALDVDWQNNTTFASCSTDMCIHVCRLGCDRPVKTFQGHTNEVNAIKWDPSGMLLASCSDDMTLKIWSMKQEVCIHDLQAHNKEIYTIKWSPTGPATSNPNSNIMLASASFDSTVRLWDIERGVCTHTLTKHQEPVYSVAFSPDGKYLASGSFDKCVHIWNTQSGNLVHSYRGTGGIFEVCWNARGDKVGASASDGSVCVLDLRK

SEQ ID NO: 41512 - protein, 557 aa, Homo sapiens
MTSAEKVLCQFCDQDPAQDAVKTCVTCEVSYCDECLKATHPNKKPFTGHRLIEPIPDSHIRGLMCLEHEDEKVNMYCVTDDQLICALCKLVGRHRDHQVAALSERYDKLKQNLESNLTNLIKRNTELETLLAKLIQTCQHVEVNASRQEAKLTEECDLLIEIIQQRRQIIGTKIKEGKVMRLRKLAQQIANCKQCIERSASLISQAEHSLKENDHARFLQTAKNITERVSMATASSQVLIPEINLNDTFDTFALDFSREKKLLECLDYLTAPNPPTIREELCTASYDTITVHWTSDDEFSVVSYELQYTIFTGQANVVSLCNSADSWMIVPNIKQNHYTVHGLQSGTKYIFMVKAINQAGSRSSEPGKLKTNSQPFKLDPKSAHRKLKVSHDNLTVERDESSSKKSHTPERFTSQGSYGVAGNVFIDSGRHYWEVVISGSTWYAIGLAYKSAPKHEWIGKNSASWALCRCNNNWVVRHNSKEIPIEPAPHLRRVGILLDYDNGSIAFYDALNSIHLYTFDVAFAQPVCPTFTVWNKCLTIITGLPIPDHLDCTEQLP

SEQ ID NO: 41513 - protein, 184 aa, Homo sapiens [sequence omitted]

SEQ ID NO: 41514 - protein, 1013 aa, Homo sapiens [sequence omitted]

SEQ ID NO: 41515 - protein, 808 aa, Homo sapiens [sequence omitted]

SEQ ID NO: 41516 - protein, 95 aa, Homo sapiens
MSHVAVENALGLDQQFAGLDLNSSDNQSGGSTASKGRYIPPHLRNREATKGFYDKDSSGWSSSKDKDAYSSFGSRSDSRGKSSFFSDRGSGSRGR

SEQ ID NO: 41517 - protein, 112 aa, Homo sapiens
MVEKYSVATQIVMGGVTGWCAGFLFQKVGKLAATAVGGGFLLLQIASHSGYVQIDWKRVEKDVNKAKRQIKKRANKAAPEINNLIEEATEFIKQNIVISSGFVGGFLLGLAS

SEQ ID NO: 41518 - protein, 431 aa, Homo sapiens
MKRKSREYEQLKSEWAQRANPEDLEFIRSTVLKDVLRTDRAHPYYAGPEDGPHLRALHDLLTTYAVTHPQVSYCQGMSDLASPILAVMDHEGHAFVCFCGIMKRLAANFHPDGRAMATKFAHLKLLLRHADPDFYQYLQEAGADDLFFCYRWLLLELKREFAFDDALRMLEVTWSSLPPDPPEHEVELVGPPSQVADAGFGGHRGWPVRQRHMLRPAGGGGSTFEDAVDHLATASQGPGGGGRLLRQASLDGLQQLRDNMGSRRDPLVQLPHPAALISSKSLSEPLLNSPDPLLSSFSHPDSPSSSSPPSTQEASPTGDMAVGSPLMQEVGSPKDPGKSLPPVPPMGLPPPQEFGRGNPFMLFLCLAILLEHRDHIMRNGLDYNELAMHFDRLVRKHHLGRVLRRARALFADYLQSEVWDSEEGAEATAAS

SEQ ID NO: 41519 - protein, 287 aa, Homo sapiens
MDRPDEGPPAKTRRLSSSESPQRDPPPPPPPPPLLRLPLPPPQQRPRLQEETEAAQVLADMRGVGLGPALPPPPPYVILEEGGIRAYFTLGAECPGWDSTIESGYGEAPPPTESLEALPTPEASGGSLEIDFQVVQSSSFGGEGALETCSAVGWAPQRLVDPKSKEEAIIIVEDEDEDERESMRSSRRRRRRRRRKQRKVKRESRERNAERMESILQALEDIQLDLEAVNIKAGKAFLRLKRKFIQMRRPFLERRDLIIQHIPGFWVKALHSSVPQPPQNFNFDQPT

SEQ ID NO: 41520 - protein, 1085 aa, Homo sapiens
MESKSSNQLSWLSVSMDAALGCRTNIFQIQRSGGRKHTEKHASGGSTVHIHPQAAPVVCRHVLDTLIQLAKVFPSHFTQQRTKETNCESDRERGNKACSPCSSQSSSSGICTDFWDLLVKLDNMNVSRKGKNSVKSVPVSAGGEGETSPYSLEASPLGQLMNMLSHPVIRRSSLLTEKLLRLLSLISIALPENKVSEAQANSGSGASSTTTATSTTSTTTTTAASTTPTPPTAPTPVTSAPALVAATAISTIVVAASTTVTTPTTATTTVSISPTTKGSKSPAKVSDGGSSSTDFKMVSSGLTENQLQLSVEVLTSHSCSEEGLEDAANVLLQLSRGDSGTRDTVLKLLLNGARHLGYTLCKQIGTLLAELREYNLEQQRRAQCETLSPDGLPEEQPQTTKLKGKMQSRFDMAENVVIVASQKRPLGGRELQLPSMSMLTSKTSTQKFFLRVLQVIIQLRDDTRRANKKAKQTGRLGSSGLGSASSIQAAVRQLEAEADAIIQMSESSQSEASVRREESPMDVDQPSPSAQDTQSIASDGTPQGEKEKEERPPELPLLSEQLSLDELWDMLGECLKELEESHDQHAVLVLQPAVEAFFLVHATERESKPPVRDTRESQLAHIKDEPPPLSPAPLTPATPSSLDPFFSREPSSMHISSSLPPDTQKFLRFAETHRTVLNQILRQSTTHLADGPFAVLVDYIRVLDFDVKRKYFRQELERLDEGLRKEDMAVHVRRDHVFEDSYRELHRKSPEEMKNRLYIVFEGEEGQDAGGLLREWYMIISREMFNPMYALFRTSPGDRVTYTINPSSHCNPNHLSYFKFVGRIVAKAVYDNRLLECYFTRSFYKHILGKSVRYTDMESEDYHFYQGLVYLLENDVSTLGYDLTFSTEVQEFGVCEVRDLKPNGANILVTEENKKEYVHLVCQMRMTGAIRKQLAAFLEGFYEIIPKRLISIFTEQELELLISGLPTIDIDDLKSNTEYHKYQSNSIQIQWFWRALRSFDQADRAKFLQFVTGTSKVPLQGFAALEGMNGIQKFQIHRDDRSTDRLPSAHTCFNQLDLPAYESFEKLRHMLLLAIQECSEGFGLA

SEQ ID NO: 41521 - protein, 454 aa, Homo sapiens
MVTLSSILESIINDMRDLPNTYPFHTPVNAKVVKDYYKIITRPMDLQTLRENVRKRLYPSREEFREHLELIVKNSATYNGPKHSLTQISQSMLDLCDEKLKEKEDKLARLEKAINPLLDDDDQVAFSFILDNIVTQKMMAVPDSWPFHHPVNKKFVPDYYKVIVNPMDLETIRKNISKHKYQSRESFLDDVNLILANSVKYNGPESQYTKTAQEIVNVCYQTLTEYDEHLTQLEKDICTAKEAALEEAELESLDPMTPGPYTPQPPDLYDTNTSLSMSRDASVFQDESNMSVLDIPSATPEKQVTQMRQGRGRLGEEDSDVDIEGYDDEEEDGKPKTPAPEGEDGDGDLADEEEGTVQQPQASVLYEDLLMSEGEDDEEDAGSDEEGDNPFSAIQLSESGSDSDVGSGGIRPKQPRMLQENTRMDMENEESMMSYEGDGGEASHGLEDSNIRYQ

SEQ ID NO: 41522 - protein, 130 aa, Homo sapiens
MNVTGFSLQELNPEIGTDNDSENWKEVHKMVVENAYEVNKLNGYTHWDIGLSVADLIESMLKNLSRIHLVSTMVKGMYGIENEVFLSLPYILNARGLTSVINQKLKDDEVAQFKKSTDTPWDIQKDLKDL

SEQ ID NO: 41523 - protein, 21 aa, Homo sapiens
MAGLKRRVPLHSLRYFISMAG

SEQ ID NO: 41524 - protein, 1356 aa, Homo sapiens [sequence omitted]

SEQ ID NO: 41525 - protein, 52 aa, Homo sapiens
MHQQKRQPELVEGNLPVFVFPTELIFYADDQSTHKQVLTLYNPYEFALKFKV

SEQ ID NO: 41526 - protein, 106 aa, Homo sapiens
MKALLAGPLRPAARRWRNPIPFPETFDGDTDRLPEFIVQTSSYMFVDENTFSNDALKVTFLITRLTGPALQWVIPYIRKESPLLNDYRGFLAEMKRVFGWEEDEDF

SEQ ID NO: 41527 - protein, 527 aa, Homo sapiens
MIYGLLVGLVLRYGIHVPSDVNNVTLSCEVQSSPTTLLVNVSGKFYEYMLKGEISSHELNNVQDNEMLRKVTFDPEVFFNILLPPIIFYAGYSLKRRHFFRNLGSILAYAFLGTAISCFVIGSIMYGCVTLMKVTGQLAGDFYFTDCLLFGAIVSATDPVTVLAIFHELQVDVELYALLFGESVLNDAVAIVLSSSIVAYQPAGDNSHTFDVTAMFKSIGIFLGIFSGSFAMGAATGVVTALVTKFTKLREFQLLETGLFFLMSWSTFLLAEAWGFTGVVAVLFCGITQAHYTYNNLSTESQHRTKQLFELLNFLAENFIFSYMGLTLFTFQNHVFNPTFVVGAFVAIFLGRAANIYPLSLLLNLGRRSKIGSNFQHMMMFAGLRGAMAFALAIRDTATYARQMMFSTTLLIVFFTVWVFGGGTTAMLSCLHIRYCARLWGYRDELRHGLYPQGTHSLFGETDRVGVDSDQEHLVNMRFCCSWHFCQMCSHLERKQSTINFNLLFRSCPLCLSFGGMISFLAFLTAP

SEQ ID NO: 41528 - protein, 486 aa, Homo sapiens
MVLAWGFYYLVKSFTTTLPWATCGHTWNTPDCVEIFRHEDCANASLANLTCDQLADRRSPVIEFWENKVLRLSGGLEVPGALNWEVTLCLLACWVLVYFCVWKGVKSTGKIVYFTATFPYVVLVVLLVRGVLLPGALDGIIYYLKPDWSKLGSPQVWIDAGTQIFFSYAIGLGALTALGSYNRFNNNCYKDAIILALINSGTSFFAGFVVFSILGFMAAEQGVHISKVAESGPGLAFIAYPRAVTLMPVAPLWAALFFFMLLLLGLDSQFVGVEGFITGLLDLLPASYYFRFQREISVALCCALCFVIDLSMVTDGGMYVFQLFDYYSASGTTLLWQAFWECVVVAWVYGADRFMDDIACMIGYRPCPWMKWCWSFFTPLVCMGIFIFNVVYYEPLVYNNTYVYPWWGEAMGWAFALSSMLCVPLHLLGCLLRAKGTMAERWQHLTQPIWGLHHLEYRAQDADVRGLTTLTPVSESSKVVVVESVM

SEQ ID NO: 41529 - protein, 39 aa, Homo sapiens
MAAMASLGALALLLLSSLSRCSGICLLWSRPRAFSDVLC

SEQ ID NO: 41530 - protein, 2316 aa, Homo sapiens [sequence omitted]

SEQ ID NO: 41531 - protein, 83 aa, Homo sapiens
RRRMWRAEGKWLPKTSRKSVSQSVFCGTSTYCVLNTVPPIEDDHGNSNSSHVKIFLPKKLLECLPKCSSLPKERHRWNTNERS

SEQ ID NO: 41532 - protein, 633 aa, Homo sapiens
LKSTRAAENRRDRTWAPRASPASQVGAGRQATSRPAPGMRVLLAALGLLFLGALRAFPQDRPFEDTCHGNPSHYYDKAVRRCCYRCPMGLFPTQQCPQRPTDCRKQCEPDYYLDEADRCTACVTCSRDDLVEKTPCAWNSSRVCECRPGMFCSTSAVNSCARCFFHSVCPAGMIVKFPGTAQKNTVCEPASPGVSPACASPENCKEPSSGTIPQAKPTPVSPATSSASTMPVRGGTRLAQEAASKLTRAPDSPSSVGRPSSDPGLSPTQPCPEGSGDCRKQCEPDYYLDEAGRCTACVSCSRDDLVEKTPCAWNSSRTCECRPGMICATSATNSCARCVPYPICAAETVTKPQDMAEKDTTFEAPPLGTQPDCNPTPENGEAPASTSPTQSLLVDSQASKTLPIPTSAPVALSSTGKPVLDAGPVLFWVILVLVVVVGSSAFLLCHRRACRKRIRQKLHLCYPVQTSQPKLELVDSRPRRSSTQLRSGASVTEPVAEERGLMSQPLMETCHSVGAAYLESLPLQDASPAGGPSSPRDLPEPRVSTEHTNNKIEKIYIMKADTVIVGTVKAELPEGRGLAGPAEPELEEELEADHTPHYPEQETEPPLGSCSDVMLSVEEEGKEDPLPTAASGK

SEQ ID NO: 41533 - protein, 57 aa, Homo sapiens
RITVKLTIQNRQAQIEVVPSASALIIKALREPLRDRKKQKNIKHSGNITFDEIVNIA

SEQ ID NO: 41534 - protein, 478 aa, Homo sapiens
LEKFHSTSSKRGVHDGGRGKLGEDRKMSPKRIAKRRSPPADAIPKSKKVKDTRAAASRRVPGARSCQGACGPSPPDQKTRPVSHRSHSTEPGLVLTLGQGDVGQLGLGENVMERKKPALVSIPEDVVQAEAGGMHTVCLSKSGQVYSFGCNDEGALGRDTSVEGSEMVPGKVELQEKVVQVSAGDSHTAALTDDGRVFLWGSFRDNNGVIGLLEPMKKSMVPVQVQLDVPVVKVASGNDHLVMLTADGDLYTLGCGEQGQLGRVPELFANRGGRQGLERLLVPKCVMLKSRGSRGHVRFQDAFCGAYFTFAISHEGHVYGFGLSNYHQLGTPGTESCFIPQNLTSFKNSTKSWVGFSGGQHHTVCMDSEGKAYSLGRAEYGRLGLGEGAEEKSIPTLISRLPAVSSVACGASVGYAVTKDGRVFAWGMGTNYQLGTGQDEDAWSPVEMMGKQLENRVVLSVSSGGQHTVLLVKDKEQS

SEQ ID NO: 41535 - protein, 257 aa, Homo sapiens
MSVKIIRNRLTGIPAGYCFVEFADLATAEKCLHKINGKPLPGATPAKRFKLNYATYGKQPDNSPEYSLFVGDLTPDVDDGMLYEFFVKVYPSCRGGKVVLDQTGVSKGYGFVKFTDELEQKRALTECQGAVGLGSKPVRLSVAIPKASRVKPVEYSQMYSYSYNQYYQQYQNYYAQWGYDQNTGSYSYSYPQYGYTQSTMQTYEEVGDDALEDPMPQLDVTEANKEFMEQSEELYDALMDCHWQPLDTVSSEIPAMM

SEQ ID NO: 41536 - protein, 233 aa, Homo sapiens [sequence omitted]

SEQ ID NO: 41537 - protein, 584 aa, Homo sapiens
VRLLWGFLIQAAKNFEVWKIATVFVSKGSSPDPASLITMKNQDKKNGAAKQSNPKSSPGQPEAGPEGAQERPSQAAPAVEAEGPGSSQAPRKPEGAQARTAQSGALRDVSEELSRQLEDILSTYCVDNNQGGPGEDGAQGEPAEPEDAEKSRTYVARNGEPEPTPVVNGEKEPSKGDPNTEEIRQSDEVGDRDHRRPQEKKKAKGLGKEITLLMQTLNTLSTPEEKLAALCKKYAELLEEHRNSQKQMKLLQKKQSQLVQEKDHLRGEHSKAVLARSKLESLCRELQRHNRSLKEEGVQRAREEEEKRKEVTSHFQVTLNDIQLQMEQHNERNSKLRQENMELAERLKKLIEQYELREEHIDKVFKHKDLQQQLVDAKLQQAQEMLKEAEERHQREKDFLLKEAVESQRMCELMKQQETHLKQQLALYTEKFEEFQNTLSKSSEVFTTFKQEMEKMTKKIKKLEKETTMYRSRWESSNKALLEMAEEKTVRDKELEGLQVKIQRLEKLCRALQTERNDLNKRVQDLSAGGQGSLTDSGPERRPEGPGAQAPSSPRVTEAPCYPGAPSTEASGQTGPQEPTSARA

SEQ ID NO: 41538 - protein, 18 aa, Homo sapiens
LGEGLTLPLAIFVGLLPS

SEQ ID NO: 41539 - protein, 15 aa, Homo sapiens
ILFITSEVFFFAGFF

SEQ ID NO: 41540 - protein, 26 aa, Homo sapiens
LPGRAGPGVMRRGTPVLATGRRRRRR

SEQ ID NO: 41541 - protein, 154 aa, Homo sapiens
RPPDAEPPPPFQTQTPPQSLQQPAPPGSERRLPTPEQIFQNIKQEYSRYQRWRHLEVVLNQSEACASESQPHSSALTAPSSPGSSWMKKDQPTFTLRQVGIICERLLKDYEDKIREEYEQILNTKLAEQYESFVKFTHDQIMRRYGTRPTSYVS

SEQ ID NO: 41542 - protein, 84 aa, Homo sapiens
KNADGTICYDSTHYKETWKALEALVAKGLVQALGLSNFNSRQIDDILSVASVRPAVLQVAGPAESDLHPQKYHSFSNPSEHQGV

SEQ ID NO: 41543 - protein, 186 aa, Homo sapiens
MCSGKENPDSDADLDVDGDDTLEYGKPQYTEADVIPCTGEEPGEAKEREALRGAVLNGGPPSTRITPEFSKWASDEMPSTSNGESSKQEAMQKTCKNSDIEKITEDSAVTTFEALKARVRELERQLSRGDRYKCLICMDSYSMPLTSIQCWHVHCEECWLRTLGAKKLCPQCNTITAPGDLRRIYL

SEQ ID NO: 41544 - protein, 4 aa, Homo sapiens
MQPG

SEQ ID NO: 41545 - protein, 21 aa, Homo sapiens
MTMNLIHQLTCWFMILMMNEH

SEQ ID NO: 41546 - protein, 25 aa, Homo sapiens
KEILWGKCLLLLLEMINKRRSIWGE

SEQ ID NO: 41547 - protein, 156 aa, Homo sapiens
LGHSERRHVFGESDELIGQKVAHALAEGLGVIACTGEKLDEREAGITEKVVFEQTKVIADNVKDWSKVVLAYEPVWAIGTGKTATPQQDQEVHDKLRGWLKSNVSDAVAQSTRIIYGGSVTGATCKELASQPGVDGFLVGGASLKPEFVDIINAKQ

SEQ ID NO: 41548 - protein, 366 aa, Homo sapiens
RMNIMDFNVKKLAADAGTFLSRAVQFTEEKLGQAEKTELDAHLENLLSKAECTKIWTEKIMKQTEVLLQPNPNARIEEFVYEKLDRKAPSRINNPELLGQYMIDAGTEFGPGTAYGNALIKCGETQKRIGTADRELIQTSALNFLTPLRNFIEGDYKTIAKERKLLQNKRLDLDAAKTRLKKAKAAETRNSSEQELRITQSEFDRQAEITRLLLEGISSTHAHHLRCLNDFVEAQMTYYAQCYQYMLDLQKQLGSFPSNYLSNNNQTSVTPVPSVLPNAIGSSAMASTSGLVITSPSNLSDLKECSGSRKARVLYDYDAANSTELSLLADEVITVFSVVGMDSDWLMGERGNQKGKVPITYLELLN

SEQ ID NO: 41549 - protein, 66 aa, Homo sapiens
IDWSALMDKKVKPPFIPTIRGREDVSNFDDEFTSEAPILTPPREPRILSEEEQEMFRDFDYIADWC

SEQ ID NO: 41550 - protein, 5 aa, Homo sapiens
MLMAF

SEQ ID NO: 41551 - protein, 13 aa, Homo sapiens
VTVTLLERKLLKQ

SEQ ID NO: 41552 - protein, 540 aa, Homo sapiens
IPRPTPAMAFANLRKVLISDSLDPCCRKILQDGGLQVVEKQNLSKEELIAELQDCEGLIVRSATKVTADVINAAEKLQVVGRAGTGVDNVDLEAATRKGILVMNTPNGNSLSAAELTCGMIMCLARQIPQATASMKDGKWERKKFMGTELNGKTLGILGLGRIGREVATRMQSFGMKTIGYDPIISPEVSASFGVQQLPLEEIWPLCDFITVHTPLLPSTTGLLNDNTFAQCKKGVRVVNCARGGIVDEGALLRALQSGQCAGAALDVFTEEPPRDRALVDHENVISCPHLGASTKEAQSRCGEEIAVQFVDMVKGKSLTGVVNAQALTSAFSPHTKPWIGLAEALGTLMRAWAGSPKGTIQVITQGTSLKNAGNCLSPAVIVGLLKEASKQADVNLVNAKLLVKEAGLNVTTSHSPAAPGEQGFGECLLAVALAGAPYQAVGLVQGTTPVLQGLNGAVFRPEVPLRRDLPLLLFRTQTSDPAMLPTMIGLLAEAGVRLLSYQTSLVSDGETWHVMGISSLLPSLEAWKQHVTEAFQFHF

SEQ ID NO: 41553 - protein, 10 aa, Homo sapiens
MMCLLYVCFM

SEQ ID NO: 41554 - protein, 230 aa, Homo sapiens
IKKFIQENIFGICPHMTEDNKDLIQGKDLLIAYYDVDYEKNAKGSNYWRNRVMMVAKKFLDAGHKLNFAVASRKTFSHELSDFGLESTAGEIPVVAIRTAKGEKFVMQEDFSRDGNALERFLQDYFDGNLKRYLKSEPIPESNDGPVKVVVAENFDEIVNNENKDVLIEFYAPWCGHCKNLEPKYKELGEKLSKDLNIVIAKMDATANDVPSPYEVRVFLPYTSLQPTRS

SEQ ID NO: 41555 - protein, 38 aa, Homo sapiens
MASFRLLQTLAKNFIGKAIRERTVYPLRRPKLNWIRAG

SEQ ID NO: 41556 - protein, 29 aa, Homo sapiens
MLSLLVWILTLSDTFSQGKDPDPLQPGAS

SEQ ID NO: 41557 - protein, 170 aa, Homo sapiens
KMAALLLRHVGRHCLRAHFSPQLCIRNAVPLGTTAKEEMERFWNKNIGSNRPLSPHITIYSWSLPMAMSICHRGTGIALSAGVSLFGMSALLLPGNFESYLELVKSLCLGPALIHTAKFALVFPLMYHTWNGIRHLMWDLGKGLKIPQLYQSGVVVLVLTVLSSMGLAAM

SEQ ID NO: 41558 - protein, 14 aa, Homo sapiens
MRLGLQKLLYGILF

SEQ ID NO: 41559 - protein, 5 aa, Homo sapiens
MSLCL

SEQ ID NO: 41560 - protein, 6 aa, Homo sapiens
MRAFVV

SEQ ID NO: 41561 - protein, 175 aa, Homo sapiens
IGVKMEEYAREPCPWRIVDDCGGAFTMGTIGGGIFQAIKGFRNSPVGVNHRLRGSLTAIKTRAPQLGGSFAVWGGLFSMIDCSMVQVRGKEDPWNSITSGALTGAILAARNGPVAMVGSAAMGGILLALIEGAGILLTRFASAQFPNGPQFAEDPSQLPSTQLPSSPFGDYRQYQ

SEQ ID NO: 41562 - protein, 44 aa, Homo sapiens
LKLNGGRHVQGILRGFDPFMNLVIDECVEMATSGQQNNIGMVVI

SEQ ID NO: 41563 - protein, 50 aa, Homo sapiens
LESPAAVGLLLLLWLSLPVRLPSFVVSQRCAGLLLAALRIQGVGCQVQVS

SEQ ID NO: 41564 - protein, 43 aa, Homo sapiens
ITCTFLILFMSDVQLLKIFLWLEDLIEKIYLDISMVKRQHRQV

SEQ ID NO: 41565 - protein, 15 aa, Homo sapiens
VKRQFMNKSLSGPGQ

SEQ ID NO: 41566 - protein, 4 aa, Homo sapiens
MANQ

SEQ ID NO: 41567 - protein, 322 aa, Homo sapiens
RLFSQVPSACTSRTPLAPGPSVSARLTVGCDDMSNKEGSGGFRKRKHDNFPHNQRREGKDVNSSSPVMLAFKSFQQELDARHDKYERLVKLSRDITVESKRTIFLLHRITSAPDMEDILTESEIKLDGVRQKIFQVAQELSGEDMHQFHRAITTGLQEYVEAVSFQHFIKTRSLISMDEINKQLIFTTEDNGKENKTPSSDAQDKQFGTWRLRVTPVDYLLGVADLTGELMRMCINSVGNGDIDTPFEVSQFLRQVYDGFSFIGNTGPYEVSKKLYTLKQSLAKVENACYALKVRGSEIPKHMLADVFSVKTEMIDQEEGIS

SEQ ID NO: 41568 - protein, 4 aa, Homo sapiens
MKLA

SEQ ID NO: 41569 - protein, 376 aa, Homo sapiens
ILGHTQKRLQSTRSWKRMMLSLNNLQNIIYNPVIPFVGTIPDQLDPGTLIVIRGHVPSDADRFQVDLQNGSSMKPRADVAFHFNPRFKRAGCIVCNTLINEKWGREEITYDTPFKREKSFEIVIMVLKDKFQVAVNGKHTLLYGHRIGPEKIDTLGIYGKVNIHSIGFSFSSDLQSTQASSLELTEISRENVPKSGTPQLPSNRGGDISKIAPRTVYTKSKDSTVNHTLTCTKIPPMNYVSKRLPFAARLNTPMGPGRTVVVKGEVNANAKSFNVDLLAGKSKDIALHLNPRLNIKAFVRNSFLQESWGEEERNITSFPFSPGMYFEMIIYCDVREFKVAVNGVHSLEYKHRFKELSSIDTLEINGDIHLLEVRSW

SEQ ID NO: 41570 - protein, 330 aa, Homo sapiens [sequence omitted]

SEQ ID NO: 41571 - protein, 1043 aa, Homo sapiens
LPSARRCSEAGRAPRPERAAQRHGGGGGGSSLDPRSSPRRGAASPRPLEPRELRELRSASRAPPCRSRPGLAMLRRPAPALAPAARLLLAGLLCGGGVWAARVNKHKPWLEPTYHGIVTENDNTVLLDPPLIALDKDAPLRFAGEICGFKIHGQNVPFDAVVVDKSTGEGVIRSKEKLDCELQKDYSFTIQAYDCGKGPDGTNVKKSHKATVHIQVNDVNEYAPVFKEKSYKATVIEGKQYDSILRVEAVDADCSPQFSQICSYEIITPDVPFTVDKDGYIKNTEKLNYGKEHQYKLTVTAYDCGKKRATEDVLVKISIKPTCTPGWQGWNNRIEYEPGTGALAVFPNIHLETCDEPVASVQATVELETSHIGKGCDRDTYSEKSLHRLCGAAAGTAELLPSPSGSLNWTMGLPTDNGHDSDQVFEFNGTQAVRIPDGVVSVSPKEPFTISVWMRHGPFGRKKETILCSSDKTDMNRHHYSLYVHGCRLIFLFRQDPSEEKKYRPAEFHWKLNQVCDEEWHHYVLNVEFPSVTLYVDGTSHEPFSVTEDYPLHPSKIETQLVVGACWQEFSGVENDNETEPVTVASAGGDLHMTQFFRGNLAGLTLRSGKLADKKVIDCLYTCKEGLDLQVLEDSGRGVQIQAHPSQLVLTLEGEDLGELDKAMQHISYLNSRQFPTPGIRRLKITSTIKCFNEATCISVPPVDGYVMVLQPEEPKISLSGVHHFARAASEFESSEGVFLFPELRIISTITREVEPEGDGAEDPTVQESLVSEEIVHDLDTCEVTVEGEELNHEQESLEVDMARLQQKGIEVSSSELGMTFTGVDTMASYEEVLHLLRYRNWHARSLLDRKFKLICSELNGRYISNEFKVEVNVIHTANPMEHANHMAAQPQFVHPEHRSFVDLSGHNLANPHPFAVVPSTATVVIVVCVSFLVFMIILGVFRIRAAHRRTMRDQDTGKENEMDWDDSALTITVNPMETYEDQHSSEEEEEEEEEEESEDGEEEDDITSAESESSEEEEGEQGDPQNATRQQQLEWDDSTLSY

SEQ ID NO: 41572 - protein, 282 aa, Homo sapiens
MSEFLRALGRRVAVVNLDPANEGLPYECAVDVGELVGLGDVMDALRLGPNGGLLYCMEYLEANLDWLRAKLDPLRGHYFLFDCPGQVELCTHHGALRSIFSQMAQWDLRLTAVHLVDSHYCTDPAKFISVLCTSLATMLHVELPHINLLSKMDLIEHYGKLAFNLDYYTEVLDLSYLLDHLASDPFFRHYRQLNEKLVQLIEDYSLVSFIPLNIQDKESIQRVLQAVDKANGYCFRAQEQRSLEAMMSAAMGADFHFSSTLGIQEKYLAPSNQSVEQEAMQL

SEQ ID NO: 41573 - protein, 164 aa, Homo sapiens
LIVQNTLPVACLLFTMASSDIQVKELEKRASGQAFELILSPRSKESVPEFPLSPPKKKDLSLEEIQKKLEAAEERRKSHEAEVLKQLAEKREHEKEVLQKAIEENNNFSKMAEEKLTHKMEANKENREAQMAAKLERLREKDKHIEEVRKNKESKDPADETEAD

SEQ ID NO: 41574 - protein, 6 aa, Homo sapiens
VLVFLM

SEQ ID NO: 41575 - protein, 42 aa, Homo sapiens
KTDSWRRAAAAAAGPGRVSRAEAGGESSPPPPPLPPPPPPPR

SEQ ID NO: 41576 - protein, 30 aa, Homo sapiens
TGKAEGMSRASRQLVWKNGGEPFSEGADHL

SEQ ID NO: 41577 - protein, 732 aa, Homo sapiens
KMVKPKYKGRSTINPSKASTNPDRVQGAGGQNMRDRATIRRLNMYRQKERRNSRGKIIKPLQYQSTVASGTVARVEPNIKWFGNTRVIKQSSLQKFQEEMDTVMKDPYKVVMKQSKLPMSLLHDRIRPHNLKVHILDTESFETTFGPKSQRKRPNLFASDMQSLIENAEMSTESYDQGKDRDLVTEDTGVRNEAQEEIYKKGQSKRIWGELYKVIDSSDVVVQVLDARDPMGTRSPHIETYLKKEKPWKHLIFVLNKCDLVPTWATKRWVAVLSQDYPTLAFHASLTNPFGKGAFIQLLRQFGKLHTDKKQISVGFIGYPNVGKSSVINTLRSKKVCNVAPIAGETKVWQYITLMRRIFLIDCPGVVYPSEDSETDIVLKGVVQVEKIKSPEDHIGAVLERAKPEYISKTYKIDSWENAEDFLEKLAFRTGKLLKGGEPDLQTVGKMVLNDWQRGRIPFFVKPPNAEPLVAPQLLPSSSLEVVPEAAQNNPGEEVTETAGEGSESIIKEETEENSHCDANTEMQQILTRVRQNFGKINVVPQFSGDDLVPVEVSDLEEELESFSDEEEEEQEQQRDDAEESSSEPEEENVGNDTKAVIKALDEKIAKYQKFLDKAKAKKFSAVRISKGLSEKIFAKPEEQRKTLEEDVDDRAPSKKGKKRKAQREEEQEHSNKAPRALTSKERRRAVRQQRPKKVGVRYYETHNVKNRNRNKKKTNDSEGQKHKRKKFRQKQ

SEQ ID NO: 41578 - protein, 307 aa, Homo sapiens
KMASPGCLWLLAVALLPWTCASRALQHLDPPAPLPLVIWHGMGDSCCNPLSMGAIKKMVEKKIPGIYVLSLEIGKTLMEDVENSFFLNVNSQVTTVCQALAKDPKLQQGYNAMGFSQGGQFLRAVAQRCPSPPMINLISVGGQHQGVFGLPRCPGESSHICDFIRKTLNAGAYSKVVQERLVQAEYWHDPIKEDVYRNHSIFLADINQERGINESYKKNLMALKKFVMVKFLNDSIVDPVDSEWFGFYRSGQAKETIPLQETSLYTQDRLGLKEMDNAGQLVFLATEGDHLQLSEEWFYAHIIPFLG

SEQ ID NO: 41579 - protein, 728 aa, Homo sapiens
VASTFPERLLRFCLDRPLTTDMSRDRFRSRGGGGGGFHRRGGGGGRGGLHDFRSPPPGMGLNQNRGPMGPGPGQSGPKPPIPPPPPHQQQQQPPPQQPPPQQPPPHQPPPHPQPHQQQQPPPPPQDSSKPVVAQGPGPAPGVGSAPPASSSAPPATPPTSGAPPGSGPGPTPTPPPAVTSAPPGAPPPTPPSSGVPTTPPQAGGPPPPPAAVPGPGPGPKQGPGPGGPKGGKMPGGPKPGGGPGLSTPGGHPKPPHRGGGEPRGGRQHHPPYHQQHHQGPPPGGPGGRSEEKISDSEGFKANLSLLRRPGEKTYTQRCRLFVGNLPADITEDEFKRLFAKYGEPGEVFINKGKGFGFIKLESRALAEIAKAELDDTPMRGRQLRVRFATHAAALSVRNLSPYVSNELLEEAFSQFGPIERAVVIVDDRGRSTGKGIVEFASKPAARKAFERCSEGVFLLTTTPRPVIVEPLEQLDDEDGLPEKLAQKNPMYQKERETPPRFAQHGTFEYEYSQRWKSLDEMEKQQREQVEKNMKDAKDKLESEMEDAYHEHQANLLRQDLMRRQEELRRMEELHNQEMQKRKEMQLRQEEERRRREEEMMIRQREMEEQMRRQREESYSRMGYMDPRERDMRMGGGGAMNMGDPYGSGGQKFPPLGGGGGIGYEANPGVPPATMSGSMMGSDMRTERFGQGGAGPVGGQGPRGMGPGTPAGYGRGREEYEGPNKKPRF

SEQ ID NO: 41580 - protein, 318 aa, Homo sapiens
LSSSCVGRACGEMDTPPLSDSESESDESLVTDRELQDAFSRGLLKPGLNVVLEGPKKAVNDVNGLKQCLAEFKRDLEWVERLDVTLGPVPEIGGSEAPAPQNKDQKAVDPEDDFQREMSFYRQAQAAVLAVLPRLHQLKVPTKRPTDYFAEMAKSDLQMQKIRQKLQTKQAAMERSEKAKQLRALRKYGKKVQTEVLQKRQQEKAHMMNAIKKYQKGFSDKLDFLEGDQKPLAQRKKAGAKGQQMRKGPSAKRRYKNQKFGFGGKKKGSKWNTRESYDDVSSFRAKTAHGRGLKRPGKKGSNKRPGKRTREKMKNRTH

SEQ ID NO: 41581 - protein, 63 aa, Homo sapiens
LLLLGLVTLNFVGAFMLESVLDQCLPACLRRLRPKRASKKRFKQLERELAEQPWPPLPAGPLR

SEQ ID NO: 41582 - protein, 16 aa, Homo sapiens
MLLFGFLIVIYIYSEE

SEQ ID NO: 41583 - protein, 166 aa, Homo sapiens [sequence omitted]

SEQ ID NO: 41584 - protein, 20 aa, Homo sapiens
IDRLIQAILEGCWLLMLLLS

SEQ ID NO: 41585 - protein, 45 aa, Homo sapiens
KLVSEYMSKKIKVDEFVTHNLSFEEINKAFELMHSGKSIRTVVKI

SEQ ID NO: 41586 - protein, 37 aa, Homo sapiens
ISIAGSLVYSYITFTEEQLSKQSEANNKLDIKGKGAV

SEQ ID NO: 41587 - protein, 76 aa, Homo sapiens
IGPAVACTMSGSSSVAAMKKVVQQLRLEAGLNRVKVSQAAADLKQFCLQNAQHDPLLTGVSSSTNPFRPQKVCSFL

SEQ ID NO: 41588 - protein, 498 aa, Homo sapiens
IPTGNSSYWCAAATLKDRVAAEAKDRELMEFAAENEGKSGGGLHSVAEGVRLSPEPGREGVRDLAGAEEFGGGEEGTGLTGIKEIGDGEEGSGQRPEEIPMDLTVVKQEIIDWPGTEGRLAGQWVEQEVEDRPEVKDENAGVLEVKQETDSSLVVKEAKVGEPEVKEEKVKEEVMDWSEVKEEKDNLEIKQEEKFVGQCIKEELMHGECVKEEKDFLKKEIVDDTKVKEEPPINHPVGCKRKLAMSRCETCGTEEAKYRCPRCMRYSCSLPCVKKHKAELTCNGVRDKTAYISIQQFTEMNLLSDYRFLEDVARTADHISRDAFLKRPISNKYMYFMKNRARRQGINLKLLPNGFTKRKENSTFFDKKKQQFCWHVKLQFPQSQAEYIEKRVPDDKTINEILKPYIDPEKSDPVIRQRLKAYIRSQTGVQILMKIEYMQQNLVRYYELDPYKSLLDNLRNKVIIEYPTLHVVLKGSNNDMKVLHQVKSESTKNVGNEN

SEQ ID NO: 41589 - protein, 19 aa, Homo sapiens
MIDLWLYRFPNEWIMMTVL

SEQ ID NO: 41590 - protein, 12 aa, Homo sapiens
LAGPAGQAVESS

SEQ ID NO: 41591 - protein, 26 aa, Homo sapiens
VLLLFLVKTLSCLKELLLMDQFHTPP

SEQ ID NO: 41592 - protein, 37 aa, Homo sapiens
LSLHDNKYIRYFPGHSKRVVVLSMSPVDDTFIFGSLE

SEQ ID NO: 41593 - protein, 41 aa, Homo sapiens
IQDLNWQRKNMQLTAGSKLREMESNWISVVRIMRLNGLFFN

SEQ ID NO: 41594 - protein, 31 aa, Homo sapiens
LLIQLMEKDRCTLLGLEKKTKMSKRDAPSVL

SEQ ID NO: 41595 - protein, 126 aa, Homo sapiens
LRKMVAMAAGPSGCLVPAFGLRLLLATVLQAVSAFGAEFSSEACRELGFSSNLLCSSCDLLGQFNLLQLDPDCRGCCQEEAQFETKKLYAGAILEVCGKLGRFPQVQVCPWFRPCIKAFGRQWEHC

SEQ ID NO: 41596 - protein, 334 aa, Homo sapiens
LLSVCLLCLVAGTAVAVKMASTSRLDALPRVTCPNHPDAILVEDYRAGDMICPECGLVVGDRVIDVGSEWRTFSNDKATKDPSRVGDSQNPLLSDGDLSTMIGKGTGAASFDEFGNSKYQNRRTMSSSDRAMMNAFKEITTMADRINLPRNIVDRTNNLFKQVYEQKSLKGRANDAIASACLYIACRQEGVPRTFKEICAVSRISKKEIGRCFKLILKALETSVDLITTGDFMSRFCSNLCLPKQVQMAATHIARKAVELDLVPGRSPISVAAAAIYMASQASAEKRTQKEIGDIAGVADVTIRQSYRLIYPRAPDLFPTDFKFDTPVDKLPQL

SEQ ID NO: 41597 - protein, 298 aa, Homo sapiens
TILSAVSLLLKFEMLYLIGLGLGDAKDITVKGLEVVRRCSRVYLEAYTSVLTVGKEALEEFYGRKLVVADREEVEQEADNILKDADISDVAFLVVGDPFGATTHSDLVLRATKLGIPYRVIHNASIMNAVGCCGLQLYKFGETVSIVFWTDTWRPESFFDKVKKNRQNGMHTLCLLDIKVKEQSLENLIKGRKIYEPPRYMSVNQAAQQLLEIVQNQRIRGEEPAVTEETLCVGLARVGADDQKIAAGTLRQMCTVDLGEPLHSLIITGGSIHPMEMEMLSLFSIPENSSESQSINGL

SEQ ID NO: 41598 - protein, 102 aa, Homo sapiens
LGSEPEWSVGGMEATLEQHLEDTMKNPSIVGVLCTDSQGLNLGCRGTLSDEHAGVISVLAQQAAKLTSDPTDIPVVCLESDNGNIMIQKHDGITVAVHKMAS

SEQ ID NO: 41599 - protein, 29 aa, Homo sapiens
LFRPRRRFPVTRALTSQLSLAVLLRVPGA

SEQ ID NO: 41600 - protein, 216 aa, Homo sapiens
KMVLLTMIARVADGLPLAASMQEDEQSGRDLQQYQSQAKQLFRKLNEQSPTRCTLEAGAMTFHYIIEQGVCYLVLCEAAFPKKLAFAYLEDLHSEFDEQHGKKVPTVSRPYSFIEFDTFIQKTKKLYIDSRARRNLGSINTELQDVQRIMVANIEEVLQRGEALSALDSKANNLSSLSKKYRQDAKYLNMRSTYAKLAAVAVFFIMLIVYVRFWWL

SEQ ID NO: 41601 - protein, 85 aa, Homo sapiens
LEPSGNMSEFWHKLGCCVVEKPQPKKKRRRIDRTMIGEPMNFVHLTHIGSGEMGAGDGLAMTGAVQEQMRSKGNRDRPWSNSRGL

SEQ ID NO: 41602 - protein, 193 aa, Homo sapiens
IGNSGLPCPDLEPLGGLQSKCRLCAPTEARGLWSRSLCSDRCDTWRSMLAGAGRPGLPQGRHLCWLLCAFTLKLCQAEAPVQEEKLSASTSNLPCWLVEEFVVAEECSPCSNFRAKTTPECGPTGYVEKITCSSSKRNEFKSCRSALMEQRLFWKFEGAVVCVALIFACLVIIRQRQLDRKALEKVRKQIESI

SEQ ID NO: 41603 - protein, 266 aa, Homo sapiens
TPSGGGRNRSASSSWVGTMAGITTIEAVKRKIQVLQQQADDAEERAERLQREVEGERRAREQAEAEVASLNRRIQLVEEELDRAQERLATALQKLEEAEKAADESERGMKVIENRALKDEEKMELQEIQLKEAKHIAEEADRKYEEVARKLVIIEGDLERTEERAELAESRCREMDEQIRLMDQNLKCLSAAEEKYSQKEDKYEEEIKILTDKLKEAETRAEFAERSVAKLEKTIDDLEDKLKCTKEEHLCTQRMLDQTLLDLNEM

SEQ ID NO: 41604 - protein, 238 aa, Homo sapiens
VMAYGSLVFVLLFIFVKRQIMRFAMKSRRGPHVPVGHNAPKDLKEEIDIRLSRVQDIKYEPQLLADDDARLLQLETQGNQSCYNYLYRMKALDAIRTSEIPFHSEGRHPRSLMGKNFRSYLLDLRNTSTPFKGVRKALIDTLLDGYETARYGTGVFGQNEYLRYQEALSELATAVKARIGSSQRHHQSAAKDLTQSPEVSPTTIQVTYLPSSQKSKRAKHFLELKSFKDNYNTLESTL

SEQ ID NO: 41605 - protein, 1225 aa, Homo sapiens
VQDPGYSLSGYYTHPFQGYEHRQLRYQQPGPGSSPSSFLLKQIEFLKGQLPEAPVIGKQTPSLPPSLPGLRPRFPVLLASSTRGRQVDIRGVPRGVHLRSQGLQRGFQHPSPRGRSLPQRGVDCLSSHFQELSIYQDQEQRILKFLEELGEGKATTAHDLSGKLGTPKKEINRVLYSLAKKGKLQKEAGTPPLWKIAVSTQAWNQHSGVVRPDGHSQGAPNSDPSLEPEDRNSTSVSEDLLEPFIAVSAQAWNQHSGVVRPDSHSQGSPNSDPGLEPEDSNSTSALEDPLEFLDMAEIKEKICDYLFNVSDSSALNLAKNIGLTKARDINAVLIDMERQGDVYRQGTTPPIWHLTDKKRERMQIKRNTNSVPETAPAAIPETKRNAEFLTCNIPTSNASNNMVTTEKVENGQEPVIKLENRQEARPEPARLKPPVHYNGPSKAGYVDFENGQWATDDIPDDLNSIRAAPGEFRAIMEMPSFYSHGLPRCSPYKKLTECQLKNPISGLLEYAQFASQTCEFNMIEQSGPPHEPRFKFQVVINGREFPPAEAGSKKVAKQDAAMKAMTILLEEAKAKDSGKSEESSHYSTEKESEKTAESQTPTPSATSFFSGKSPVTTLLECMHKLGNSCEFRLLSKEGPAHEPKFQYCVAVGAQTFPSVSAPSKKVAKQMAAEEAMKALHGEATNSMASDNQPEGMISESLDNLESMMPNKVRKIGELVRYLNTNPVGGLLEYARSHGFAAEFKLVDQSGPPHEPKFVYQAKVGGRWFPAVCAHSKKQGKQEAADAALRVLIGENEKAERMGFTEVTPVTGASLRRTMLLLSRSPEAQPKTLPLTGSTFHDQIAMLSHRCFNTLTNSFQPSLLGRKILAAIIMKKDSEDMGVVVSLGTGNRCVKGDSLSLKGETVNDCHAEIISRRGFIRFLYSELMKYNSQTAKDSIFEPAKGGEKLQIKKTVSFHLYISTAPCGDGALFDKSCSDRAMESTESRHYPVFENPKQGKLRTKVENGEGTIPVESSDIVPTWDGIRLGERLRTMSCSDKILRWNVLGLQGALLTHFLQPIYLKSVTLGYLFSQGHLTRAICCRVTRDGSAFEDGLRHPFIVNHPKVGRVSIYDSKRQSGKTKETSVNWCLADGYDLEILDGTRGTVDGPRNELSRVSKKNIFLLFKKLCSFRYRRDLLRLSYGEAKKAARDYETAKNYFKKGLKDMGYGNWISKPQEEKNFYLCPV

SEQ ID NO: 41606 - protein, 24 aa, Homo sapiens
MDNHLPIISAGSELCLQQPVERKL

SEQ ID NO: 41607 - protein, 19 aa, Homo sapiens
KMAAHKSGPAHVSAERTQQ

SEQ ID NO: 41608 - protein, 67 aa, Homo sapiens
KKRQQHQEEEDILDVRDEKDGGAREAESRAHTGSSSRGKRKRQQHPKKERAGVSTVQKAKKKQKKRD

SEQ ID NO: 41609 - protein, 43 aa, Homo sapiens
MRPPPFRPPRTRAIPRSLPRAGRAGWAPSGPRCCRLRCRCCCC

SEQ ID NO: 41610 - protein, 609 aa, Homo sapiens
RPTLLPPSLPLLLLLMLGMGCWAREVLVPEGPLYRVAGTAVSISCNVTGYEGPAQQNFEWFLYRPEAPDTALGIVSTKDTQFSYAVFKSRVVAGEVQVQRLQGDAVVLKIARLQAQDAGIYECHTPSTDTRYLGSYSGKVELRVLPDVLQVSAAPPGPRGRQAPTSPPRMTVHEGQELALGCLARTSTQKHTHLAVSFGRSVPEAPVGRSTLQEVVGIRSDLAVEAGAPYAERLAAGELRLGKEGTDRYRMVVGGAQAGDAGTYHCTAAEWIQDPDGSWAQIAEKRAVLAHVDVQTLSSQLAVTVGPGERRIGPGEPLELLCNVSGALPPAGRHAAYSVGWEMAPAGAPGPGRLVAQLDTEGVGSLGPGYEGRHIAMEKVASRTYRLRLEAARPGDAGTYRCLAKAYVRGSGTRLREAASARSRPLPVHVREEGVVLEAVAWLAGGTVYRGETASLLCNISVRGGPPGLRLAASWWVERPEDGELSSVPAQLVGGVGQDGVAELGVRPGGGPVSVELVGPRSHRLRLHSLGPEDEGVYHCAPSAWVQHADYSWYQAGSARSGPVTVYPYMHALDTLFVPLLVGTGVALVTGATVLGTITCCFMKRLRKR

SEQ ID NO: 41611 - protein, 21 aa, Homo sapiens
MPHISVPPGPPGAPMIPKKTA

SEQ ID NO: 41612 - protein, 14 aa, Homo sapiens
LLLVTFLSMDDLLG

SEQ ID NO: 41613 - protein, 808 aa, Homo sapiens
LPLKIPHPLHAAAAAAMQGEDARYLKRKVKGGNIDVHPSEKALIVHYEVEATILGEMGDPMLGERKECQKIIRLKSLNANTDITSLARKVVEECKLIHPSKLNEVEQLLYYLQNRRDSLSGKEKKEKSSKPKDPPPFEGMEIDEVANINDMDEYIELLYEDIPDKVRGSALILQLARNPDNLEELLLNETALGALARVLREDWKQSVELATNIIYIFFCFSSFSQFHGLITHYKIGALCMNIIDHELKRHELWQEELSKKKKAVDEDPENQTLRKDYEKTFKKYQGLVVKQEQLLRVALYLLLNLAEDTRTELKMRNKNIVHMLVKALDRDNFELLILVVSFLKKLSIFMENKNDMVEMDIVEKLVKMIPCEHEDLLNITLRLLLNLSFDTGLRNKMVQVGLLPKLTALLGNDNYKQIAMCVLYHISMDDRFKSMFAYTDCIPQLMKMLFECSDERIDLELISFCINLAANKRNVQLICEGNGLKMLMKRALKFKDPLLMKMIRNISQHDGPTKNLFIDYVGDLAAQISNDEEEEFVIECLGTLANLTIPDLDWELVLKEYKLVPYLKDKLKPGAAEDDLVLEVVIMIGTVSMDDSCAALLAKSGIIPALIELLNAQQEDDEFVCQIIYVFYQMVFHQATRDVIIKETQAPAYLIDLMHDKNNEIRKVCDNTLDIIAEYDEEWAKKIQSEKFRWHNSQWLEMVESRQMDESEQYLYGDDRIEPYIHEGDILERPDLFYNSDGLIASEGAISPDFFNDYHLQNGDVVGQHSFPGSLGMDGFGQPVGILGRPATAYGFRPDEPYYYGYGS

SEQ ID NO: 41614 - protein, 45 aa, Homo sapiens
LFSTNRIWSLVLHLLSVARIPPSPLASPLLGSSPVGIHVSSLTPP

SEQ ID NO: 41615 - protein, 18 aa, Homo sapiens
VALPLPFSLHGLAPRPST

SEQ ID NO: 41616 - protein, 346 aa, Homo sapiens [sequence omitted]

SEQ ID NO: 41617 - protein, 280 aa, Homo sapiens
IFIYLLLMAVAVFLVYRTITDFREKLKHPVMSVSYKEVDRYDAPGIALYPGQAQLLSCKHHYEVIPPLTSPGQPGDMNCTTQRINYTDPFSNQTVKSALIVQGPREVKKRELVFLQFRLNKSSEDFSAIDYLLFSSFQEFLQSPNRVGFMQACESAYSSWKFSGGFRTWVKMSLVKTKEEDGREAVEFRQETSVVNYIDQRPAAKKSAQLFFVVFEWKDPFIQKVQDIVTANPWNTIALLCGAFLALFKAAEFAKLSIKWMIKIRKRYLKRRGQATSHIS

SEQ ID NO: 41618 - protein, 152 aa, Homo sapiens
TLSVVEKMVGRNSAIAAGVCGALFIGYCIYFDRKRRSDPNFKNRLRERRKKQKLAKERAGLSKLPDLKDAEAVQKFFLEEIQLGEELLAQGEYEKGVDHLTNAIAVCGQPQQLLQVLQQTLPPPVFQMLLTKLPTISQRIVSAQSLAEDDVE

SEQ ID NO: 41619 - protein, 55 aa, Homo sapiens
LGPPYHILVDTNFINFSIKAKLDLVQSMMGCLHVKCIPCITDCVMAEIEKLGQKY

SEQ ID NO: 41620 - protein, 16 aa, Homo sapiens
INLIFRYLQNRSRIQV

SEQ ID NO: 41621 - protein, 402 aa, Homo sapiens
LSWLLALLRCASTMLSLRVPLAPITDPQQLQLSPLKGLSLVDKENTPPALSGTRVLASKTARRIFQEPTEPKTKAAAPGVEDEPLLRENPRRFVIFPIEYHDIWQMYKKAEASFWTAEEVDLSKDIQHWESLKPEERYFISHVLAFFAASDGIVNENLVERFSQEVQITEARCFYGFQIAMENIHSEMYSLLIDTYIKDPKEREFLFNAIETMPCVKKKADWALRWIGDKEATYGERVVAFAAVEGIFFSGSFASIFWLKKRGLMPGLTFSNELISRDEGLHCDFACLMFKHLVHKPSEERVREIIINAVRIEQEFLTEALPVKLIGMNCTLMKQYIEFVADRLMLELGFSKVFRVENPFDFMENISLEGKTNFFEKRVGEYQRMGVMSSPTENSFTLDADF

SEQ ID NO: 41622 - protein, 193 aa, Homo sapiens
LLFKLLLIGDSGVGKTCVLFRFSDDAFNTTFISTIGIDFKIKTVELQGKKIKLQIWDTAGQERFHTITTSYYRGAMGIMLVYDITNGKSFENISKWLRNIDEHANEDVERMLLGNKCDMDDKRVVPKGKGEQIAREHGIRFFETSAKANINIEKAFLTLAEDILRKTPVKEPNSENVDISSGGGVTGWKSKCC

SEQ ID NO: 41623 - protein, 19 aa, Homo sapiens
IASHLFIFLGIFIALNKKY

SEQ ID NO: 41624 - protein, 19 aa, Homo sapiens
VGKNTEEQFGNIVVIYKSS

SEQ ID NO: 41625 - protein, 35 aa, Homo sapiens
KTVLKKRCKDCYLVKRRGQWYVYCKTHPRHKQRQM

SEQ ID NO: 41626 - protein, 685 aa, Homo sapiens
LLTAMAPQVWRRRTLERCLTEVGKATGRPECFLTIQEGLASKFTSLTKVLYDFNKILENGRIHGSPLQKLVIENFDDEQIWQQLELQNEPILQYFQNAVSETINDEDISLLPESEEQEREEDGSEIEADDKEDLEDLEEEEVSDMGNDDPEMGERAENSSKSDLRKSPVFSDEDSDLDFDISKLEQQSKVQNKGQGKPREKSIVDDKFFKLSEMEAYLENIEKEEERKDDNDEEEEDIDFFEDIDSDEDEGGLFGSKKLKSGKSSRNLKYKDFFDPVESDEDITNVHDDELDSNKEDDEIAEEEAEELSISETDEDDDLQENEDNKQHKESLKRVTFALPDDAETEDTGVLNVKKNSDEVKSSFEKRQEKMNEKIASLEKELLEKKPWQLQGEVTAQKRPENSLLEETLHFDHAVRMAPVITEETTLQLEDIIKQRIRDQAWDDVVRKEKPKEDAYEYKKRLTLDHEKSKLSLAEIYEQEYIKLNQQKTAEEENPEHVEIQKMMDSLFLKLDALSNFHFIPKPPVPEIKVVSNLPAITMEEVAPVSVSDAALLAPEEIKEKNKAGDIKTAAEKTATDKKRERRKKKYQKRMKIKEKEKRRKLLEKSSVDQAGKYSKTVASEKLKQLTKTGKASFIKDEGKDKALKSSQAFFSKLQDQVKMQINDAKKTEKKKKKRQDISVHKLKL

SEQ ID NO: 41627 - protein, 56 aa, Homo sapiens
MWWRRQHLPWSISRSWTGTLSWAARSLSRTAQDSWWLPMGSLSPTPMWWLIGAESV

SEQ ID NO: 41628 - protein, 237 aa, Homo sapiens
MSKAEEAKKLAGRAAVENHVRNNQVLGIGSGSTIVHAVQRIAERVKQENLNLVCIPTSFQARQLILQYGLTLSDLDRHPEIDLAIDGADEVDADLNLIKGGGGCLTQEKIVAGYASRFIVIADFRKDSKNLGDQWHKGIPIEVIPMAYVPVSRAVSQKFGGVVELRMAVNKAGPVVTDNGNFILDWKFDRVHKWSEVNTAIKMIPGVVDTGLFINMAERVYFGMQDGSVNMREKPFC

SEQ ID NO: 41629 - protein, 344 aa, Homo sapiens
LRRADMKDSLVLLGRVPAHPDSRCWFLAWNPAGTLLASCGGDRRIRIWGTEGDSWICKSVLSEGHQRTVRKVAWSPCGNYLASASFDATTCIWKKNQDDFECVTTLEGHENEVKSVAWAPSGNLLATCSRDKSVWVWEVDEEDEYECVSVLNSHTQDVKHVVWHPSQELLASASYDDTVKLYREEEDDWVCCATLEGHESTVWSLAFDPSGQRLASCSDDRTVRIWRQYLPGNEQGVACSGSDPSWKCICTLSGFHSRTIYDIAWCQLTGALATACGDDAIRVFQEDPNSDPQQPTFSLTAHLHQAHSQDVNCVAWNPKEPGLLASCSDDGEVAFWKYQRPEGL

SEQ ID NO: 41630 - protein, 1204 aa, Homo sapiens
IDLDALAAEIEGAGAAKEQEPQKSKGKKKKEKKKQDFDEDDILKELEELSLEAQGIKADRETVAVKPTENNEEEFTSKDKKKKGQKGKKQSFDDNDSEELEDKDSKSKKTAKPKVEMYSGSDDDDDFNKLPKKAKGKAQKSNKKWDGSEEDEDNSKKIKERSRINSSGESGDESDEFLQSRKGQKKNQKNKPGPNIESGNEDDDASFKIKTVAQKKAEKKERERKKRDEEKAKLRKLKEKEELETGKKDQSKQKESQRKFEEETVKSKVTVDTGVIPASEEKAETPTAAEDDNEGDKKKKDKKKKKGEKEEKEKEKKKGPSKATVKAMQEALAKLKEEEERQKREEEERIKRLEELEAKRKEEERLEQEKRERKKQKEKERKERLKKEGKLLTKSQREARARAEATLKLLQAQGVEVPSKDSLPKKRPIYEDKKRKKIPQQLESKEVSESMELCAAVEVMEQGVPEKEETPPPVEPEEEEDTEDAGLDDWEAMASDEETEKVEGNKVHIEVKENPEEEEEEEEEEEEDEESEEEEEEEGESEGSEGDEEDEKVSDEKDSGKTLDKKPSKEMSSDSEYDSDDDRTKEERAYDKAKRRIEKRRLEHSKNVNTEKLRAPIICVLGHVDTGKTKILDKLRHTHVQDGEAGGITQQIGATNVPLEAINEQTKMIKNFDRENVRIPGMLIIDTPGHESFSNLRNRGSSLCDIAILVVDIMHGLEPQTIESINLLKSKKCPFIVALNKIDRLYDWKKSPDSDVAATLKKQKKNTKDEFEERAKAIIVEFAQQGLNAALFYENKDPRTFVSLVPTSAHTGDGMGSLIYLLVELTQTMLSKRLAHCEELRAQVMEVKALPGMGTTIDVILINGRLKEGDTIIVPGVEGPIVTQIRGLLLPPPMKELRVKNQYEKHKEVEAAQGVKILGKDLEKTLAGLPLLVAYKEDEIPVLKDELIHELKQTLNAIKLEEKGVYVQASTLGSLEALLEFLKTSEVPYAGINIGPVHKKDVMKASVMLEHDPQYAVILAFDVRIERDAQEMADSLGVRIFSAEIIYHLFDAFTKYRQDYKKQKQEEFKHIAVFPCKIKILPQYIFNSRDPIVMGVTVEAGQVKQGTPMCVPSKNFVDIGIVTSIEINHKQVDVAKKGQEVCVKIEPIPGESPKMFGRHFEATDILVSKISRQSIDALKDWFRDEMQKSDWQLIVELKKVFEII

SEQ ID NO: 41631 - protein, 22 aa, Homo sapiens
VRMQHSLAGQTYAVPLIQPDLR

SEQ ID NO: 41632 - protein, 1042 aa, Homo sapiens
MANDSPAKSLVDIDLSSLRDPAGIFELVEVVGNGTYGQVYKGRHVKTGQLAAIKVMDVTEDEEEEIKLEINMLKKYSHHRNIATYYGAFIKKSPPGHDDQLWLVMEFCGAGSITDLVKNTKGNTLKEDWIAYISREILRGLAHLHIHHVIHRDIKGQNVLLTENAEVKLDETEYEYSGSEEEEEEVPEQEGEPSSIVNVPGESTLRRDFLRLQQENKERSEALRRQQLLQEQQLREQEEYKRQLLAERQKRIEQQKEQRRRLEEQQRREREARRQQEREQRRREQEEKRRLEELERRRKEEEERRRAEEEKRRVEREQEYIRRQLEEEQRHLEVLQQQLLQEQAMLLECRWREMEEHRQAERLQRQLQQEQAYLLSLQHDHRRPHPQHSQQPPPPQQERSKPSFHAPEPKAHYEPADRAREVPVRTTSRSPVLSRRDSPLQGSGQQNSQAGQRNSTSSIEPRLLWERVEKLVPRPGSGSSSGSSNSGSQPGSHPGSQSGSGERFRVRSSSKSEGSPSQRLENAVKKPEDKKEVFRPLKPAGEVDLTALAKELRAVEDVRPPHKVTDYSSSSEESGTTDEEDDDVEQEGADESTSGPEDTRAASSLNLSNGETESVKTMIVHDDVESEPAMTPSKEGTLIVRQTQSASSTLQKHKSSSSFTPFIDPRLLQISPSSGTTVTSVVGFSCDGMRPEAIRQDPTRKGSVVNVNPTNTRPQSDTPEIRKYKKRFNSEILCAALWGVNLLVGTESGLMLLDRSGQGKVYPLINRRRFQQMDVLEGLNVLVTISGKKDKLRVYYLSWLRNKILHNDPEVEKKQGWTTVGDLEGCVHYKVVKYERIKFLVIALKSSVEVYAWAPKPYHKFMAFKSFGELVHKPLLVDLTVEEGQRLKVIYGSCAGFHAVDVDSGSVYDIYLPTHIQCSIKPHAIIILPNTDGMELLVCYEDEGVYVNTYGRITKDVVLQWGEMPTSVAYIRSNQTMGWGEKAIEIRSVETGHLDGVFMHKRAQRLKFLCERNDKVFFASVRSGGSSQVYFMTLGRTSLLSW

SEQ ID NO: 41633 - protein, 127 aa, Homo sapiens
VLSTEEMELYELAQAAGGAIDPDVFKILVDLLKLNVAPLAVFQMLKSMCAGQRLASEPQDPAAVSLPTSSVPETRGRNKGSAALGGALALAERSSREGSSQRMPRQPSATRLPKGGGPGKSPTRGST

SEQ ID NO: 41634 - protein, 1570 aa, Homo sapiens
LALSLALWRTDHGPGMGCKGDASGACAAGALPVTGVCYKMGVLVVLTVLWLFSSVKADSKAITTSLTTKWFSTPLLLEASEFLAEDSQEKFWNFVEASQNIGSSDHDGTDYSYYHAILEAAFQFLSPLQQNLFKFCLSLRSYSATIQAFQQIAADEPPPEGCNSFFSVHGKKTCESDTLEALLLTASERPKPLLFKGDHRYPSSNPESPVVIFYSEIGSEEFSNFHRQLISKSNAGKINYVFRHYIFNPRKEPVYLSGYGVELAIKSTEYKAKDDTQVKGTEVNTTVIGENDPIDEVQGFLFGKLRDLHPDLEGQLKELRKHLVESTNEMAPLKVWQLQDLSFQTAARILASPVELALVVMKDLSQNFPTKARAITKTAVSSELRTEVEENQKYFKGTLGLQPGDSALFINGLHMDLDTQDIFSLFDVLRNEARVMEGLHRLGIEGLSLHNVLKLNIQPSEADYAVDIRSPAISWVNNLEVDSRYNSWPSSLQELLRPTFPGVIRQIRKNLHNMVFIVDPAHETTAELMNTAEMFLSNHIPLRIGFIFVVNDSEDVDGMQDAGVAVLRAYNYVAQEVDDYHAFQTLTHIYNKVRTGEKVKVEHVVSVLEKKYPYVEVNSILGIDSAYDRNRKEARGYYEQTGVGPLPVVLFNGMPFEREQLDPDELETITMHKILETTTFFQRAVYLGELPHDQDVVEYIMNQPNVVPRINSRILTAERDYLDLTASNNFFVDDYARFTILDSQGKTAAVANSMNYLTKKGMSSKEIYDDSFIRPVTFWIVGDFDSPSGRQLLYDAIKHQKSSNNVRISMINNPAKEISYENTQISRAIWAALQTQTSNAAKNFITKMAKEGAAEALAAGADIAEFSVGGMDFSLFKEVFESSKMDFILSHAVYCRDVLKLKKGQRAVISNGRIIGPLEDSELFNQDDFHLLENIILKTSGQKIKSHIQQLRVEEDVASDLVMKVDALLSAQPKGDPRIEYQFFEDRHSAIKLRPKEGETYFDVVAVVDPVTREAQRLAPLLLVLAQLINMNLRVFMNCQSKLSDMPLKSFYRYVLEPEISFTSDNSFAKGPIAKFLDMPQSPLFTLNLNTPESWMVESVRTPYDLDNIYLEEVDSVVAAEYELEYLLLEGHCYDITTGQPPRGLQFTLGTSANPVIVDTIVMANLGYFQLKANPGAWILRLRKGRSEDIYRIYSHDGTDSPPDADEVVIVLNNFKSKIIKVKVQKKADMVNEDLLSDGTSENESGFWDSFKWGFTGQKTEEVKQDKDDIINIFSVASGHLYERFLRIMMLSVLKNTKTPVKFWFLKNYLSPTFKEFIPYMANEYNFQYELVQYKWPRWLHQQTEKQRIIWGYKILFLDVLFPLVVDKFLFVDADQIVRTDLKELRDFNLDGAPYGYTPFCDSRREMDGYRFWKSGYWASHLAGRKYHISALYVVDLKKFRKIAAGDRLRGQYQGLSQDPNSLSNLDQDLPNNMIHQVPIKSLPQEWLWCETWCDDASKKRAKTIDLCNNPMTKEPKLEAAVRIVPEWQDYDQEIKQLQIRFQKEKETGALYKEKTKEPSREGPQKREEL

SEQ ID NO: 41635 - protein, 831 aa, Homo sapiens
KMVEEENIRVVRCGGSELNFRRAVFSADSKYIFCVSGDFVKVYSTVTEECVHILHGHRNLVTGIQLNPNNHLQLYSCSLDGTIKLWDYIDGILIKTFIVGCKLHALFTLAQAEDSVFVIVNKEKPDIFQLVSVKLPKSSSQEVEAKELSFVLDYINQSPKCIAFGNEGVYVAAVREFYLSVYFFKKKTTSRFTLSSSRNKKHAKNNFTCVACHPTEDCIASGHMDGKIRLWRNFYDDKKYTYTCLHWHHDMVMDLAFSVTGTSLLSGGRESVLVEWRDATEKNKEFLPRLGATIEHISVSPAGDLFCTSHSDNKIIIIHRNLEASAVIQGLVKDRSIFTGLMIDPRTKALVLNGKPGHLQFYSLQSDKQLYNLDIIQQEYINDYGLIQIELTKAAFGCFGNWLATVEQRQEKETELELQMKLWMYNKKTQGFILNTKINMPHEDCITALCFCNAEKSEQPTLVTASKDGYFKVWILTDDSDIYKKAVGWTCDFVGSYHKYQATNCCFSEDGSLLAVSFEEIVTIWDSVTWELKCTFCQRAGKIRHLCFGRLTCSKYLLGATENGILCCWNLLSCALEWNAKLNVRVMEPDPNSENIAAISQSSVGSDLFVFKPSEPRPLYIQKGISREKVQWGVFVPRDVPESFTSEAYQWLNRSQFYFLTKSQSLLTFSTKSPEEKLTPTSKQLLAEESLPTTPFYFILGKHRQQQDEKLNETLENELVQLPLTENIPAISELLHTPAHVLPSAAFLCSMFVNSLLLSKETKSAKEIPEDVDMEEEKESEDSDEENDFTEKVQDTSNTGLGEDIIHQLSKSEEKELRKFRKIDYSWIAAL

SEQ ID NO: 41636 - protein, 24 aa, Homo sapiens
KKQEILKKFMDQHPEMDFSKAKFN

SEQ ID NO: 41637 - protein, 316 aa, Homo sapiens
MAEISRIQYEMEYTEGISQRMRVPEKLKVAPPNADLEQGFQEGVPNASVIMQVPERIVVAGNNEDVSFSRPADLDLIQSTPFKPLALKTPPRVLTLSERPLDFLDLERPPTTPQNEEIRAVGRLKRERSMSENAVRQNGQLVRNDSLWHRSDSAPRNKISRFQAPISAPEYTVTPSPQQARVCPPHMLPEDGANLSSARGILSLIQSSTRRAYQQILDVLDENRRPVLRGGSAAATSNPHHDNVRYGISNIDTTIEGTSDDLTVVDAASLRRQIIKLNRRLQLLEEENKERAKREMVMYSITVAFWLLNSWLWFRR

SEQ ID NO: 41638 - protein, 330 aa, Homo sapiens
LPTASMLPRVGCPALPLPPPPLLPLLLLLLGASGGGGGARAEVLFRCPPCTPERLAACGPPPVAPPAAVAAVAGGARMPCAELVREPGCGCCSVCARLEGEACGVYTPRCGQGLRCYPHPGSELPLQALVMGEGTCEKRRDAEYGASPEQVADNGDDHSEGGLVENHVDSTMNMLGGGGSAGRKPLKSGMKELAVFREKVTEQHRQMGKGGKHHLGLEEPKKLRPPPARTPCQQELDQVLERISTMRLPDERGPLEHLYSLHIPNCDKHGLYNLKQCKMSLNGQRGECWCVNPNTGKLIQGAPTIRGDPECHLFYNEQQEARGVHTQRMQ

SEQ ID NO: 41639 - protein, 234 aa, Homo sapiens
TMVSMSFKRNRSDRFYSTRCCGCCHVRTGTIILGTWYMVVNLLMAILLTVEVTHPNSMPAVNIQYEVIGNYYSSERMADNACVLFAVSVLMFIISSMLVYGAISYQVGWLIPFFCYRLFDFVLSCLVAISSLTYLPRIKEYLDQLPDFPYKDDLLALDSSCLLFIVLVFFALFIIFKAYLINCVWNCYKYINNRNVPEIAVYPAFEAPPQYVLPTYEMAVKMPEKEPPPPYLPA

SEQ ID NO: 41640 - protein, 147 aa, Homo sapiens
MRIFAPNHVVAKSRFWYFVSQLKKMKKSSGEIVYCGQVFEKFPLRVKNFGIWLRYDSRSGTHNMYREYRDLTTAGAVTRCYRDMSARHGGRAHSIQIMKVEEIAASKCRRPAVKQFHDSKIKFPLPHRVLRRQHKPRFTTKRPNTFF

SEQ ID NO: 41641 - protein, 660 aa, Homo sapiens
LILSICDLQPVKQENEKPLPENMDAFEKVRTKLETQPQEEYEIINVEVKHGGFVYYQEGCCLVRSKDEEADNDNYEVLFNLEELKLDQPFIDCIRVAPDEKYVAAKIRTEDSEASTCVIIKLSDQPVMEASFPNVSSFEWVKDEEDEDVLFYTFQRNLRCHDVYRATFGDNKRNERFYTEKDPSYFVFLYLTKDSRFLTINIMNKTTSEVWLIDGLSPWDPPVLIQKRIHGVLYYVEHRDDELYILTNVGEPTEFKLMRTAADTPAIMNWDLFFTMKRNTKVIDLDMFKDHCVLFLKHSNLLYVNVIGLADDSVRSLKLPPWACGFIMDTNSDPKNCPFQLCSPIRPPKYYTYKFAEGKLFEETGHEDPITKTSRVLRLEAKSKDGKLVPMTVFHKTDSEDLQKKPLLVHVYGAYGMDLKMNFRPERRVLVDDGWILAYCHVRGGGELGLQWHADGRLTKKLNGLADLEACIKTLHGQGFSQPSLTTLTAFSAGGVLAGALCNSNPELVRAVTLEAPFLDVLNTMMDTTLPLTLEELEEWGNPSSDEKHKNYIKRYCPYQNIKPQHYPSIHITAYENDERVPLKGIVSYTEKLKEAIAEHAKDTGEGYQTPNIILDIQPGGNHVIEDSHKKITAQIKFLYEELGLDSTSVFEDLKKYLKF

SEQ ID NO: 41642 - protein, 13 aa, Homo sapiens
IMLGARRQRTAES

SEQ ID NO: 41643 - protein, 371 aa, Homo sapiens
LERGVGGCRVFSCLGSYPGIEGAGLALLADLALGGRLLGTHMSQWHHPRSGWGRRRDFSGRSSAKKKGGNHIPERWKDYLPVGQRMPGTRFIAFKVPLQKSFEKKLAPEECFSPLDLFNKIREQNEELGLIIDLTYTQRYYKPEDLPETVPYLKIFTVGHQVPDDETIFKFKHAVNGFLKENKDNDKLIGVHCTHGLNRTGYLICRYLIDVEGVRPDDAIELFNRCRGHCLERQNYIEDLQNGPIRKNWNSSVPRSSDFEDSAHLMQPVHNKPVKQGPRYNLHQIQGHSAPRHFHTQTQSLQQSVRKFSENPHVYQRHHLPPPGPPGEDYSHRRYSWNVKPNASRAAQDRRRWYPYNYSRLSYPACWEWTQ

SEQ ID NO: 41644 - protein, 438 aa, Homo sapiens
RMRFVVALVLLNVAAAGAVPLLATESVKQEEAGVRPSAGNVSTHPSLSQRPGGSTKSHPEPQTPKDSPSKSSAEAQTPEDTPNKSGAEAKTQKDSSNKSGAEAKTQKGSTSKSGSEAQTTKDSTSKSHPELQTPKDSTGKSGAEAQTPEDSPNRSGAEAKTQKDSPSKSGSEAQTTKDVPNKSGADGQTPKDGSSKSGAEDQTPKDVPNKSGAEKQTPKDGSNKSGAEEQGPIDGPSKSGAEEQTSKDSPNKVVPEQPSRKDHSKPISNPSDNKELPKADTNQLADKGKLSPHAFKTESGEETDLISPPQEEVKSSEPTEDVEPKEAEDDDTGPEEGSPPKEEKEKMSGSASSENREGTLSDSTGSEKDDLYPNGSGNGSAESSHFFAYLVTAAILVAVLYIAHHNKRKIIAFVLEGKRSKVTRRPKASDYQRLDQKS

SEQ ID NO: 41645 - protein, 16 aa, Homo sapiens
IVNIIELFLPFSCPFF

SEQ ID NO: 41646 - protein, 44 aa, Homo sapiens
MAASSTKSWWETGEVQAQSAAKTPSCKTLWQLHWVLAEFWKTGM

SEQ ID NO: 41647 - protein, 4 aa, Homo sapiens
MSVE

SEQ ID NO: 41648 - protein, 28 aa, Homo sapiens
MIRFLHQILSLIRKIPFCQPNEAFKEDI

SEQ ID NO: 41649 - protein, 284 aa, Homo sapiens
KPGVKMTERFDCHHCNESLFGKKYILREESPYCVVCFETLFANTCEECGKPIGCDCKDLSYKDRHWHEACFHCSQCRNSLVDKPFAAKEDQLLCTDCYSNEYSSKCQECKKTIMPGTRKMEYKGSSWHETCFICHRCQQPIGTKSFIPKDNQNFCVPCYEKQHAMQCVQCKKPITTGGVTYREQPWHKECFVCTACRKQLSGQRFTARDDFAYCLNCFCDLYAKKCAGCTNPISGLGGTKYISFEERQWHNDCFNCKKCSLSLVGRGFLTERDDILCPDCGKDI

SEQ ID NO: 41650 - protein, 25 aa, Homo sapiens
MMGGSLICIMSTLSEYWIFFKRSLL

SEQ ID NO: 41651 - protein, 48 aa, Homo sapiens
LPGPRSAWCSSRGAIPASAAMTDSPLRGDSSSAVAAETDERRLLAAGP

SEQ ID NO: 41652 - protein, 915 aa, Homo sapiens
MRPGTGAERGGLMMGHPGMHYAPMGMHPMGQRANMPPVPHGMMPQMMPPMGGPPMGQMPGMMSSVMPGMMMSHMSQASMQPALPPGVNSMDVAAGTASGAKSMWTEHKSPDGRTYYYNTETKQSTWEKPDDLKTPAEQLLSKCPWKEYKSDSGKPYYYNSQTKESRWAKPKELEDLEGYQNTIVAGSLITKSNLHAMIKAEESSKQEECTTTSTAPVPTTEIPTTMSTMAAAEAAAAVVAAAAAAAAAAAAANANASTSASNTVSGTVPVVPEPEVTSIVATVVDNENTVTISTEEQAQLTSTPAIQDQSVEVSSNTGEETSKQETVADFTPKKEEEESQPAKKTYTWNTKEEAKQAFKELLKEKRVPSNASWEQAMKMIINDPRYSALAKLSEKKQAFNAYKVQTEKEEKEEARSKYKEAKESFQRFLENHEKMTSTTRYKKAEQMFGEMEVWNAISERDRLEIYEDVLFFLSKKEKEQAKQLRKRNWEALKNILDNMANVTYSTTWSEAQQYLMDNPTFAEDEELQNMDKEDALICFEEHIRALEKEEEEEKQKSLLRERRRQRKNRESFQIFLDELHEHGQLHSMSSWMELYPTISSDIRFTNMLGQPGSTALDLFKFYVEDLKARYHDEKKIIKDILKDKGFVVEVNTTFEDFVAIISSTKRSTTLDAGNIKLAFNSLLEKAEAREREREKEEARKMKRKESAFKSMLKQAAPPIELDAVWEDIRERFVKEPAFEDITLESERKRIFKDFMHVLEHECQHHHSKNKKHSKKSKKHHRKRSRSRSGSDSDDDDSHSKKKRQRSESRSASEHSSSAESERSYKKSKKHKKKSKKRRHKSDSPESDAEREKDKKEKDRESEKDRTRQRSESKHKSPKKKTGKDSGNWDTSGSELSEGELEKRRRTLLEQLDDDQ

SEQ ID NO: 41653 - protein, 30 aa, Homo sapiens
IITITGTQDQIQNAQYLPQNSVKQYSGKFF

SEQ ID NO: 41654 - protein, 5 aa, Homo sapiens
MGALS

SEQ ID NO: 41655 - protein, 751 aa, Homo sapiens
RMSQWYELQQLDSKFLEQVHQLYDDSFPMEIRQYLAQWLEKQDWEHAANDVSFATIRFHDLLSQLDDQYSRFSLENNFLLQHNIRKSKRNLQDNFQEDPIQMSMIIYSCLKEERKILENAQRFNQAQSGNIQSTVMLDKQKELDSKVRNVKDKVMCIEHEIKSLEDLQDEYDFKCKTLQNREHETNGVAKSDQKQEQLLLKKMYLMLDNKRKEVVHKIIELLNVTELTQNALINDELVEWKRRQQSACIGGPPNACLDQLQNWFTIVAESLQQVRQQLKKLEELEQKYTYEHDPITKNKQVLWDRTFSLFQQLIQSSFVVERQPCMPTHPQRPLVLKTGVQFTVKLRLLVKLQELNYNLKVKVLFDKDVNERNTVKGFRKFNILGTHTKVMNMEESTNGSLAAEFRHLQLKEQKNAGTRTNEGPLIVTEELHSLSFETQLCQPGLVIDLETTSLPVVVISNVSQLPSGWASILWYNMLVAEPRNLSFFLTPPCARWAQLSEVLSWQFSSVTKRGLNVDQLNMLGEKLLGPNASPDGLIPWTRFCKENINDKNFPFWLWIESILELIKKHLLPLWNDGCIMGFISKERERALLKDQQPGTFLLRFSESSREGAITFTWVERSQNGGEPDFHAVEPYTKKELSAVTFPDIIRNYKVMAAENIPENPLKYLYPNIDKDHAFGKYYSRPKEAPEPMELDGPKGTGYIKTELISVSEVHPSRLQTTDNLLPMSPEEFDEVSRIVGSVEFDSMMNTV

SEQ ID NO: 41656 - protein, 25 aa, Homo sapiens
IQDRSKFDELSASNLPPNLKITWSY

SEQ ID NO: 41657 - protein, 102 aa, Homo sapiens
IMSDQEAKPSTEDLGDKKEGEYIKLKVIGQDSSEIHFKVKMTTHLKKLKESYCQRQGVPMNSLRFLFEGQRIADNHTPKELGMEEEDVIEVYQEQTGGHSTV

SEQ ID NO: 41658 - protein, 52 aa, Homo sapiens
LTIQNRQAQIEVVPSASALIIKALKEPPRDRKKQKNIKHSGNITFDEIINIA

SEQ ID NO: 41659 - protein, 10 aa, Homo sapiens
LASAIAFFLF

SEQ ID NO: 41660 - protein, 41 aa, Homo sapiens
IWGDFIFRSLYKGFLMSITCWMRLCSSPPLSEWSVSINWTP

SEQ ID NO: 41661 - protein, 521 aa, Homo sapiens
MFVFGYDNYMAHAFPQDELNPIHCRGRGPDRGDPSNLNINDVLGNYSLTLVDALDTLAIMGNSSEFQKAVKLVINTVSFDKDSTVQVFEATIRVLGSLLSAHRIITDSKQPFGDMTIKDYDNELLYMAHDLAVRLLPAFENTKTGIPYPRVNLKTGVPPDTNNETCTAGAGSLLVEFGILSRLLGDSTFEWVARRAVKALWNLRSNDTGLLGNVVNIQTGHWVGKQSGLGAGLDSFYEYLLKSYILFGEKEDLEMFNAAYQSIQNYLRRGREACNEGEGDPPLYVNVNMFSGQLMNTWIDSLQAFFPGLQVLIGDVEDAICLHAFYYAIWKRYGALPERYNWQLQAPDVLFYPLRPELVESTYLLYQATKNPFYLHVGMDILQSLEKYTKVKCGYATLHHVIDKSTEDRMESFFLSETCKYLYLLFDEDNPVHKSGTRYMFTTEGHIVSVDEHLRELPWKEFFSEEGGQDQGGKSVHRPKPHELKVINSSSNCNRVPDERRYSLPLKSIYMRQIDQMVGLI

SEQ ID NO: 41662 - protein, 888 aa, Homo sapiens
LSAVCLARTAAEALIMATFISVQLKKTSEVDLAKPLVKFIQQTYPSGGEEQAQYCRAAEELSKLRRAAVGRPLDKHEGALETLLRYYDQICSIEPKFPFSENQICLTFTWKDAFDKGSLFGGSVKLALASLGYEKSCVLFNCAALASQIAAEQNLDNDEGLKIAAKHYQFASGAFLHIKETVLSALSREPTVDISPDTVGTLSLIMLAQAQEVFFLKATRDKMKDAIIAKLANQAADYFGDAFKQCQYKDTLPKYFYFQEVFPVLAAKHCIMQANAEYHQSILAKQQKKFGEEIARLQHAAELIKTVASRYDEYVNVKDFSDKINRALAAAKKDNDFIYHDRVPDLKDLDPIGKATLVKSTPVNVPISQKFTDLFEKMVPVSVQQSLAAYNQRKADLVNRSIAQMREATTLANGVLASLNLPAAIEDVSGDTVPQSILTKSRSVIEQGGIQTVDQLIKELPELLQRNREILDESLRLLDEEEATDNDLRAKFKERWQRTPSNELYKPLRAEGTNFRTVLDKAVQADGQVKECYQSHRDTIVLLCKPEPELNAAIPSANPAKTMQGSEVVNVLKSLLSNLDEVKKEREGLENDLKSVNFDMTSKFLTALAQDGVINEEALSVTELDRVYGGLTTKVQESLKKQEGLLKNIQVSHQEFSKMKQSNNEANLREEVLKNLATAYDNFVELVANLKEGTKFYNELTEILVRFQNKCSDIVFARKTERDELLKDLQQSIAREPSAPSIPTPAYQSSPAGGHAPTPPTPAPRTMPPTKPQPPARPPPPVLPANRAPSATAPSPVGAGTAAPAPSQTPGSAPPPQAQGPPYPTYPGYPGYCQMPMPMGYNPYAYGQYNMPYPPVYHQSPGQAPYPGPQQPSYPFPQPPQQSYYPQQ

SEQ ID NO: 41663 - protein, 16 aa, Homo sapiens
MTTLKMNFLYSPDILI

SEQ ID NO: 41664 - protein, 186 aa, Homo sapiens
RMRRMRRMWATQGLAVALALSVLPGSRALRPGDCEVCISYLGRFYQDLKDRDVTFSPATIENELIKFCREARGKENRLCYYIGATDDAATKIINEVSKPLAHHIPVEKICEKLKKKDSQICELKYDKQIDLSTVDLKKLRVKELKKILDDWGETCKGCAEKSDYIRKINELMPKYAPKAASARTDL

SEQ ID NO: 41665 - protein, 690 aa, Homo sapiens
RSLLGVFEEDATAISNYMNQLYQAMHRIYDAQNELSAATHLTSKLLKEYEKQRFPLGGDDEVMSSTLQQFSKVIDELSSCHAVLSTQLADAMMFPITQFKERDLKEILTLKEVFQIASNDHDAAINRYSRLSKKRENDKVKYEVTEDVYTSRKKQHQTMMHYFCALNTLQYKKKIALLEPLLGYMQAQISFFKMGSENLNEQLEEFLANIGTSVQNVRREMDSDIETMQQTIEDLEVASDPLYVPDPDPTKFPVNRNLTRKAGYLNARNKTGLVSSTWDRQFYFTQGGNLMSQARGDVAGGLAMDIDNCSVMAVDCEDRRYCFQITSFDGKKSSILQAESKKDHEEWICTINNISKQIYLSENPEETAARVNQSALEAVTPSPSFQQRHESLRPAAGQSRPPTARTSSSGSLGSESTNLAALSLDSLVAPDTPIQFDIISPVCEDQPGQAKAFGQGGRRTNPFGESGGSTKSETEDSILHQLFIVRFLGSMEVKSDDHPDVVYETMRQILAARAIHNIFRMTESHLLVTCDCLKLIDPQTQVTRLTFPLPCVVLYATHQENKRLFGFVLRTSSGRSESNLSSVCYIFESNNEGEKICDSVGLAKQIALHAELDRRASEKQKEIERVKEKQQKELNKQKQIEKDLEEQSRLIAASSRPNQASSEGQFVVLSSSQSEESDLGEGGKKRESEA

SEQ ID NO: 41666 - protein, 533 aa, Homo sapiens
KRYKIQKKVREHHRKLRKEAKKRGHKKPRKDPGVPNSAPFKEALLREAELRKQRLEELKQQQKLDRQKELEKKRKLETNPDIKPSNVEPMEKEFGLCKTENKAKSGKQNSKKLYCQELKKVIEASDVVLEVLDARDPLGCRCPQVEEAIVQSGQKKLVLILNKSDLVPKENLESWLNYLKKELPTVVFRASTKPKDKGKITKRVKAKKNAAPFRSEVCFGKEGLWKLLGGFQETCSKAIRVGVIGFPNVGKSSIINSLKQEQMCNVGVSMGLTRSMQVVPLDKQITIIDSPSFIVSPLNSSSALALRSPASIEVVKPMEAASAILSQADARQVVLKYTVPGYRNSLEFFTVLAQRRGMHQKGGIPNVEGAAKLLWSEWTGASLAYYCHPPTSWTPPPYFNESIVVDMKSGFNLEELEKNNAQSIRAIKGPHLANSILFQSSGLTNGIIEEKDIHEELPKRKERKQEEREDDKDSDQETVDEEVDENSSGMFAAEETGEALSEETTAGEQSTRSFILDKIIEEDDAYDFSTDYV

SEQ ID NO: 41667 - protein, 220 aa, Homo sapiens
TEPLSTLQLSSADRLPPPPPPDSGGEERKAENMDVNIAPLRAWDDFFPGSDRFARPDFRDISKWNNRVVSNLLYYQTNYLVVAAMMISIVGFLSPFNMILGGIVVVLVFTGFVWAAHNKDVLRRMKKRYPTTFVMVVMLASYFLISMFGGVMVFVFGITFPLLLMFIHASLRLRNLKNKLENKMEGIGLKRTPMGIVLDALEQQEEGINRLTDYISKVKE

SEQ ID NO: 41668 - protein, 452 aa, Homo sapiens
VCAREGEGVGGVGGGVPVPKRPAEGGGGCEGLREAMDVERLQEALKDFEKRGKKEVCPVLDQFLCHVAKTGETMIQWSQFKGYFIFKLEKVMDDFRTSAPEPRGPPNPNVEYIPFDEMKERILKIVTGFNGIPFTIQRLCELLTDPRRNYTGTDKFLRGVEKNVMVVSCVYPSSEKNNSNSLNRMNGVMFPGNSPSYTERSNINGPGTPRPLNRPKVSLSAPMTTNGLPESTDSKEANLQQNEEKNHSDSSTSESEVSSVSPLKNKHPDEDAVEAEGHEVKRLRFDKEGEVRETASQTTSSEISSVMVGETEASSSSQDKDKDSRCTRQHCTEEDEEEDEEEEEESFMTSREMIPERKNQEKESDDALTVNEETSEENNQMEESDVSQAEKDLLHSEGSENEGPVSSSSSDCRETEELVGSNSSKTGEILSESSMENDDEATEVTDEPMEQD

SEQ ID NO: 41669 - protein, 644 aa, Homo sapiens
VESCVRQRTEGAAPQPRGRCVWEKTLPLRRDPPARGHRGARDDAPSCGVDSVSGPPRRRRNMESKGASSCRLLFCLLISATVFRPGLGWYTVNSAYGDTIIIPCRLDVPQNLMFGKWKYEKPDGSPVFIAFRSSTKKSVQYDDVPEYKDRLNLSENYTLSISNARISDEKRFVCMLVTEDNVFEAPTIVKVFKQPSKPEIVSKALFLETEQLKKLGDCISEDSYPDGNITWYRNGKVLHPLEGAVVIIFKKEMDPVTQLYTMTSTLEYKTTKADIQMPFTCSVTYYGPSGQKTIHSEQAVFDIYYPTEQVTIQVLPPKNAIKEGDNITLKCLGNGNPPPEEFLFYLPGQPEGIRSSNTYTLTDVRRNATGDYKCSLIDKKSMIASTAITVHYLDLSLNPSGEVTRQIGDALPVSCTISASRNATVVWMKDNIRLRSSPSFSSLHYQDAGNYVCETALQEVEGLKKRESLTLIVEGKPQIKMTKKTDPSGLSKTIICHVEGFPKPAIQWTITGSGSVINQTEESPYINGRYYSKIIISPEENVTLTCTAENQLERTVNSLNVSAISIPEHDEADEISDENREKVNDQAKLIVGIVVGLLLAALVAGVVYWLYMKKSKTASKHVNKDLGNMEENKKLEENNHKTEA

SEQ ID NO: 41670 - protein, 404 aa, Homo sapiens
LESTMNGQLDLSGKLIIKAQLGEDIRRIPIHNEDITYDELVLMMQRVFRGKLLSNDEVTIKYKDEDGDLITIFDSSDLSFAIQCSRILKLTLFVNGQPRPLESSQVKYLRRELIELRNKVNRLLDSLEPPGEPGPSTNIPENDTVDGREEKSASDSSGKQSTQVMAASMSAFDPLKNQDEINKNVMSAFGLTDDQVSGPPSAPAEDRSGTPDSIASSSSAAHPPGVQPQQPPYTGAQTQAGQIEGQMYQQYQQQAGYGAQQPQAPPQQPQQYGIQYSASYSQQTGPQQPQQFQGYGQQPTSQAPAPAFSGQPQQLPAQPPQQYQASNYPAQTYTAQTSQPTNYTVAPASQPGMAPSQPGAYQPRPGFTSLPGSTMTPPPSGPNPYARNRPPFGQGYTQPGPGYR

SEQ ID NO: 41671 - protein, 25 aa, Homo sapiens
RVNLGQMHGFSPRTVTLSRGTSART

SEQ ID NO: 41672 - protein, 23 aa, Homo sapiens
LELINQLDGFDPRGNIKVLMATN

SEQ ID NO: 41673 - protein, 1203 aa, Homo sapiens
RRLLRQTLRRVGGARAVREAVMRAVLTWRDKAEHCINDIAFKPDGTQLILAAGSRLLVYDTSDGTLLQPLKGHKDTVYCVAYAKDGKRFASGSADKSVIIWTSKLEGILKYTHNDAIQCVSYNPITHQLASCSSSDFGLWSPEQKSVSKHKSSSKIICCSWTNDGQYLALGMFNGIISIRNKNGEEKVKIERPGGSLSPIWSICWNPSREERNDILAVADWGQKVSFYQLSGKQIGKDRALNFDPCCISYFTKGEYILLGGSDKQVSLFTKDGVRLGTVGEQNSWVWTCQAKPDSNYVVVGCQDGTISFYQLIFSTVHGLYKDRYAYRDSMTDVIVQHLITEQKVRIKCKELVKKIAIYRNRLAIQLPEKILIYELYSEDLSDMHYRVKEKIIKKFECNLLVVCANHIILCQEKRLQCLSFSGVKEREWQMESLIRYIKVIGGPPGREGLLVGLKNGQILKIFVDNLFAIVLLKQATAVRCLDMSASRKKLAVVDENDTCLVYDIDTKELLFQEPNANSVAWNTQCEDMLCFSGGGYLNIKASTFPVHRQKLQGFVVGYNGSKIFCLHVFSISAVEVPQSAPMYQYLDRKLFKEAYQIACLGVTDTDWRELAMEALEGLDFETAKKAFIRVQDLRYLELISSIEERKKRGETNNDLFLADVFSYQGKFHEAAKLYKRSGHENLALEMYTDLCMFEYAKDFLGSGDPKETKMLITKQADWARNIKEPKAAVEMYISAGEHVKAIEICGDHGWVDMLIDIARKLDKAEREPLLLCATYLKKLDSPGYAAETYLKMGDLKSLVQLHVETQRWDEAFALGEKHPEFKDDIYMPYAQWLAENDRFEEAQKAFHKAGRQREAVQVLEQLTNNAVAESRFNDAAYYYWMLSMQCLDIAQDPAQKDTMLGKFYHFQRLAELYHGYHAIHRHTEDPFSVHRPETLFNISRFLLHSLPKDTPSGISKVKILFTLAKQSKALGAYRLARHAYDKLRGLYIPARFQKSIELGTLTIRAKPFHDSEELVPLCYRCSTNNPLLNNLGNVCINCRQPFIFSASSYDVLHLVEFYLEEGITDEEAISLIDLEVLRPKRDDRQLEIANNSSQILRLVETKDSIGDEDPFTAKLSFEQGGSEFVPVVVSRLVLRSMSRRDVLIKRWPPPLRWQYFRSLLPDASITMCPSCFQMFHSEDYELLVLQHGCCPYCRRCKDDPGP

SEQ ID NO: 41674 - protein, 354 aa, Homo sapiens
VPASLSHQPEAAPAACAPGSTMTDQAFVTLTTNDAYAKGALVLGSSLKQHRTTRRLVVLATPQVSDSMRKVLETVFDEVIMVDVLDSGDSAHLTLMKRPELGVTLTKLHCWSLTQYSKCVFMDADTLVLANIDDLFDREELSAAPDPGWPDCFNSGVFVYQPSVETYNQLLHLASEQGSFDGGDQGILNTFFSSWATTDIRKHLPFIYNLSSISIYSYLPAFKVFGASAKVVHFLGRVKPWNYTYDPKTKSVKSEAHDPNMTHPEFLILWWNIFTTNVLPLLQQFGLVKDTCSYVNVEDVSGAISHLSLGEIPAMAQPFVSSEERKERWEQGQADYMGADSFDNIKRKLDTYLQ

SEQ ID NO: 41675 - protein, 176 aa, Homo sapiens
VLGSGGVGKSALTVQFVTGSFIEKYDPTIEDFYRKEIEVDSSPSVLEILDTAGTEQFASMRDLYIKNGQGFILVYSLVNQQSFQDIKPMRDQIIRVKRYERVPMILVGNKVDLEGEREVSYGEGKALAEEWSCPFMETSAKNKASVDELFAEIVRQMNYAAQPNGDEGCCSACVIL

SEQ ID NO: 41676 - protein, 11 aa, Homo sapiens
KKHLEINPDHS

SEQ ID NO: 41677 - protein, 1028 aa, Homo sapiens
LGHSWTGSRAGAHTGAPAWPSRRLRDLPAGGMWRLRRAAVACEVCQSLVKHSSGIKGSLPLQKLHLVSRSIYHSHHPTLKLQRPQLRTSFQQFSSLTNLPLRKLKFSPIKYGYQPRRNFWPARLATRLLKLRYLILGSAVGGGYTAKKTFDQWKDMIPDLSEYKWIVPDIVWEIDEYIDFEKIRKALPSSEDLVKLAPDFDKIVESLSLLKDFFTSGSPEETAFRATDRGSESDKHFRKGLLGELILLQQQIQEHEEEARRAAGQYSTSYAQQKRKVSDKEKIDQLQEELLHTQLKYQRILERLEKENKELRKLVLQKDDKGIHHRKLKKSLIDMYSEVLDVLSDYDASYNTQDHLPRVVVVGDQSAGKTSVLEMIAQARIFPRGSGEMMTRSPVKVTLSEGPHHVALFKDSSREFDLTKEEDLAALRHEIELRMRKNVKEGCTVSPETISLNVKGPGLQRMVLVDLPGVINTVTSGMAPDTKETIFSISKAYMQNPNAIILCIQDGSVDAERSIVTDLVSQMDPHGRRTIFVLTKVDLAEKNVASPSRIQQIIEGKLFPMKALGYFAVVTGKGNSSESIEAIREYEEEFFQNSKLLKTSMLKAHQVTTRNLSLAVSDCFWKMVRESVEQQADSFKATRFNLETEWKNNYPRLRELDRNELFEKAKNEILDEVISLSQVTPKHWEEILQQSLWERVSTHVIENIYLPAAQTMNSGTFNTTVDIKLKQWTDKQLPNKAVEVAWETLQEEFSRFMTEPKGKEHDDIFDKLKEAVKEESIKRHKWNDFAEDSLRVIQHNALEDRSISDKQQWDAAIYFMEEALQARLKDTENAIENMVGPDWKKRWLYWKNRTQEQCVHNETKNELEKMLKCNEEHPAYLASDEITTVRKNLESRGVEVDPSLIKDTWHQVYRRHFLKTALNHCNLCRRGFYYYQRHFVDSELECNDVVLFWRIQRMLAITANTLRQQLTNTEVRRLEKNVKEVLEDFAEDGEKKIKLLTGKRVQLAEDLKKVREIQEKLDAFIEALHQEK

SEQ ID NO: 41678 - protein, 525 aa, Homo sapiens
IMSDNGELEDKPPAPPVRMSSTIFSTGGKDPLSANHSLKPLPSVPEEKKPRHKIISIFSGTEKGSKKKEKERPEISPPSDFEHTIHVGFDAVTGEFTGMPEQWARLLQTSNITKLEQKKNPQAVLDVLKFYDSNTVKQKYLSFTPPEKDGFPSGTPALNAKGTEAPAVVTEEEDDDEETAPPVIAPRPDHTKSIYTRSVIDPVPAPVGDSHVDGAAKSLDKQKKKTKMTDEEIMEKLRTIVSIGDPKKKYTRYEKIGQGASGTVFTATDVALGQEVAIKQINLQKQPKKELIINEILVMKELKNPNIVNFLDSYLVGDELFVVMEYLAGGSLTDVVTETCMDEAQIAAVCRECLQALEFLHANQVIHRDIKSDNVLLGMEGSVKLTDFGFCAQITPEQSKRSTMVGTPYWMAPEVVTRKAYGPKVDIWSLGIMAIEMVEGEPPYLNENPLRALYLIATNGTPELQNPEKLSPIFRDFLNRCLEMDVEKRGSAKELLQHPFLKLAKPLSSLTPLIMAAKEAMKSNR

SEQ ID NO: 41679 - protein, 22 aa, Homo sapiens
MHQKNEKTEENSMEERNPLSLF

SEQ ID NO: 41680 - protein, 23 aa, Homo sapiens
MNPFVLRPSSMWLLKMLVLCPLK

SEQ ID NO: 41681 - protein, 32 aa, Homo sapiens
VAAERDLCGEPEMVVDYVCAAAWGSAARTEGD

SEQ ID NO: 41682 - protein, 680 aa, Homo sapiens
LVVMPGFLVRILPLLLVLLLLGPTRGLRNATQRMFEIDYSRDSFLKDGQPFRYISGSIHYSRVPRFYWKDRLLKMKMAGLNAIQTYVPWNFHEPWPGQYQFSEDHDVEYFLRLAHELGLLVILRPGPYICAEWEMGGLPAWLLEKESILLRSSDPDYLAAVDKWLGVLLPKMKPLLYQNGGPVITVQVENEYGSYFACDFDYLRFLQKRFRHHLGDDVVLFTTDGAHKTFLKCGALQGLYTTVDFGTGSNITDAFLSQRKCEPKGPLINSEFYTGWLDHWGQPHSTIKTEAVASSLYDILARGASVNLYMFIGGTNFAYWNGANSPYAAQPTSYDYDAPLSEAGDLTEKYFALRNIIQKFEKVPEGPIPPSTPKFAYGKVTLEKLKTVGAALDILCPSGPIKSLYPLTFIQVKQHYGFVLYRTTLPQDCSNPAPLSSPLNGVHDRAYVAVDGIPQGVLERNNVITLNITGKAGATLDLLVENMGRVNYGAYINDFKGLVSNLTLSSNILTDWTIFPLDTEDAVCSHLGGWGHRDSGHHDEAWAHNSSNYTLPAFYMGNFSIPSGIPDLPQDTFIQFPGWTKGQVWINGFNLGRYWPARGPQLTLFVPQHILMTSAPNTITVLELEWAPCSSDDPELCAVTFVDRPVIGSSVTYDHPSKPVEKRLMPPPPQKNKDSWLDHV

SEQ ID NO: 41683 - protein, 20 aa, Homo sapiens
MAFWTGSIVCLASTQGMLMV

SEQ ID NO: 41684 - protein, 374 aa, Homo sapiens
LVQRALPGQGQAEGSDGADGAKRRAMAHQTGIHATEELKEFFAKARAGSVRLIKVVIEDEQLVLGASQEPVGRWDQDYDRAVLPLLDAQQPCYLLYRLDSQNAQGFEWLFLAWSPDNSPVRLKMLYAATRATVKKEFGGGHIKDELFGTVKDDLSFAGYQKHLSSCAAPAPLTSAERELQQIRINEVKTEISVESKHQTLQGLAFPLQPEAQRALQQLKQKMVNYIQMKLDLERETIELVHTEPTDVAQLPSRVPRDAARYHFFLYKHTHEGDPLESVVFIYSMPGYKCSIKERMLYSSCKSRLLDSVEQDFHLEIAKKIEIGDGAELTAEFLYDEVHPKQHAFKQAFAKPKGPGGKRGHKRLIRGPGENGDDS

SEQ ID NO: 41685 - protein, 11 aa, Homo sapiens
MKMLLAFAVST

SEQ ID NO: 41686 - protein, 482 aa, Homo sapiens
VHDLLPPEVCSLLNPAAIYANNEISLRDVEVYGFDYDYTLAQYADALHPEIFSTARDILIEHYKYPEGIRKYDYNPSFAIRGLHYDIQKSLLMKIDAFHYVQLGTAYRGLQPVPDEEVIELYGGTQHIPLYQMSGFYGKGPSIKQFMDIFSLPEMALLSCVVDYFLGHSLEFDQAHLYKDVTDAIRDVHVKGLMYQWIEQDMEKYILRGDETFAVLSRLVAHGKQLFLITNSPFSFVDKGMRHMVGPDWRQLFDVVIVQADKPSFFTDRRKPFRKLDEKGSLQWDRITRLEKGKIYRQGNLFDFLRLTEWRGPRVLYFGDHLYSDLADLMLRHGWRTGAIIPELEREIRIINTEQYMHSLTWQQALTGLLERMQTYQDAESRQVLAAWMKERQELRCITKALFNAQFGSIFRTFHNPTYFSRRLVRFSDLYMASLSCLLNYRVDFTFYPRRTPLQHEAPLWMDQLCTGCMKTPFLGDMAHIR

SEQ ID NO: 41687 - protein, 435 aa, Homo sapiens
LFKMASPVAAQAGKLLRALALRPRFLAAGSQAVQLTSRRWLNLQEYQSKKLMSDNGVRVQRFFVADTANEALEAAKRLNAKEIVLKAQILAGGRGKGVFNSGLKGGVHLTKDPNVVGQLAKQMIGYNLATKQTPKEGVKVNKVMVAEALDISRETYLAILMDRSCNGPVLVGSPQGGVDIEEVAASNPELIFKEQIDIFEGIKDSQAQRMAENLGFVGPLKSQAADQITKLYNLFLKIDATQVEVNPFGETPEGQVVCFDAKINFDDNAEFRQKDIFAMDDKSENEPIENEAAKYDLKYIGLDGNIACFVNGAGLAMATCDIIFLNGGKPANFLDLGGGVKEAQVYQAFKLLTADPKVEAILVNIFGGIVNCAIIANGITKACRELELKVPLVVRLEGTNVQEAQKILNNSGLPITSAIDLEDAAKKAVASVAKK

SEQ ID NO: 41688 - protein, 76 aa, Homo sapiens
RKMDSEVQRDGRILDLIDDAWREDKLPYEDVAIPLNELPEPEQDNGGTTESVKEQEMKWTDLALQYLHENVPPIGN

SEQ ID NO: 41689 - protein, 18 aa, Homo sapiens
MASLYVGDLHPDVTEAML

SEQ ID NO: 41690 - protein, 56 aa, Homo sapiens
IIGPPRTIYENRIYSLKIECGPKYPEAPPFLRFVTKINMNGVNSSNGVVDPRAYQC

SEQ ID NO: 41691 - protein, 515 aa, Homo sapiens
KMSISSDEVNFLVYRYLQESGFSHSAFTFGIESHISQSNINGALVPPAALISIIQKGLQYVEAEVSINEDGTLFDGRPIESLSLIDAVMPDVVQTRQQAYRDKLAQQQAAAAAAAAAAASQQGSAKNGENTANGEENGAHTIANNHTDMMEVDGDVEIPPNKAVVLRGHESEVFICAWNPVSDLLASGSGDSTARIWNLSENSTSGSTQLVLRHCIREGGQDVPSNKDVTSLDWNSEGTLLATGSYDGFARIWTKDGNLASTLGQHKGPIFALKWNKKGNFILSAGVDKTTIIWDAHTGEAKQQFPFHSAPALDVDWQSNNTFASCSTDMCIHVCKLGQDRPIKTFQGHTNEVNAIKWDPTGNLLASCSDDMTLKIWSMKQDNCVHDLQAHNKEIYTIKWSPTGPGTNNPNANLMLASASFDSTVRLWDVDRGICIHTLTKHQEPVYSVAFSPDGRYLASGSFDKCVHIWNTQTGALVHSYRGTGGIFEVCWNAAGDKVGASASDGSVCVLDLRK

SEQ ID NO: 41692 - protein, 22 aa, Homo sapiens
MLGSVVERLARLSWSRGAGILM

SEQ ID NO: 41693 - protein, 214 aa, Homo sapiens
LSRQPERPAMAASTASHRPIKGILKNKTSTTSSMVASAEQPRGNVDEELSKKSQKWDEMNILATYHPADKDYGLMKIDEPSTPYHSMMGDDEDACSDTEATEAMAPDILARKLAAAEGLEPKYRIQEQESSGEEDSDLSPEEREKKRQFEMKRKLHYNEGLNIKLARQLISKDLHDDDEDEEMLETADGESMNTEESNQGSTPSDQQQNKLRSS

SEQ ID NO: 41694 - protein, 23 aa, Homo sapiens
REKNPDMVAGEKKKFVMQPPQVV

SEQ ID NO: 41695 - protein, 52 aa, Homo sapiens
LDALFSWDTVFKLLAIAMVALIPGTLIKKFSQKHLQLNETSTANHIHSRKDT

SEQ ID NO: 41696 - protein, 490 aa, Homo sapiens
KMAAHGGSAASSALKGLIQQFTTITGASESVGKHMLEACNNNLEMAVTMFLDGGGIAEEPSTSSASVSTVRPHTEEEVRAPIPQKQEILVEPEPLFGAPKRRRPARSIFDGFRDFQTETIRQEQELRNGGAIDKKLTTLADLFRPPIDLMHKGSFETAKECGQMQNKWLMINIQNVQDFACQCLNRDVWSNEAVKNIIREHFIFWQVYHDSEEGQRYIQFYKLGDFPYVSILDPRTGQKLVEWHQLDVSSFLDQVTGFLGEHGQLDGLSSSPPKKCARSESLIDASEDSQLEAAIRASLQETHFDSTQTKQDSRSDEESESELFSGSEEFISVCGSDEEEEVENLAKSRKSPHKDLGHRKEENRRPLTEPPVRTDPGTATNHQGLPAVDSEILEMPPEKADGVVEGIDVNGPKAQLMLRYPDGKREQITLPEQAKLLALVKHVQSKGYPNERFELLTNFPRRKLSHLDYDITLQEAGLCPQETVFVQERN

SEQ ID NO: 41697 - protein, 230 aa, Homo sapiens
RSRSSSTSSSGSSTSTGSSSGSSSSSASSRSGSSSTSRSSSSSSSSGSPSPSRRRHDNRRRSRSKSKPPKRDEKERKRRSPSPKPTKVHIGRLTRNVTKDHIMEIFSTYGKIKMIDMPVERMHPHLSKGYACVEFENPDEAEKALKHMDGGQIDGQEITATVVLAPWPRPTPRRFSPPRRMLPPPPMWLRSPPRMRRRSRSPRRRSPVRRRSRSPGRRRHRSRSSSNSSQ

SEQ ID NO: 41698 - protein, 19 aa, Homo sapiens
IEIMRLSFKWKHYSSSEPL

SEQ ID NO: 41699 - protein, 16 aa, Homo sapiens
MNFYITVHVLCFAVIP

SEQ ID NO: 41700 - protein, 174 aa, Homo sapiens
TMALITASTALTIMVMNIHFCGAEARPVPHWARVVILKYMSRVLFVYDVGESCLSPHHSRERDHLTKVYSKLPESNLKAARNKDLSRKKDMNKRLKNDLGCQGKNPQEAESYCAQYKVLTRNIEYIAKCLKDHKATNSKGSEWKKVAKVIDRFFMWIFFIMVFVMTILIIARAD

SEQ ID NO: 41701 - protein, 61 aa, Homo sapiens
VTMLVATGQCSRCFMFTFSTFSFNCHNSEVDSVRDRLPQDHSAPANSMQLTLTLNTLQLHS

SEQ ID NO: 41702 - protein, 161 aa, Homo sapiens
VKKGNLKAKKPKKGKPRCSRNPVLVRGIGRYSRSAMYSRKAMYKRKYSAAKSKVEKKKKEKVLATVTKPVGGDKNGGTRVVKLRKMPRYYPTEDVPRKLLSHGKKKPFSQHVRKLRASITPGTILIILTGRHRGKRVVFLKQLASGLLLVTGPLVLNRVPL

SEQ ID NO: 41703 - protein, 15 aa, Homo sapiens
ISQKKLKKQKLMAQE

SEQ ID NO: 41704 - protein, 138 aa, Homo sapiens
LARMVLESVARIVKVQLPAYLKRLPVPESITGFARLTVSEWLRLLPFLGVLALLGYLAVRPFLPKKKQQKDSLINLKIQKENPKVVNEINIEDLCLTKAAYCRCWRSKTFPACDGSHNKHNELTGDNVGPLILKKKEV

SEQ ID NO: 41705 - protein, 43 aa, Homo sapiens
RGNTKMSIHLIHMRVVAQGFVVGAMTVGMGYSMYREFWAKPKP

SEQ ID NO: 41706 - protein, 56 aa, Homo sapiens
VAVVFLLASVEASGLRAAAPRGSLGIPARTGREGAGGPGRRHAHAPSLPGRASATR

SEQ ID NO: 41707 - protein, 32 aa, Homo sapiens
IGPNRLPSFNYPSDHLSLVCDFSFTEESDGLS

SEQ ID NO: 41708 - protein, 1053 aa, Homo sapiens
IMSSAAEPPPPPPPESAPSKPAASIASGGSNSSNKGGPEGVAAQAVASAASAGPADAEMEEIFDDASPGKQKEIQEPDPTYEEKMQTDRANRFEYLLKQTELFAHFIQPAAQKTPTSPLKMKPGRPRIKKDEKQNLLSVGDYRHRRTEQEEDEELLTESSKATNVCTRFEDSPSYVKWGKLRDYQVRGLNWLISLYENGINGILADEMGLGKTLQTISLLGYMKHYRNIPGPHMVLVPKSTLHNWMSEFKRWVPTLRSVCLIGDKEQRAAFVRDVLLPGEWDVCVTSYEMLIKEKSVFKKFNWRYLVIDEAHRIKNEKSKLSEIVREFKTTNRLLLTGTPLQNNLHELWSLLNFLLPDVFNSADDFDSWFDTNNCLGDQKLVERLHMVLRPFLLRRIKADVEKSLPPKKEVKIYVGLSKMQREWYTRILMKDIDILNSAGKMDKMRLLNILMQLRKCCNHPYLFDGAEPGPPYTTDMHLVTNSGKMVVLDKLLPKLKEQGSRVLIFSQMTRVLDILEDYCMWRNYEYCRLDGQTPHDERQDSINAYNEPNSTKFVFMLSTRAGGLGINLATADVVILYDSDWNPQVDLQAMDRAHRIGQTKTVRVFRFITDNTVEERIVERAEMKLRLDSIVIQQGRLVDQNLNKIGKDEMLQMIRHGATHVFASKESEITDEDIDGILERGAKKTAEMNEKLSKMGESSLRNFTMDTESSVYNFEGEDYREKQKIAFTEWIEPPKRERKANYAVDAYFREALRVSEPKAPKAPRPPKQPNVQDFQFFPPRLFELLEKEILFYRKTIGYKVPRNPELPNAAQAQKEEQLKIDEAESLNDEELEEKEKLLTQGFTNWNKRDFNQFIKANEKWGRDDIENIAREVEGKTPEEVIEYSAVFWERCNELQDIEKIMAQIERGEARIQRRISIKKALDTKIGRYKAPFHQLRISYGTNKGKNYTEEEDRFLICMLHKLGFDKENVYDELRQCIRNSPQFRFDWFLKSRTAMELQRRCNTLITLIERENMELEEKEKAEKKKRGPKPSTQKRKMDGAPDGRGRKKKLKL

SEQ ID NO: 41709 - protein, 28 aa, Homo sapiens
LEHLASPRCRWPAVISRPFRIIRLSAEI

SEQ ID NO: 41710 - protein, 54 aa, Homo sapiens
VAPEQVKKHYRRAVLAVHPDKAAGQPYEQHAKMIFMELNDAWSEFENQGSRPLF

SEQ ID NO: 41711 - protein, 282 aa, Homo sapiens
LFQHRRTIGSAGLNLFWKLCVTVMRLVILDNYDLASEWAAKYICNRIIQFKPGQDRYFTLGLPTGSTPLGCYKKLIEYHKNGHLSFKYVKTFNMDEYVGLPRNHPESYHSYMWNNFFKHIDIDPNNAHILDGNAADLQAECDAFENKIKEAGGIDLFVGGIGPDGHIAFNEPGSSLVSRTRLKTLAMDTILANAKYFDGDLSKVPTMALTVGVGTVMDAREVMILITGAHKAFALYKAIEEGVNHMWTVSAFQQHPRTIFVCDEDATLELRVKTVKYFKGEH

SEQ ID NO: 41712 - protein, 495 aa, Homo sapiens
IMFEIKKICCIGAGYVGGPTCSVIAHMCPEIRVTVVDVNESRINAWNSPTLPIYEPGLKEVVESCRGKNLFFSTNIDDAIKEADLVFISVNTPTKTYGMGKGRAADLKYIEACARRIVQNSNGYKIVTEKSTVPVRAAESIRRIFDANTKPNLNLQVLSNPEFLAEGTAIKDLKNPDRVLIGGDETPEGQRAVQALCAVYEHWVPREKILTTNTWSSELSKLAANAFLAQRISSINSISALCEATGADVEEVATAIGMDQRIGNKFLKASVGFGGSCFQKDVLNLVYLCEALNLPEVARYWQQVIDMNDYQRRRFASRIIDSLFNTVTDKKIAILGFAFKKDTGDTRESSSIYISKYLMDEGAHLHIYDPKVPREQIVVDLSHPGVSEDDQVSRLVTISKDPYEACDGAHAVVICTEWDMFKELDYERIHKKMLKPAFIFDGRRVLDGLHNELQTIGFQIETIGKKVSSKRIPYAPSGEIPKFSLQDPPNKKPKV

SEQ ID NO: 41713 - protein, 77 aa, Homo sapiens
INLLRQSQSYCTDTECLQELPGPSGDNGISVTMILVAWMVIALILFLLRPPNLRGSSLPGKPTSPHNGQDPPAPPVD

SEQ ID NO: 41714 - protein, 262 aa, Homo sapiens
LRGRKGNLAICVIILLFILAVINLIITLVIWAVIRIGPNGCDSMEFHESGLLRFKQVSDMGVIHPLYKSTVGGRRNENLVITGNNQPIVFQQGTTKLSVENNKTSITSDIGMQFFDPRTQNILFSTDYETHEFHLPSGVKSLNVQKASTERITSNATSDLNIKVDGRAIVRGNEGVFIMGKTIEFHMGGNMELKAENSIILNGSVMVSTTRLPSSSSGDQLGSGDWVRYKLCMCADGTLFKVQVTSQNMGCQISDNPCGNTH

SEQ ID NO: 41715 - protein, 374 aa, Homo sapiens
LEGGDWTCGEFPPKRQKPPPPPSSSARAERLPACRCCGRPPRPAMPGPATDAGKIPFCDAKEEIRAGLESSEGGGGPERPGARGQRQNIVWRNVVLMSLLHLGAVYSLVLIPKAKPLTLLWAYFCFLLAALGVTAGAHRLWSHRSYRAKLPLRIFLAVANSMAFQNDIFEWSRDHRAHHKYSETDADPHNARRGFFFSHIGWLFVRKHRDVIEKGRKLDVTDLLADPVVRIQRKYYKISVVLMCFVVPTLVPWYIWGESLWNSYFLASILRYTISLNISWLVNSAAHMYGNRPYDKHISPRQNPLVALGAIGEGFHNYHHTFPFDYSASEFGLNFNPTTWFIDFMCWLGLATDRKRATKPMIEARKARTGDSSA

SEQ ID NO: 41716 - protein, 1230 aa, Homo sapiens
IRLPKVLASRMKLKEVDRTAMQAWSPAQNHPIYLATGTSAQQLDATFSTNASLEIFELDLSDPSLDMKSCATFSSSHRYHKLIWGPYKMDSKGDVSGVLIAGGENGNIILYDPSKIIAGDKEVVIAQNDKHTGPVRALDVNIFQTNLVASGANESEIYIWDLNNFATPMTPGAKTQPPEDISCIAWNRQVQHILASASPSGRATVWDLRKNEPIIKVSDHSNRMHCSGLAWHPDVATQMVLASEDDRLPVIQMWDLRFASSPLRVLENHARGILAIAWSMADPELLLSCGKDAKILCSNPNTGEVLYELPTNTQWCFDIQWCPRNPAVLSAASFDGRISVYSIMGGSTDGLRQKQVDKLSSSFGNLDPFGTGQPLPPLQIPQQTAQHSIVLPLKKPPKWIRRPVGASFSFGGKLVTFENVRMPSHQGAEQQQQQHHVFISQVVTEKEFLSRSDQLQQAVQSQGFINYCQKKIDASQTEFEKNVWSFLKVNFEDDSRGKYLELLGYRKEDLGKKIALALNKVDGANVALKDSDQVAQSDGEESPAAEEQLLGEHIKEEKEESEFLPSSGGTFNISVSGDIDGLITQALLTGNFESAVDLCLHDNRMADAIILAIAGGQELLARTQKKYFAKSQSKITRLITAVVMKNWKEIVESCDLKNWREALAAVLTYAKPDEFSALCDLLGTRLENEGDSLLQTQACLCYICAGNVEKLVACWTKAQDGSHPLSLQDLIEKVVILRKAVQLTQAMDTSTVGVLLAAKMSQYANLLAAQGSIAAALAFLPDNTNQPNIMQLRDRLCRAQGEPVAGHESPKIPYEKQQLPKGRPGPVAGHHQMPRVQTQQYYPHGENPPPPGFIMHGNVNPNAAGQLPTSPGHMHTQVPPYPQPQPYQPAQPYPFGTGGSAMYRPQQPVAPPTSNAYPNTPYISSASSYTGQSQLYAAQHQASSPTSSPATSFPPPPSSGASFQHGGPGAPPSSSAYALPPGTTGTLPAASELPASQRTGPQNGWNDPPALNRVPKKKKMPENFMPPVPITSPIMNPLGDPQSQMLQQQPSAPVPLSSQSSFPQPHLPGGQPFHGVQQPLGQTGMPPSFSKPNIEGAPGAPIGNTFQHVQSLPTKKITKKPIPDEHLILKTTFEDLIQRCLSSATDPQTKRKLDDASKRLEFLYDKLREQTLSPTITSGLHNIARSIETRNYSEGLTMHTHIVSTSNFSETSAFMPVLKVVLTQANKLGV

SEQ ID NO: 41717 - protein, 84 aa, Homo sapiens
LLGTLFTNCLCGTFCFPCLGCQVAADMNECCLCGTSVAMRTLYRTRYGIPGSICDDYMATLCCPHCTLCQIKRDINRRRAMRTF

SEQ ID NO: 41718 - protein, 504 aa, Homo sapiens
LTSARRTRRRRWLEHLTLCSKEMVMEKPSPLLVGREFVRQYYTLLNKAPEYLHRFYGRNSSYVHGGVDASGKPQEAVYGQNDIHHKVLSLNFSECHTKIRHVDAHATLSDGVVVQVMGLLSNSGQPERKFMQTFVLAPEGSVPNKFYVHNDMFRYEDEVFGDSEPELDEESEDEVEEEQEERQPSPEPVQENANSGYYEAHPVTNGIEEPLEESSHEPEPEPESETKTEELKPQVEEKNLEELEEKSTTPPPAEPVSLPQEPPKAFSWASVTSKNLPPSGTVSSSGIPPHVKAPVSQPRVEAKPEVQSQPPRVREQRPRERPGFPPRGPRPGRGDMEQNDSDNRRIIRYPDSHQLFVGNLPHDIDENELKEFFMSFGNVVELRINTKGVGGKLPNFGFVVFDDSEPVQRILIAKPIMFRGEVRLNVEEKKTRAARERETRGGGDDRRDIRRNDRGPGGPRGIVGGGMMRDRDGRGPPPRGGMAQKLGSGRGTGQMEGRFTGQRR

SEQ ID NO: 41719 - protein, 466 aa, Homo sapiens
TAFAMAATVNLELDPIFLKALGFLHSKSKDSAEKLKALLDESLARGIDSSYRPSQKDVEPPKISSTKNISIKQEPKISSSLPSGNNNGKVLTTEKVKKEAEKRPADKMKSDITEGVDIPKKPRLEKPETQSSPITVQSSKDLPMADLSSFEETSADDFAMEMGLACVVCRQMMVASGNQLVECQECHNLYHRDCHKPQVTDKEANDPRLVWYCARCTRQMKRMAQKTQKPPQKPAPAVVSVTPAVKDPLVKKPETKLKQETTFLAFKRTEVKTSTVISGNSSSASVSSSVTSGLTGWAAFAAKTSSAGPSTAKLSSTTQNNTGKPATSSANQKPVGLTGLATSSKGGIGSKIGSNNSTTPTVPLKPPPPLTLGKTGLSRSVSCDNVSKVGLPSPSSLVPGSSSQLSGNGNSGTSGPSGSTTSKTTSESSSSPSASLKGPTSQESQLNAMKRLQMVKKKAAQKKLKK

SEQ ID NO: 41720 - protein, 12 aa, Homo sapiens
VGPISLFSALLA

SEQ ID NO: 41721 - protein, 9 aa, Homo sapiens
MCLSLVMML

SEQ ID NO: 41722 - protein, 15 aa, Homo sapiens
KEQNGRNYIQASGLA

SEQ ID NO: 41723 - protein, 13 aa, Homo sapiens
MRISSHFVLWLGI

SEQ ID NO: 41724 - protein, 226 aa, Homo sapiens
LRDSEEKLAPGGRGSVNMGKGDPNKPRGKMSSYAFFVQTCREEHKKKHPDSSVNFAEFSKKCSERWKTMSAKEKSKFEDMAKSDKARYDREMKNYVPPKGDKKGKKKDPNAPKRPPSAFFLFCSEHRPKIKSEHPGLSIGDTAKKLGEMWSEQSAKDKQPYEQKAAKLKEKYEKDIAAYRAKGKSEAGKKGPGRPTGSKKKNEPEDEEEEEEEEDEDEEEEDEDEE

SEQ ID NO: 41725 - protein, 128 aa, Homo sapiens
ILSMNAFFNNTISSAVKQSILAKLQEAVEANLGTAMTYTLFEYAKDNKEQFMENHNPINSATSISNIISIETPNTAPSSKKKDKKEQLSKAQKRKLADKTDHKGELPRGWNWVDVVKHLSKTGSKDDE

SEQ ID NO: 41726 - protein, 4584 aa, Homo sapiens
LALLLLLLLLFQHFGDSDGSQRLEQTPLQFTHLEYNVTVQENSAAKTYVGHPVKMGVYITHPAWEVRYKIVSGDSENLFKAEEYILGDFCFLRIRTKGGNTAILNREVKDHYTLIVKALEKNTNVEARTKVRVQVLDTNDLRPLFSPTSYSVSLPENTAIRTSIARVSATDADIGTNGEFYYSFKDRTDMFAIHPTSGVIVLTGRLDYLETKLYEMEILAADRGMKLYGSSGISSMAKLTVHIEQANECAPVITAVTLSPSELDRDPAYAIVTVDDCDQGANGDIASLSIVAGDLLQQFRTVRSFPGSKEYKVKAIGGIDWDSHPFGYNLTLQAKDKGTPPQFSSVKVIHVTSPQFKAGPVKFEKDVYRAEISEFAPPNTPVVMVKAIPAYSHLRYVFKSTPGKAKFSLNYNTGLISILEPVKRQQAAHFELEVTTSDRKASTKVLVKVLGANSNPPEFTQTAYKAAFDENVPIGTTVMSLSAVDPDEGENGYVTYSIANLNHVPFAIDHFTGAVSTSENLDYELMPRVYTLRIRASDWGLPYRREVEVLATITLNNLNDNTPLFEKINCEGTIPRDLGVGEQITTVSAIDADELQLVQYQIEAGNELDFFSLNPNSGVLSLKRSLMDGLGAKVSFHSLRITATDGENFATPLYINITVAASHKLVNLQCEETGVAKMLAEKLLQANKLHNQGEVEDIFFDSHSVNAHIPQFRSTLPTGIQVKENQPVGSSVIFMNSTDLDTGFNGKLVYAVSGGNEDSCFMIDMETGMLKILSPLDRETTDKYTLNITVYDLGIPQKAAWRLLHVVVVDANDNPPEFLQESYFVEVSEDKEVHSEIIQVEATDKDLGPNGHVTYSIVTDTDTFSIDSVTGVVNIARPLDRELQHEHSLKIEARDQAREEPQLFSTVVVKVSLEDVNDNPPTFIPPNYRVKVREDLPEGTVIMWLEAHDPDLGQSGQVRYSLLDHGEGNFDVDKLSGAVRIVQQLDFEKKQVYNLTVRAKDKGKPVSLSSTCYVEVEVVDVNENLHPPVFSSFVEKGTVKEDAPVGSLVMTVSAHDEDARRDGEIRYSIRDGSGVGVFKIGEETGVIETSDRLDRESTSHYWLTVFATDQGVVPLSSFIEIYIEVEDVNDNAPQTSEPVYYPEIMENSPKDVSVVQIEAFDPDSSSNDKLMYKITSGNPQGFFSIHPKTGLITTTSRKLDREQQDEHILEVTVTDNGSPPKSTIARVIVKILDENDNKPQFLQKFYKIRLPEREKPDRERNARREPLYHVIATDKDEGPNAEISYSIEDGNEHGKFFIEPKTGVVSSKRFSAAGEYDILSIKAVDNGRPQKSSTTRLHIEWISKPKPSLEPISFEESFFTFTVMESDPVAHMIGVISVEPPGIPLWFDITGGNYDSHFDVDKGTGTIIVAKPLDAEQKSNYNLTVEATDGTTTILTQVFIKVIDTNDHRPQFSTSKYEVVIPEDTAPETEILQISAVDQDEKNKLIYTLQSSRDPLSLKKFRLDPATGSLYTSEKLDHEAVHQHTLTVMVRDQDVPVKRNFARIVVNVSDTNDHAPWFTASSYKGRVYESAAVGSVVLQVTALDKDKGKNAEVLYSIESGNIGNSFMIDPVLGSIKTAKELDRSNQAEYDLMVKATDKGSPPMSEITSVRIFVTIADNASPKFTSKEYSVELSETVSIGSFVGMVTAHSQSSVVYEIKDGNTGDAFDINPHSGTIITQKALDFETLPIYTLIIQGTNMAGLSTNTTVLVHLQDENDNAPVFMQAEYTGLISESASINSVVLTDRNVPLVIRAADADKDSNALLVYHIVEPSVHTYFAIDSSTGAIHTVLSLDYEETSIFHFTVQVHDMGTPRLFAEYAANVTVHVIDINDCPPVFAKPLYEASLLLPTYKGVKVITVNATDADSSAFSQLIYSITEGNIGEKFSMDYKTGALTVQNTTQLRSRYELTVRASDGRFAGLTSVKINVKESKESHLKFTQDVYSAVVKENSTEAETLAVITAIGNPINEPLFYHILNPDRRFKISRTSGVLSTTGTPFDREQQEAFDVVVEVTEEHKPSAVAHVVVKVIVEDQNDNAPVFVNLPYYAVVKVDTEVGHVIRYVTAVDRDSGRNGEVHYYLKEHHEHFQIGPLGEISLKKQFELDTLNKEYLVTVVAKDGGNPAFSAEVIVPITVMNKAMPVFEKPFYSAEIAESIQVHSPVVHVQANSPEGLKVFYSITDGDPFSQFTINFNTGVINVIAPLDFEAHPAYKLSIRATDSLTGAHAEVFVDIIVDDINDNPPVFAQQSYAVTLSEASVIGTSVVQVRATDSDSEPNRGISYQMFGNHSKSHDHFHVDSSTGLISLLRTLDYEQSRQHTIFVRAVDGGMPTLSSDVIVTVDVTDLNDNPPLFEQQIYEARISEHAPHGHFVTCVKAYDADSSDIDKLQYSILSGNDHKHFVIDSATGIITLSNLHRHALKPFYSLNLSVSDGVFRSSTQVHVTVIGGNLHSPAFLQNEYEVELAENAPLHTLVMEVKTTDGDSGIYGHVTYHIVNDFAKDRFYINERGQIFTLEKLDRETPAEKVISVRLMAKDAGGKVAFCTVNVILTDDNDNAPQFRATKYEVNIGSSAAKGTSVVKVLASDADEGSNADITYAIEADSESVKENLEINKLSGVITTKESLIGLENEFFTFFVRAVDNGSPSKESVVLVYVKILPPEMQLPKFSEPFYTFTVSEDVPIGTEIDLIRAEHSGTVLYSLVKGNTPESNRDESFVIDRQSGRLKLEKSLDHETTKWYQFSILARCTQDDHEMVASVDVSIQVKDANDNSPVFESSPYEAFIVENLPGGSRVIQIRASDADSGTNGQVMYSLDQSQSVEVIESFAINMETGWITTLKELDHEKRDNYQIKVVASDHGEKIQLSSTAIVDVTVTDVNDSPPRFTAEIYKGTVSEDDPQGGVIAILSTTDADSEEINRQVTYFITGGDPLGQFAVETIQNEWKVYVKKPLDREKRDNYLLTITATDGTFSSKAIVEVKVLDANDNSPVCEKTLYSDTIPEDVLPGKLIMQISATDADIRSNAEITYTLLGSGAEKFKLNPDTGELKTSTPLDREEQAVYHLLVRATDGGGRFCQASIVLTLEDVNDNAPEFSADPYAITVFENTEPGTLLTRVQATDADAGLNRKILYSLIDSADGQFSINELSGIIQLEKPLDRELQAVYTLSLKAVDQGLPRRLTATGTVIVSVLDINDNPPVFEYREYGATVSEDILVGTEVLQVYAASRDIEANAEITYSIISGNEHGKFSIDSKTGAVFIIENLDYESSHEYYLTVEATDGGTPSLSDVATVNVNVTDINDNTPVFSQDTYTTVISEDAVLEQSVITVMADDADGPSNSHIHYSIIDGNQGSSFTIDPVRGEVKVTKLLDRETISGYTLTVQASDNGSPPRVNTTTVNIDVSDVNDNAPVFSRGNYSVIIQENKPVGFSVLQLVVTDEDSSHNGPPFFFTIVTGNDEKAFEVNPQGVLLTSSAIKRKEKDHYLLQVKVADNGKPQLSSLTYIDIRVIEESIYPPAILPLEIFITSSGEEYSGGVIGKIHATDQDVYDTLTYSLDPQMDNLFSVSSTGGKLIAHKKLDIGQYLLNVSVTDGKFTTVADITVHIRQVTQEMLNHTIAIRFANLTPEEFVGDYWRNFQRALRNILGVRRNDIQIVSLQSSEPHPHLDVLLFVEKPGSAQISTKQLLHKINSSVTDIEEIIGVRILNVFQKLCAGLDCPWKFCDEKVSVDESVMSTHSTARLSFVTPRHHRAAVCLCKEGRCPPVHHGCEDDPCPEGSECVSDPWEEKHTCVCPSGRFGQCPGSSSMTLTGNSYVKYRLTENENKLEMKLTMRLRTYSTHAVVMYARGTDYSILEIHHGRLQYKFDCGSGPGIVSVQSIQVNDGQWHAVALEVNGNYARLVLDQVHTASGTAPGTLKTLNLDNYVFFGGHIRQQGTRHGRSPQVGNGFRGCMDSIYLNGQELPLNSKPRSYAHIEESVDVSPGCFLTATEDCASNPCQNGGVCNPSPAGGYYCKCSALYIGTHCEISVNPCSSKPCLYGGTCVVDNGGFVCQCRGLYTGQRCQLSPYCKDEPCKNGGTCFDSLDGAVCQCDSGFRGERCQSDIDECSGNPCLHGALCENTHGSYHCNCSHEYRGRHCEDAAPNQYVSTPWNIGLAEGIGIVVFVAGIFLLVVVFVLCRKMISRKKKHQAEPKDKHLGPATAFLQRPYFDSKLNKNIYSDIPPQVPVRPISYTPSIPSDSRNNLDRNSFEGSAIPEHPEFSTFNPESVHGHRKAVAVCSVAPNLPPPPPSNSPSDSDSIQKPSWDFDYDTKVVDLDPCLSKKPLEEKPSQPYSARESLSEVQSLSSFQSESCDDNGYHWDTSDWMPSVPLPDIQEFPNYEVIDEQTPLYSADPNAIDTDYYPGGYDIESDFPPPPEDFPAADELPPLPPEFSNQFESIHPPRDMPAAGSLGSSSRNRQRFNLNQYLPNFYPLDMSEPQTKGTGENSTCREPHAPYPPGYQRHFEAPAVESMPMSVYASTASCSDVSACCEVESEVMMSDYESGDDGHFEEVTIPPLDSQQHTEV

SEQ ID NO: 41727 - protein, 209 aa, Homo sapiens
LRGLSSLQAPQPSRVPWPMAAYSYRPGPGAGPGPAAGAALPDQSFLWNVFQRVDKDRSGVISDTELQQALSNGTWTPFNPVTVRSIISMFDRENKAGVNFSEFTGVWKYITDWQNVFRTYDRDNSGMIDKNELKQALSGFGYRLSDQFHDILIRKFDRQGRGQIAFDDFIQGCIVLQRLTDIFRRYDTDQDGWIQVSYEQYLSMVFSIV

SEQ ID NO: 41728 - protein, 26 aa, Homo sapiens
LQLFGLSLWLVLGCAASHGALWAQRR

SEQ ID NO: 41729 - protein, 257 aa, Homo sapiens
IRASAALEKLKLLCGEEKECSNPSNLLELYTQAILDMTYFEENKLVDEDFPEDSSSQKVKELISFLSEPEILVKENNMHPKHCNLLGDELLECLSWRRGALLYMYCHSLTKRREWLLRKSSLLKKYLLDGISYLLQMLNYRCPIQLNEGVSFQDLDTAKLLSAGIFSDIHLLAMMYSGEMCYWGSKYCADQQPENHEVDTSVSGAGCTTYKEPLDFREVGEKILKKYVSVCEGPLKEQEWNTTNAKQILNFFHHRCN

SEQ ID NO: 41730 - protein, 8 aa, Homo sapiens
IASSFANV

SEQ ID NO: 41731 - protein, 13 aa, Homo sapiens
LKDVTLQKQCVPL

SEQ ID NO: 41732 - protein, 31 aa, Homo sapiens
LPWGSDAPAPAVPRQRRDMRRPRDRGSGGGS

SEQ ID NO: 41733 - protein, 364 aa, Homo sapiens
VLSWELALFGWSRALRRRMALDVKSRAKRYEKLDFLGEGQFATVYKARDKNTNQIVAIKKIKLGHRSEAKDGINRTALREIKLLQELSHPNIIGLLDAFGHKSNISLVFDFMETDLEVIIKDNSLVLTPSHIKAYMLMTLQGLEYLHQHWILHRDLKPNNLLLDENGVLKLADFGLAKSFGSPNRAYTHQVVTRWYRAPELLFGARMYGVGVDMWAVGCILAELLLRVPFLPGDSDLDQLTRIFETLGTPTEEQWPDMCSLPDYVTFKSFPGIPLHHIFSAAGDDLLDLIQGLFLFNPCARITATQALKMKYFSNRPGPTPGCQLPRPNCPVETLKEQSNPALAIKRKRTEALEQGGLPKKLIF

SEQ ID NO: 41734 - protein, 1161 aa, Homo sapiens
LSPLAEESVLAPSLSRKMKLSRQFTVFGSAIFCVVIFSLYLMLDRGHLDYPRNPRREGSFPQGQLSMLQEKIDHLERLLAENNEIISNIRDSVINLSESVEDGPKSSQSNFSQGAGSHLLPSQLSLSVDTADCLFASQSGSHNSDVQMLDVYSLISFDNPDGGVWKQGFDITYESNEWDTEPLQVFVVPHSHNDPGWLKTFNDYFRDKTQYIFNNMVLKLKEDSRRKFIWSEISYLSKWWDIIDIQKKDAVKSLIENGQLEIVTGGWVMPDEATPHYFALIDQLIEGHQWLENNIGVKPRSGWAIDPFGHSPTMAYLLNRAGLSHMLIQRVHYAVKKHFALHKTLEFFWRQNWDLGSVTDILCHMMPFYSYDIPHTCGPDPKICCQFDFKRLPGGRFGCPWGVPPETIHPGNVQSRARMLLDQYRKKSKLFRTKVLLAPLGDDFRYCEYTEWDLQFKNYQQLFDYMNSQSKFKVKIQFGTLSDFFDALDKADETQRDKGQSMFPVLSGDFFTYADRDDHYWSGYFTSRPFYKRMDRIMESHLRAAEILYYFALRQAHKYKINKFLSSSLYTALTEARRNLGLFQHHDAITGTAKDWVVVDYGTRLFHSLMVLEKIIGNSAFLLILKDKLTYDSYSPDTFLEMDLKQKSQDSLPQKNIIRLSAEPRYLVVYNPLEQDRISLVSVYVSSPTVQVFSASGKPVEVQVSAVWDTANTISETAYEISFRAHIPPLGLKVYKILESASSNSHLADYVLYKNKVEDSGIFTIKNMINTEEGITLENSFVLLRFDQTGLMKQMMTKEDGKHHEVNVQFSWYGTTIKRDKSGAYLFLPDGNAKPYVYTTPPFVRVTHGRIYSEVTCFFDHVTHRVRLYHIQGIEGQSVEVSNIVDIRKVYNREIAMKISSDIKSQNRFYTDLNGYQIQPRMTLSKLPLQANVYPMTTMAYIQDAKHRLTLLSAQSLGVSSLNSGQIEVIMDRRLMQDDNRGLEQGIQDNKITANLFRILLEKRSAVNTEEEKKSVSYPSLLSHITSSLMNHPVIPMANKFSSPTLELQGEFSPLQSSLPCDIHLVNLRTIQSKVGNGHSNEAALILHRKGFDCRFSSKGTGLFCSTTQGKILVQKLLNKFIVESLTPSSLSLMHSPPGTQNISEINLSPMEISTFRIQLR

SEQ ID NO: 41735 - protein, 145 aa, Homo sapiens
KMACAAARSPADQDRFICIYPAYLNNKKTIAEGRRIPISKAVENPTATEIQDVCSAVGLNVFLEKNKMYSREWNRDVQYRGRVRVQLKQEDGSLCLVQFPSRKSVMLYAAEMIPKLKTRTQKTGGADQSLQQGEGSKKGKGKKKK

SEQ ID NO: 41736 - protein, 442 aa, Homo sapiens
VPYRQSPAARSRDALFLLWVLIMETKRVEIPGSVLDDLCSRFILHIPSEERDNAIRVCFQIELAHWFYLDFYMQNTPGLPQCGIRDFAKAVFSHCPFLLPQGEDVEKVLDEWKEYKMGVPTYGAIILDETLENVLLVQGYLAKSGWGFPKGKVNKEEAPHDCAAREVFEETGFDIKDYICKDDYIELRINDQLARLYIIPGIPKDTKFNPKTRREIRNIEWFSIEKLPCHRNDMTPKSKLGLAPNKFFMAIPFIRPLRDWLSRRFGDSSDSDNGFSSTGSTPAKPTVEKLSRTKFRHSQQLFPDGSPGDQWVKHRQPLQQKPYNNHSEMSDLLKGKNQSMRGNGRKQYQDSPNQKKRTNGLQPAKQQNSLMKCEKKLHPRKLQDNFETDAVYDLPSSSEDQLLEHAEGQPVACNGHCKFPFSSRAFLSFKFDHNAIMKILDL

SEQ ID NO: 41737 - protein, 745 aa, Homo sapiens
VCVSLQALFMGSPLRFDGRVVLVTGAGAGLGRAYALAFAERGALVVVNDLGGDFKGVGKGSLAADKVVEEIRRRGGKAVANYDSVEEGEKVVKTALDAFGRIDVVVNNAGILRDRSFARISDEDWDIIHRVHLRGSFQVTRAAWEHMKKQKYGRIIMTSSASGIYGNFGQANYSAAKLGLLGLANSLAIEGRKSNIHCNTIAPNAGSRMTQTVMPEDLVEALKPEYVAPLVLWLCHESCEENGGLFEVGAGWIGKLRWERTLGAIVRQKNHPMTPEAVKANWKKICDFENASKPQSIQESTGSIIEVLSKIDSEGGVSANHTSRATSTATSGFAGAIGQKLPPFSYAYTELEAIMYALGVGASIKDPKDLKFIYEGSSDFSCLPTFGVIIGQKSMMGGGLAEIPGLSINFAKVLHGEQYLELYKPLPRAGKLKCEAVVADVLDKGSGVVIIMDVYSYSEKELICHNQFSLFLVGSGGFGGKRTSDKVKVAVAIPNRPPDAVLTDTTSLNQAALYRLSGDWNPLHIDPNFASLAGFDKPILHGLCTFGFSARRVLQQFADNDVSRFKAIKARFAKPVYPGQTLQTEMWKEGNRIHFQTKVQETGDIVISNAYVDLAPTSGTSAKTPSEGGKLQSTFVFEEIGRRLKDIGPEVVKKVNAVFEWHITKGGNIGAKWTIDLKSGSGKVYQGPAKGAADTTIILSDEDFMEVVLGKLDPQKAFFSGRLKARGNIMLSQKLQMILKDYAKL

SEQ ID NO: 41738 - protein, 10 aa, Homo sapiens
KATIGPDLSV

SEQ ID NO: 41739 - protein, 51 aa, Homo sapiens
MQRPPAWSAGPGAATRAGRGGSTPWAPHSPPQVLRMASRETRKWTPWLLES

SEQ ID NO: 41740 - protein, 348 aa, Homo sapiens [sequence omitted]

SEQ ID NO: 41741 - protein, 479 aa, Homo sapiens
LTLSYRKVSEDLCQMTSMASLFSFTSPAVKRLLGWKQGDEEEKWAEKAVDALVKKLKKKKGAMEELEKALSSPGQPSKCVTIPRSLDGRLQVSHRKGLPHVIYCRVWRWPDLQSHHELKPLDICEFPFGSKQKEVCINPYHYKRVESPVLPPVLVPRHNEFNPQHSLLVQFRNLSHNEPHMPQNATFPDSFHQPNNTPFPLSPNSPYPPSPASSTYPNSPASSGPGSPFQLPADTPPPAYMPPDDQMGQDNSQPMDTSNNMIPQIMPSISSRDVQPVAYEEPKHWCSIVYYELNNRVGEAFHASSTSVLVDGFTDPSNNKSRFCLGLLSNVNRNSTIENTRRHIGKGVHLYYVGGEVYAECLSDSSIFVQSRNCNFHHGFHPTTVCKIPSSCSLKIFNNQEFAQLLAQSVNHGFEAVYELTKMCTIRMSFVKGWGAEYHRQDVTSTPCWIEIHLHGPLQWLDKVLTQMGSPLNPISSVS

SEQ ID NO: 41742 - protein, 122 aa, Homo sapiens
IPICALYVICQFILIRSGVNISMEQVTVVDASFFLKSTQNGILTMIQDTQWVIHSCCSSLQIQHQEFWDLHLPHFILGDQQLDQEEIWVLEMETCKDLDTCRKAEWKLAELFTSWIFNEGKT

SEQ ID NO: 41743 - protein, 1245 aa, Homo sapiens
LVLRLWPPPARGVEGVLPETSAGLCSSAGGRAAMEPRPTAPSSGAPGLAGVGETPSAAALAAARVELPGTAVPSVPEDAAPASRDGGGVRDEGPAAAGDGLGRPLGPTPSQSRFQVDLVSENAGRAAAAAAAAAAAAAAAGAGAGAKQTPADGEASGESEPAKGSEEAKGRFRVNFVDPAASSSAEDSLSDAAGVGVDGPNVSFQNGGDTVLSEGSSLHSGGGGGSGHHQHYYYDTHTNTYYLRTFGHNTMDAVPRIDHYRHTAAQLGEKLLRPSLAELHDELEKEPFEDGFANGEESTPTRDAVVTYTAESKGVVKFGWIKGVLVRCMLNIWGVMLFIRLSWIVGQAGIGLSVLVIMMATVVTTITGLSTSAIATNGFVRGGGAYYLISRSLGPEFGGAIGLIFAFANAVAVAMYVVGFAETVVELLKEHSILMIDEINDIRIIGAITVVILLGISVAGMEWEAKAQIVLLVILLLAIGDFVIGTFIPLESKKPKGFFGYKSEIFNENFGPDFREEETFFSVFAIFFPAATGILAGANISGDLADPQSAIPKGTLLAILITTLVYVGIAVSVGSCVVRDATGNVNDTIVTELTNCTSAACKLNFDFSSCESSPCSYGLMNNFQVMSMVSGFTPLISAGIFSATLSSALASLVSAPKIFQALCKDNIYPAFQMFAKGYGKNNEPLRGYILTFLIALGFILIAELNVIAPIISNFFLASYALINFSVFHASLAKSPGWRPAFKYYNMWISLLGAILCCIVMFVINWWAALLTYVIVLGLYIYVTYKKPDVNWGSSTQALTYLNALQHSIRLSGVEDHVKNFRPQCLVMTGAPNSRPALLHLVHDFTKNVGLMICGHVHMGPRRQAMKEMSIDQAKYQRWLIKNKMKAFYAPVHADDLREGAQYLMQAAGLGRMKPNTLVLGFKKDWLQADMRDVDMYINLFHDAFDIQYGVVVIRLKEGLDISHLQGQEELLSSQEKSPGTKDVVVSVEYSKKSDLDTSKPLSEKPITHKVEEEDGKTATQPLLKKESKGPIVPLNVADQKLLEASTQFQKKQGKNTIDVWWLFDDGGLTLLIPYLLTTKKKWKDCKIRVFIGGKINRIDHDRRAMATLLSKFRIDFSDIMVLGDINTKPKKENIIAFEEIIEPYRLHEDDKEQDIADKMKEDEPWRITDNELELYKTKTYRQIRLNELLKEHSSTANIIVMSLPVARKGAVSSALYMAWLEALSKDLPPILLVRGNHQSVLTFYS

SEQ ID NO: 41744 - protein, 36 aa, Homo sapiens
LGVASSCQIPCSPGDPEKHRAIPDPGTFRRLAAIWE

SEQ ID NO: 41745 - protein, 14 aa, Homo sapiens
RHTPLSKLMKAYCE

SEQ ID NO: 41746 - protein, 11 aa, Homo sapiens
MKTTTTTAPRT

SEQ ID NO: 41747 - protein, 272 aa, Homo sapiens
LRSRAPRPRYISMNNLNDPPNWNIRPNSRADGGDGSRWNYALLVPMLGLAAFRWIWSRESQKEVEKEREAYRRRTAAFQQDLEAKYHAMISENRRAVAQLSLELEKEQNRTASYREALISQGRKLVEEKKLLEQERAQVMQEKRQVQPLRSAYLSCLQREENWQRRARLLLKEFEAVLTERQNIYCSLFLPRSKRLEIEKSLLVRASVDPVAADLEMAAGLTDIFQHDTYCGDVWNTNKRQNGRLMWLYLKYWELVVELKKFKRVEEAILEK

SEQ ID NO: 41748 - protein, 526 aa, Homo sapiens
VGVFVVYVVHTCWVMYGIVYTRPCSGDANCIQPYLARRPKLQLSVYTTTRSHLGAENNIDLVLNVEDFDVESKFERTVNVSVPKKTRNNGTLYAYIFLHHAGVLPWHDGKQVHLVSPLTTYMVPKPEEINLLTGESDTQQIEAEKKPTSALDEPVSHWRPRLALNVMADNFVFDGSSLPADVHRYMKMIQLGKTVHYLPILFIDQLSNRVKDLMVINRSTTELPLTVSYDKVSLGRLRFWIHMQDAVYSLQQFGFSEKDADEVKGIFVDTNLYFLALTFFVAAFHLLFDFLAFKNDISFWKKKKSMIGMSTKAVLWRCFSTVVIFLFLLDEQTSLLVLVPAGVGAAIELWKVKKALKMTIFWRGLMPEFQFGTYSESERKTEEYDTQAMKYLSYLLYPLCVGGAVYSLLNIKYKSWYSWLINSFVNGVYAFGFLFMLPQLFVNYKLKSVAHLPWKAFTYKAFNTFIDDVFAFIITMPTSHRLACFRDDVVFLVYLYQRWLYPVDKRRVNEFGESYEEKATRAPHTD

SEQ ID NO: 41749 - protein, 38 aa, Homo sapiens
IEESCRPGDKVPPIKPNAGEESVMNLDKLRFADGSIRT

SEQ ID NO: 41750 - protein, 784 aa, Homo sapiens
LAVAGRFLRAACAAAWAMGRRSRGRRLQQQQRPEDAEDGAEGGGKRGEAGWEGGYPEIVKENKLFEHYYQELKIVPEGEWGQFMDALREPLPATLRITGYKSHAKEILHCLKNKYFKELEDLEVDGQKVEVPQPLSWYPEELAWHTNLSRKILRKSPHLEKFHQFLVSETESGNISRQEAVSMIPPLLLNVRPHHKILDMCAAPGSKTTQLIEMLHADMNVPFPEGFVIANDVDNKRCYLLVHQAKRLSSPCIMVVNHDASSIPRLQIDVDGRKEILFYDRILCDVPCSGDGTMRKNIDVWKKWTTLNSLQLHGLQLRIATRGAEQLAEGGRMVYSTCSLNPIEDEAVIASLLEKSEGALELADVSNELPGLKWMPGITQWKVMTKDGQWFTDWDAVPHSRHTQIRPTMFPPKDPEKLQAMHLERCLRILPHHQNTGGFFVAVLVKKSSMPWNKRQPKLQGKSAETRESTQLSPADLTEGKPTDPSKLESPSFTGTGDTEIAHATEDLENNGSKKDGVCGPPPSKKMKLFGFKEDPFVFIPEDDPLFPPIEKFYALDPSFPRMNLLTRTTEGKKRQLYMVSKELRNVLLNNSEKMKVINTGIKVWCRNNSGEEFDCAFRLAQEGIYTLYPFINSRIITVSMEDVKILLTQENPFFRKLSSETYSQAKDLAKGSIVLKYEPDSANPDALQCPIVLCGWRGKASIRTFVPKNERLHYLRMMGLEVLGEKKKEGVILTNESAASTGQPDNDVTEGQRAGEPNSPDAEEANSPDVTAGCDPAGVHPPR

SEQ ID NO: 41751 - protein, 22 aa, Homo sapiens
KTRMISTALWPALTTLGISPLS

SEQ ID NO: 41752 - protein, 21 aa, Homo sapiens
KDIRKFLDGIYVSEKTNHSGG

SEQ ID NO: 41753 - protein, 1406 aa, Homo sapiens
LVFDFFWTLVSTISEMPSSLLGAAMPASTSAAALQEALENAGRLIDRQLQEDRMYPDLSELLMVSAPNNPTVSGMSDMDYPLQGPGLLSVPNLPEISSIRRVPLPPELVEQFGHMQCNCMMGVFPPISRAWLTIDSDIFMWNYEDGGDLAYFDGLSETILAVGLVKPKAGIFQPHVRHLLVLATPVDIVILGLSYANLQTGSGVLNDSLSGGMQLLPDPLYSLPTDNTYLLTITSTDNGRIFLAGKDGCLYEVAYQAEAGWFSQRCRKINHSKSSLSFLVPSLLQFTFSEDDPILQIAIDNSRNILYTRSEKGVIQVYDLGQDGQGMSRVASVSQNAIVSAAGNIARTIDRSVFKPIVQIAVIENSESLDCQLLAVTHAGVRLYFSTCPFRQPLARPNTLTLVHVRLPPGFSASSTVEKPSKVHRALYSKGILLMAASENEDNDILWCVNHDTFPFQKPMMETQMTAGVDGHSWALSAIDELKVDKIITPLNKDHIPITDSPVVVQQHMLPPKKFVLLSAQGSLMFHKLRPVDQLRHLLVSNVGGDGEEIERFFKLHQEDQACATCLILACSTAACDREVSAWATRAFFRYGGEAQMRFPTTLPPPSNVGPILGSPVYSSSPVPSGSPYPNPSFLGTPSHGIQPPAMSTPVCALGNPATQATNMSCVTGPEIVYSGKHNGICIYFSRIMGNIWDASLVVERIFKSGNREITAIESSVPCQLLESVLQELKGLQEFLDRNSQFAGGPLGNPNTTAKVQQRLIGFMRPENGNPQQMQQELQRKFHEAQLSEKISLQAIQQLVRKSYQALALWKLLCEHQFTIIVAELQKELQEQLKITTFKDLVIRDKELTGALIASLINCYIRDNAAVDGISLHLQDICPLLYSTDDAICSKANELLQRSRQVQNKTEKERMLRESLKEYQKISNQVDLSNVCAQYRQVRFYEGVVELSLTAAEKKDPQGLGLHFYKHGEPEEDIVGLQAFQERLNSYKCITDTLQELVNQSKAAPQSPSVPKKPGPPVLSSDPNMLSNEEAGHHFEQMLKLSQRSKDELFSIALYNWLIQVDLADKLLQVASPFLEPHLVRMAKVDQNRVRYMDLLWRYYEKNRSFSNAARVLSRLADMHSTEISLQQRLEYIARAILSAKSSTAISSIAADGEFLHELEEKMEVARIQLQIQETLQRQYSHHSSVQDAVSQLDSELMDITKLYGEFADPFKLAECKLAIIHCAGYSDPILVQTLWQDIIEKELSDSVTLSSSDRMHALSLKIVLLGKIYAGTPRFFPLDFIVQFLEQQVCTLNWDVGFVIQTMNEIGVPLPRLLEVYDQLFKSRDPFWNRMKKPLHLLDCIHVLLIRYVENPSQVLNCERRRFTNLCLDAVCGYLVELQSMSSSVAVQAITGNFKSLQAKLERLH

SEQ ID NO: 41754 - protein, 386 aa, Homo sapiens
LRAPPSSQDKIPQQNSESAMAKPQVVVAPVLMSKLSVNAPEFYPSGYSSSYTESYEDGCEDYPTLSEYVQDFLNHLTEQPGSFETEIEQFAETLNGCVTTDDALQELVELIYQQATSIPNFSYMGARLCNYLSHHLTISPQSGNFRQLLLQRCRTEYEVKDQAAKGDEVTRKRFHAFVLFLGELYLNLEIKGTNGQVTRADILQVGLRELLNALFSNPMDDNLICAVKLLKLTGSVLEDAWKEKGKMDMEEIIQRIENVVLDANCSRDVKQMLLKLVELRSSNWGRVHATSTYREATPENDPNYFMNEPTFYTSDGVPFTAADPDYQEKYQELLEREDFFPDYEENGTDLSGAGDPYLDDIDDEMDPEIEEAYEKFCLESERKRKQ

SEQ ID NO: 41755 - protein, 537 aa, Homo sapiens
VTDLETAVLYPSHSSFTMPGSLPLNAEACWPKDVGIVALEIYFPSQYVDQAELEKYDGVDAGKYTIGLGQAKMGFCTDREDINSLCMTVVQNLMERNNLSYDCIGRLEVGTETIIDKSKSVKTNLMQLFEESGNTDIEGIDTTNACYGGTAAVFNAVNWIESSSWDGRYALVVAGDIAVYATGNARPTGGVGAVALLIGPNAPLIFERGLRGTHMQHAYDFYKPDMLSEYPIVDGKLSIQCYLSALDRCYSVYCKKIHAQWQKEGNDKDFTLNDFGFMIFHSPYCKLVQKSLARMLLNDFLNDQNRDKNSIYSGLEAFGDVKLEDTYFDRDVEKAFMKASSELFSQKTKASLLVSNQNGNMYTSSVYGSLASVLAQYSPQQLAGKRIGVFSYGSGLAATLYSLKVTQDATPGSALDKITASLCDLKSRLDSRTGVAPDVFAENMKLREDTHHLVNYIPQGSIDSLFEGTWYLVRVDEKHRRTYARRPTPNDDTLDEGVGLVHSNIATEHIPSPAKKVPRLPATAAEPEAAVISNGEH

SEQ ID NO: 41756 - protein, 398 aa, Homo sapiens
LKKMDEEPERTKRWEGGYERTWEILKEDESGSLKATIEDILFKAKRKRVFEHHGQVRLGMMRHLYVVVDGSRTMEDQDLKPNRLTCTLKLLEYFVEEYFDQNPISQIGIIVTKSKRAEKLTELSGNPRKHITSLKKAVDMTCHGEPSLYNSLSIAMQTLKHMPGHTSREVLIIFSSLTTCDPSNIYDLIKTLKAAKIRVSVIGLSAEVRVCTVLARETGGTYHVILDESHYKELLTHHVSPPPASSSSECSLIRMGFPQHTIASLSDQDAKPSFSMAHLDGNTEPGLTLGGYFCPQCRAKYCELPVECKICGLTLVSAPHLARSYHHLFPLDAFQEIPLEEYNGERFCYGCQGELKDQHVYVCAVCQNVFCVDCDVFVHDSLHCCPGCIHKIPAPSGV

SEQ ID NO: 41757 - protein, 357 aa, Homo sapiens
VFAGAVRGGPRAPLLAVGAPPGLSPPSAALLLRLGGAVARGRRQPRPGLENQGPRPPSRSSVHRPCRAARAETMFDKTRLPYVALDVLCVLLAGLPFAILTSRHTPFQRGVFCNDESIKYPYKEDTIPYALLGGIIIPFSIIVIILGETLSVYCNLLHSNSFIRNNYIATIYKAIGTFLFGAAASQSLTDIAKYSIGRLRPHFLDVCDPDWSKINCSDGYIEYYICRGNAERVKEGRLSFYSGHSSFSMYCMLFVALYLQARMKGDWARLLRPTLQFGLVAVSIYVGLSRVSDYKHHWSDVLTGLIQGALVAILVAVYVSDFFKERTSFKERKEEDSHTTLHETPTTGNHYPSNHQP

SEQ ID NO: 41758 - protein, 415 aa, Homo sapiens
KMAASIVRRGMLLARQVVLPQLSPAGKRYLLSSAYVDSHKWEAREKEHYCLADLASLMDKTFERKLPVSSLTISRLIDNISSREEIDHAEYYLYKFRHSPNCWYLRNWTIHTWIRQCLKYDAQDKALYTLVNKVQYGIFPDNFTFNLLMDSFIKKENYKDALSVVFEVMMQEAFEVPSTQLLSLYVLFHCLAKKTDFSWEEERNFGASLLLPGLKQKNSVGFSSQLYGYALLGKVELQQGLRAVYHNMPLIWKPGYLDRALQVMEKVAASPEDIKLCREALDVLGAVLKALTSADGASEEQSQNDEDNQGSEKLVEQLDIEETEQSKLPQYLERFKALHSKLQALGKIESEGLLSLTTQLVKEKLSTCEAEDIATYEQNLQQWHLDLVQLIQREQQQREQAKQEYQAQKAAKASA

SEQ ID NO: 41759 - protein, 34 aa, Homo sapiens
INFLAPLFMVLLWVKPITKDYIMNPPLGKESIPL

SEQ ID NO: 41760 - protein, 434 aa, Homo sapiens
LAELAQTGREVAGQRSRTRGSSATEDPSDLIPGSRLQALLAFYRFHPRDYLPKTEPLYQEKVRELGQPGLSRAPKMRSIRKRWTICTISLLLIFYKTKEIARTEEHQETQLIGDGELSLSRSLVNSSDKIIRKAGSSIFQHNVEGWKINSSLVLEIRKNILRFLDAERDVSVVKSSFKPGDVIHYVLDRRRTLNISHDLHSLLPEVSPMKNRRFKTCAVVGNSGILLDSECGKEIDSHNFVIRCNLAPVVEFAADVGTKSDFITMNPSVVQRAFGGFRNESDREKFVHRLSMLNDSVLWIPAFMVKGGEKHVEWVNALILKNKLKVRTAYPSLRLIHAVRGYWLTNKVPIKRPSTGLLMYTLATRFCDEIHLYGFWPFPKDLNGKAVKYHYYDDLKYRYFSNASPHRMPLEFKTLNVLHNRGALKLTTGKCVKQ

SEQ ID NO: 41761 - protein, 71 aa, Homo sapiens
ILKMVYYPELFVWVSQEPFPNKDMEGRLPKGRLPVPKEVNRKKNDETNAASLTPLGSSELRSPRISYLHFF

SEQ ID NO: 41762 - protein, 716 aa, Homo sapiens
LVTQTLPYMSQYTEKEPAAMDQESGKAVWPKPAGGYQTITGRRYGRRHAYVSFKPCMTRHERSLGRAGDDYEVLELDDVPKENSSGSSPLDQVDSSLPSEPIFEKSETEIPTCGSALNQTTESSQSFVAVHHSEEGRDTLGSSTNLHNHSEGEYIPGACSASSVQNGIALVHTDSYDPDGKHGEDNDHLQLSAEVVEGSRYQESLGNTVFELENREAEAYTGLSPPVPSFNCEVRDEFEELDSVPLVKSSAGDTEFVHQNSQEIQRSSQDEMVSTKQQNNTSQERQTEHSPEDAACGPGHICSEQNTNDREKNHGSSPEQVVRPKVRKLISSSQVDQETGFNRHEAKQRSVQRWREALEVEESGSDDLLIKCEEYDGEHDCMFLDPPYSRVITQRETENNQMTSESGATAGRQEVDNTFWNGCGDYYQLYDKDEDSSECSDGEWSASLPHRFSGTEKDQSSSDESWETLPGKDENEPELQSDSSGPEEENQELSLQEGEQTSLEEGEIPWLQYNEVNESSSDEGNEPANEFAQPAFMLDGNNNLEDDSSVSEDLDVDWSLFDGFADGLGVAEAISYVDPQFLTYMALEERLAQAMETALAHLESLAVDVEVANPPASKESIDGLPETLVLEDHTAIGQEQCCPICCSEYIKDDIATELPCHHFFHKPCVSIWLQKSGTCPVCRRHFPPAVIEASAAPSSEPDPDAPPSNDSIAEAP

SEQ ID NO: 41763 - protein, 14 aa, Homo sapiens
VNLLCCVSLRGGLR

SEQ ID NO: 41764 - protein, 35 aa, Homo sapiens
MTKKTRDLRRQLHKAVMDHVSDSFLETNVPLLVLT

SEQ ID NO: 41765 - protein, 23 aa, Homo sapiens
LIEFCISSMRNYRLIFCHNLKQP

SEQ ID NO: 41766 - skipped

SEQ ID NO: 41767 - protein, 11 aa, Homo sapiens
IVPTIILLPLT

SEQ ID NO: 41768 - protein, 7 aa, Homo sapiens
IMSVLLK

SEQ ID NO: 41769 - protein, 21 aa, Homo sapiens
RKKIQYLTRGEESSSDTNKSA

SEQ ID NO: 41770 - protein, 26 aa, Homo sapiens
MTRQSLLSFSFLPEGDLTIVERMENY

SEQ ID NO: 41771 - protein, 111 aa, Homo sapiens
KSCCLSSIMSGRGKGGKGLGKGGAKRHRKVLRDNIQGITKPAIRRLARRGGVKRISGLIYEETRGVLKVFLENVIRDAVTYTEHAKRKTVTAMDVVYALKRQGRTLYGFGG

SEQ ID NO: 41772 - protein, 93 aa, Homo sapiens
VDIKDRKVKAKSIVFHRKKNLQYYDISAKSNYNFEKPFLWLARKLIGDPNLEFVAMPALAPPEVVMDPALAAQYEHDLEVAQTTALPDEDDDL

SEQ ID NO: 41773 - protein, 58 aa, Homo sapiens
LQIALIALFSEMLYRFPNMVVAQVTRESVQQAIASGITAQQIIHFLRTRAHPVMLKQV

SEQ ID NO: 41774 - protein, 29 aa, Homo sapiens
IVLTTSAGIMDHEEARRKHTGGKILGFFF

SEQ ID NO: 41775 - protein, 452 aa, Homo sapiens
KVQGDRGGRSLERRSASLPLAGLAPVAGAHPAAAADSSRARGSLRGRGSRTCAGDQRKVPARLGGQQGPGRGCGCRRGPHRATFLPGGCRWKMSQERPTFYRQELNKTIWEVPERYQNLSPVGSGAYGSVCAAFDTKTGLRVAVKKLSRPFQSIIHAKRTYRELRLLKHMKHENVIGLLDVFTPARSLEEFNDVYLVTHLMGADLNNIVKCQKLTDDHVQFLIYQILRGLKYIHSADIIHRDLKPSNLAVNEDCELKILDFGLARHTDDEMTGYVATRWYRAPEIMLNWMHYNQTVDIWSVGCIMAELLTGRTLFPGTDHIDQLKLILRLVGTPGAELLKKISSESARNYIQSLTQMPKMNFANVFIGANPLAVDLLEKMLVLDSDKRITAAQALAHAYFAQYHDPDDEPVADPYDQSFESRDLLIDEWKSLTYDEVISFVPPPLDQEEMES

SEQ ID NO: 41776 - protein, 452 aa, Homo sapiens
KVQGDRGGRSLERRSASLPLAGLAPVAGAHPAAAADSSRARGSLRGRGSRTCAGDQRKVPARLGGQQGPGRGCGCRRGPHRATFLPGGCRWKMSQERPTFYRQELNKTIWEVPERYQNLSPVGSGAYGSVCAAFDTKTGLRVAVKKLSRPFQSIIHAKRTYRELRLLKHMKHENVIGLLDVFTPARSLEEFNDVYLVTHLMGADLNNIVKCQKLTDDHVQFLIYQILRGLKYIHSADIIHRDLKPSNLAVNEDCELKILDFGLARHTDDEMTGYVATRWYRAPEIMLNWMHYNQTVDIWSVGCIMAELLTGRTLFPGTDHINQLQQIMRLTGTPPAYLINRMPSHEARNYIQSLTQMPKMNFANVFIGANPLAVDLLEKMLVLDSDKRITAAQALAHAYFAQYHDPDDEPVADPYDQSFESRDLLIDEWKSLTYDEVISFVPPPLDQEEMES

SEQ ID NO: 41777 - protein, 214 aa, Homo sapiens
LPPRCPCGFWGSSKTMNLCSKCFADFQKKQPDDDSAPSTSNSQSDLFSEETTSDNNNTSITTPTLSPSQQPLPTELNVTSPSKEECGPCTDTAHVSLITPTKRSCGTDSQSENEASPVKRPRLLENTERSEETSRSKQKSRRRCFQCQTKLELVQQELGSCRCGYVFCMLHRLPEQHDCTFDHMGRGREEAIMKMVKLDRKVGRSCQRIGEGCS

SEQ ID NO: 41778 - protein, 111 aa, Homo sapiens
VKARGCRIATLPMDLIGFGYAALVTFGSIFGYKRRGGVPSLIAGLFVGCLAGYGAYRVSNDKRDVKVSLFTAFFLATIMGVRFKRSKKIMPAGLVAGLSLMMILRLVLLLL

SEQ ID NO: 41779 - protein, 9 aa, Homo sapiens
VFAVAVMAM

SEQ ID NO: 41780 - protein, 33 aa, Homo sapiens
KCDLEDKRVVGKEQGQNLARQWNNCAFLESSAK

SEQ ID NO: 41781 - protein, 32 aa, Homo sapiens [sequence omitted]

SEQ ID NO: 41782 - protein, 105 aa, Homo sapiens
VPLHWFGFGYAALVASGGIIGYVKAGSVPSLAAGLLFGSLAGLGAYQLSQDPRNVWVFLATSGTLAGIMGMRFYHSGKFMPAGLIAGASLLMVAKVGVSMFNRPH

SEQ ID NO: 41783 - protein, 7 aa, Homo sapiens
MGMFVHK

SEQ ID NO: 41784 - protein, 15 aa, Homo sapiens
LGRYPEAQSVASDIL

SEQ ID NO: 41785 - protein, 460 aa, Homo sapiens
LSFNVFIMKLLVILLFSGLITGFRSDSSSSLPPKLLLVSFDGFRADYLKNYEFPHLQNFIKEGVLVEHVKNVFITKTFPNHYSIVTGLYEESHGIVANSMYDAVTKKHFSDSNDKDPFWWNEAVPIWVTNQLQENRSSAAAMWPGTDVPIHDTISSYFMNYNSSVSFEERLNNITMWLNNSNPPVTFATLYWEEPDASGHKYGPEDKENMSRVLKKIDDLIGDLVQRLKMLGLWENLNVIITSDHGMTQCSQDRLINLDSCIDHSYYTLIDLSPVAAILPKINRTEVYNKLKNCSPHMNVYLKEDIPNRFYYQHNDRIQPIILVADEGWTIVLNESSQKLGDHGYDNSLPSMHPFLAAHGPAFHKGYKHSTINIVDIYPMMCHILGLKPHPNNGTFGHTKCLLVDQWCINLPEAIAIVIGSLLVLTMLTCLIIIMQNRLSVPRPFSRLQLQEDDDDPLIG

SEQ ID NO: 41786 - protein, 34 aa, Homo sapiens
MALRGAPAGGGAVRWSPAFPGDTGPSFEVESFWF

SEQ ID NO: 41787 - protein, 500 aa, Homo sapiens
MGIGLSAQGVNMNRLPGWDKHSYGYHGDDGHSFCSSGTGQPYGPTFTTGDVIGCCVNLINNTCFYTKNGHSLGIAFTDLPPNLYPTVGLQTPGEVVDANFGQHPFVFDIEDYMREWRTKIQAQIDRFPIGDREGEWQTMIQKMVSSYLVHHGYCATAEAFARSTDQTVLEELASIKNRQRIQKLVLAGRMGEAIETTQQLYPSLLERNPNLLFTLKVRQFIEMVNGTDSEVRCLGGRSPKSQDSYPVSPRPFSSPSMSPSHGMNIHNLASGKGSTAHFSGFESCSNGVISNKAHQSYCHSNKHQSSNLNVPELNSINMSRSQQVNNFTSNDVDMETDHYSNGVGETSSNGFLNGSSKHDHEMEDCDTEMEVDSSQLRRQLCGGSQAAIERMIHFGRELQAMSEQLRRDCGKNTANKKMLKDAFSLLAYSDPWNSPVGNQLDPIQREPVCSALNSAILETHNLPKQPPLALAMGQATQCLGLMARSGIGSCAFATVEDYLH

SEQ ID NO: 41788 - protein, 34 aa, Homo sapiens
IISLLIILFLPMKPQAHTQRRPQTLNSINKRKTD

SEQ ID NO: 41789 - protein, 1425 aa, Homo sapiens
VPGWLQRYFNKNEDVCSCSTDTSEVPRWPENKEDHLVYADEESSNITDGRITPEPAVSNTEEPSTTSTASNYPDVLTRPSLHRSHLNFSMLESPALHCQPSTSSAFPIGSSGFSLVKEIKDSTSQHDDDNISTTSGFSSRASDKDITVSKNTSLPPLWSPEAERSHSLSQHTATSSKKPAFNLSAFGTLSPSLGNSSILKTSQLGDSPFYPGKTTYGGAAAAVRQSKLRNTPYQAPVRRQMKAKQLSAQSYGVTSSTARRILQSLEKMSSPLADAKRIPSIVSSPLNSPLDRSGIDITDFQAKREKVDSQYPPVQRLMTPKPVSIATNRSVYFKPSLTPSGEFRKTNQRIDNKCSTGYEKNMTPGQNREQRESGFSYPNFSLPAANGLSSGVGGGGGKMRRERTRFVASKPLEEEEMEVPVLPKISLPITSSSLPTFNFSSPEITTSSPSPINSSQALTNKVQMTSPSSTGSPMFKFSSPIVKSTEANVLPPSSIGFTFSVPVAKTAELSGSSSTLEPIISSSAHHVTTVNSTNCKKTPPEDCEGPFRPAEILKEGSVLDILKSPGFASPKIDSVAAQPTATSPVVYTRPAISSFSSSGIGFGESLKAGSSWQCDTCLLQNKVTDNKCIACQAAKLSPRDTAKQTGIETPNKSGKTTLSASGTGFGDKFKPVIGTWDCDTCLVQNKPEAIKCVACETPKPGTCVKRALTLTVVSESAETMTASSSSCTVTTGTLGFGDKFKRPIGSWECSVCCVSNNAEDNKCVSCMSEKPGSSVPASSSSTVPVSLPSGGSLGLEKFKKPEGSWDCELCLVQNKADSTKCLACESAKPGTKSGFKGFDTSSSSSNSAASSSFKFGVSSSSSGPSQTLTSTGNFKFGDQGGFKIGVSSDSGSINPMSEGFKFSKPIGDFKFGVSSESKPEEVKKDSKNDNFKFGLSSGLSNPVSLTPFQFGVSNLGQEEKKEELPKSSSAGFSFGTGVINSTPAPANTIVTSENKSSFNLGTIETKSASVAPFTCKTSEAKKEEMPATKGGFSFGNVEPASLPSASVFVLGRTEEKQQEPVTSTSLVFGKKADNEEPKCQPVFSFGNSEQTKDENSSKSTFSFSMTKPSEKESEQPAKATFAFGAQTSTTADQGAAKPVFSFLNNSSSSSSTPATSAGGGIFGSSTSSSNPPVATFVFGQSSNPVSSSAFGNTAESSTSQSLLFSQDSKLATTSSTGTAVTPFVFGPGASSNNTTTSGFGFGATTTSSSAGSSFVFGTGPSAPSASPAFGANQTPTFGQSQGASQPNPPGFGSISSSTALFPTGSQPAPPTFGTVSSSSQPPVFGQQPSQSAFGSGTTPNSSSAFQFGSSTTNFNFTNNSPSGVFTFGANSSTPAASAQPSGSGGFPFNQSPAAFTVGSNGKNVFSSSGTSFSGRKIKTAVRRRK

SEQ ID NO: 41790 - protein, 97 aa, Homo sapiens
ISTSLHFSFLWGAALVLFGPCLLGMEQSIEQTTEILLCLSPVEVASLKEGINFFRNKSTGKDYVLYKNKSRLRACKNMCKHQGGLFIKDIEDLAGSC

SEQ ID NO: 41791 - protein, 133 aa, Homo sapiens
LLLFSDSMPEPAKSAPAPKKGSKKAVTKAQKKDGKKRKRSRKESYSVYVYKVLKQVHPDTGISSKAMGIMNSFVNDIFERIAGEASRLAHYNKRSTITSREIQTAVRLLLPGELAKHAVSEGTKAVTKYTSSK

SEQ ID NO: 41792 - protein, 1170 aa, Homo sapiens
LRTFSSCPTKVKLGDLGGAGSIASRSPNTIGETEVAVGGRDLSAMEPNDSTSTAVEEPDSLEVLVKTLDSQTRTFIVGAQMNVKEFKEHIAASVSIPSEKQRLIYQGRVLQDDKKLQEYNVGGKVIHLVERAPPQTHLPSGASSGTGSASATHGGGSPPGTRGPGASVHDRNANSYVMVGTFNLPSDGSAVDVHINMEQAPIQSEPRVRLVMAQHMIRDIQTLLSRMECRGGPQPQHSQPPPQPPAVTPEPVALSSQTSEPVESEAPPREPMEAEEVEERAPAQNPELTPGPAPAGPTPAPETNAPNHPSPAEYVEVLQELQRLESRLQPFLQRYYEVLGAAATTDYNNNHEGREEDQRLINLVGESLRLLGNTFVALSDLRCNLACTPPRHLHVVRPMSHYTTPMVLQQAAIPIQINVGTTVTMTGNGTRPPPTPNAEAPPPGPGQASSVAPSSTNVESSAEGAPPPGPAPPPATSHPRVIRISHQSVEPVVMMHMNIQDSGTQPGGVPSAPTGPLGPPGHGQTLGQQVPGFPTAPTRVVIARPTPPQARPSHPGGPPVSGTLQGAGLGTNASLAQMVSGLVGQLLMQPVLVAQGTPGMAPPPAPATASASAGTTNTATTAGPAPGGPAQPPPTPQPSMADLQFSQLLGNLLGPAGPGAGGSGVASPTITVAMPGVPAFLQGMTDFLQATQTAPPPPPPPPPPPPAPEQQTMPPPGSPSGGAGSPGGLGLESLSPEFFTSVVQGVLSSLLGSLGARAGSSESIAAFIQRLSGSSNIFEPGADGALGFFGALLSLLCQNFSMVDVVMLLHGHFQPLQRLQPQLRSFFHQHYLGGQEPTPSNIRMATHTLITGLEEYVRESFSLVQVQPGVDIIRTNLEFLQEQFNSIAAHVLHCTDSGFGARLLELCNQGLFECLALNLHCLGGQQMELAAVINGRIRRMSRGVNPSLVSWLTTMMGLRLQVVLEHMPVGPDAILRYVRRVGDPPQPLPEEPMEVQGAERASPEPQRENASPAPGTTAEEAMSRGPPPAPEGGSRDEQDGASAETEPWAAAVPPEWVPIIQQDIQSQRKVKPQPPLSDAYLSGMPAKRRKTMQGEGPQLLLSEAVSRAAKAAGARPLTSPESLSRDLEAPEVQESYRQQLRSDIQKRLQEDPNYSPQRFPNAQRAFADDP

SEQ ID NO: 41793 - protein, 19 aa, Homo sapiens
MITKVVFPGRGLSIALWMC

SEQ ID NO: 41794 - protein, 227 aa, Homo sapiens
LRFYCVILPPSWPDAMGVTCVSQMPVAEGKSVQQTVELLTRKLEMLGAEKQGTFCVDCETYHTAASTLGSQGQTGKLMYVMHNSEYPLSCFALFENGPCLIADTNFDVLMVKLKGFFQSAKASKIETRGTRYQYCDFLVKVGTVTMGPSARGISVEVEYGPCVVASDCWSLLLEFLQSFLGSHTPGAPAVFGNRHDAVYGPADTMVQYMELFNKIRKQQQVPVAGIR

SEQ ID NO: 41795 - protein, 5 aa, Homo sapiens
MGCWR

SEQ ID NO: 41796 - protein, 49 aa, Homo sapiens
VAVAVALVAAAAAAAAALERFLSGSAGGPPGWSTCKSRSGAPGIDGDEL

SEQ ID NO: 41797 - protein, 207 aa, Homo sapiens
LPPAMACGATLKRTLDFDPLLSPASPKRRRCAPLSAPTSAAASPLSAAAATAASFSAAAASPQKYLRMEPSPFGDVSSRLTTEQILYNIKQEYKRMQKRRHLETSFQQTDPCCTSDAQPHAFLLSGPASPGTSSAASSPLKKEQPLFTLRQVGMICERLLKEREEKVREEYEEILNTKLAEQYDAFVKFTHDQIMRRYGEQPASYVS

SEQ ID NO: 41798 - protein, 392 aa, Homo sapiens [sequence omitted]

SEQ ID NO: 41799 - protein, 76 aa, Homo sapiens
VACDGVMMLQLLEKVIELENWTEGKGLIVRGAKNTFSSGSDLNAVKSLGTPETSFNKCCAGSRLGIGWRSRIYYSM

SEQ ID NO: 41800 - protein, 47 aa, Homo sapiens
VDSQEKAPETDDSFSDVDCHSNQEDTGCKFQVLPQPTNLTSPNTKVF

SEQ ID NO: 41801 - protein, 13 aa, Homo sapiens
LLLVLLASWGLGQ

SEQ ID NO: 41802 - protein, 238 aa, Homo sapiens
LGLGLPSGRGRLTAMPGRAPLRTVPGALGAWLLGGLWAWTLCGLCSLGAVGAPRPCQAPQQWEGRQVMYQQSSGRNSRALLSYDGLNQRVRVLDERKALIPCKRLFEYILLYKDGVMFQIDQATKQCSKMTLTQPWDPLDIPQNSTFEDQYSIGGPQEQITVQEWSDRKSARSYETWIGIYTVKDCYPVQETFTINYSVILSTRFFDIQLGIKDPSVFTPPSTCQMAQLEKMSEDCSW

SEQ ID NO: 41803 - protein, 23 aa, Homo sapiens
LKTLLFFTALMITVPIGLFIFHN

SEQ ID NO: 41804 - protein, 29 aa, Homo sapiens
RFLLLLLLLLFTTDTFPKNLKLIFKNPVN

SEQ ID NO: 41805 - protein, 47 aa, Homo sapiens
LARGAGTLALLVAAETAVKCEVLCLLAARGDEAGRHGSEGCQFCASQ

SEQ ID NO: 41806 - protein, 589 aa, Homo sapiens
RPSTYGIPRLERILLAKERIRFVIKKHELLSSTREDLQLDKPASGVKEEWYARITKLRKMVDQLFCKKFAEALGSTEAKAVPYQKFEAHPNDLYVEGLPENIPFRSPSWYGIPRLEKIIQVGNRIKFVIKRPELLTHSTTEVTQPRTNTPVKEDWNVRITKLRKQVEEIFNLKFAQALGLTEAVKVPYPVFESNPEFLYVEGLPEGIPFRSPTWFGIPRLERIVHGSNKIKFVVKKPELVISYLPPGMASKINTKALQSPKRPRSPGSNSKVPEIEVTVEGPNNNNPQTSAVRTPTQTNGSNVPFKPRGREFSFEAWNAKITDLKQKVENLFNEKCGEALGLKQAVKVPFALFESFPEDFYVEGLPEGVPFRRPSTFGIPRLEKILRNKAKIKFIIKKPEMFETAIKESTSSKSPPRKINSSPNVNTTASGVEDLNIIQVTIPDDDNERLSKVEKARQLREQVNDLFSRKFGEAIGMGFPVKVPYRKITINPGCVVVDGMPPGVSFKAPSYLEISSMRRILDSAEFIKFTVIRPFPGLVINNQLVDQSESKGPVIQESAEPSQLEVPATEEIKETDGSSQIKQEPDPTW

SEQ ID NO: 41807 - protein, 59 aa, Homo sapiens
VGTSSTTGETDTVVWNEIHHKTEMDRNITGHGYPDPNYLQNVLAELAAQGVTEDCLEQQ

SEQ ID NO: 41808 - protein, 302 aa, Homo sapiens
LMARHGLPLLPLLSLLVGAWLKLGNGQATSMVQLQGGRFLMGTNSPDSRDGDGPVREATVKPFAIDIFPVTNKDFRDFVREKKYRTEAEMFGWSFVFEDFVSDELRNKATQPMKSVLWWLPVEKAFWRQPAGPGSGIRERLEHPVLHVSWNDARAYCAWRGKRLPTEEEWEFAARGGLKGQVYPWGNWFQPNRTNLWQGKFPKGDKAEDGFHGVSPVNAFPAQNNYGLYDLLGNVWEWTASPYQAAEQDMRVLRGASWIDTADGSANHRARVTTRMGNTPDSASDNLGFRCAADAGRPPGEL

SEQ ID NO: 41809 - protein, 1097 aa, Homo sapiens
TRSPAAAARLPRSPRPLPLSPSDRIKALSEALPAGRPCGGDRSATDTHGPLAPSRLPSARQLPSAEAAPRRPQPARGPHSPPLGTPGPGAAWRRPHSGIMAQVAMSTLPVEDEESSESRMVVTFLMSALESMCKELAKSKAEVACIAVYETDVFVVGTERGRAFVNTRKDFQKDFVKYCVEEEEKAAEMHKMKSTTQANRMSVDAVEIETLRKTVEDYFCFCYGKALGKSTVVPVPYEKMLRDQSAVVVQGLPEGVAFKHPENYDLATLKWILENKAGISFIIKRPFLEPKKHVGGRVMVTDADRSILSPGGSCGPIKVKTEPTEDSGISLEMAAVTVKEESEDPDYYQYNIQAGPSETDDVDEKQPLSKPLQGSHHSSEGNEGTEMEVPAEDSTQHVPSETSEDPEVEVTIEDDDYSPPSKRPKANELPQPPVPEPANAGKRKVREFNFEKWNARITDLRKQVEELFERKYAQAIKAKGPVTIPYPLFQSHVEDLYVEGLPEGIPFRRPSTYGIPRLERILLAKERIRFVIKKHELLNSTREDLQLDKPASGVKEEWYARITKLRKMVDQLFCKKFAEALGSTEAKAVPYQKFEAHPNDLYVEGLPENIPFRSPSWYGIPRLEKIIQVGNRIKFVIKRPELLTHSTTEVTQPRTNTPVKEDWNVRITKLRKQVEEIFNLKFAQALGLTEAVKVPYPVFESNPEFLYVEGLPEGIPFRSPTWFGIPRLERIVRGSNKIKFVVKKPELVISYLPPGMASKINTKALQSPKRPRSPGSNSKVPEIEVTVEGPNNNNPQTSAVRTPTQTNGSNVPFKPRGREFSFEAWNAKITDLKQKVENLFNEKCGEALGLKQAVKVPFALFESFPEDFYVEGLPEGVPFRRPSTFGIPRLEKILRNKAKIKFIIKKPEMFETAIKESTSSKSPPRKINSSPNVNTTASGVEDLNIIQVTIPDDDNERLSKVEKARQLREQVNDLFSRKFGEAIGMGFPVKVPYRKITINPGCVVVDGMPPGVSFKAPSYLEISSMRRILDSAEFIKFTVIRPFPGLVINNQLVDQSESEGPVIQESAEPSQLEVPATEEIKETDGSSQIKQEPDPTW

SEQ ID NO: 41810 - protein, 12 aa, Homo sapiens
KAKAKELATKLG

SEQ ID NO: 41811 - protein, 5 aa, Homo sapiens
MKEKM

SEQ ID NO: 41812 - protein, 317 aa, Homo sapiens
IIMDLRQFLMCLSLCTAFALSKPTEKKDRVHHEPQLSDKVHNDAQSFDYDHDAFLGAEEAKTFDQLTPEESKERLGKIVSKIDGDKDGFVTVDELKDWIKFAQKRWIYEDVERQWKGHDLNEDGLVSWEEYKNATYGYVLDDPDPDDGFNYKQMMVRDERRFKMADKDGDLIATKEEFTAFLHPEEYDYMKDIVVQETMEDIDKNADGFIDLEEYIGDMYSHDGNTDEPEWVKTEREQFVEFRDKNRDGKMDKEETKDWILPSDYDHAEAEARHLVYESDQNKDGKLTKEEIVDKYDLFVGSQATDFGEALVRHDEF

SEQ ID NO: 41813 - protein, 714 aa, Homo sapiens
KWSSFSSTYLPENILVDKPNDQSSRWSSESNYPPQYLILKLERPAIVQNITFGKYEKTHVCNLKKFKVFGGMNEENMTELLSSGLKNDYNKETFTLKHKIDEQMFPCRFIKIVPLLSWGPSFNFSIWYVELSGIDDPDIVQPCLNWYSKYREQEAIRLCLKHFRQHNYTEAFESLQKKTKIALEHPMLTDIHDKLVLKGDFDACEELIEKAVNDGLFNQYISQQEYKPRWSQIIPKSTKGDGEDNRPGMRGGHQMVIDVQTETVYLFGGWDGTQDLADFWAYSVKENQWTCISRDTEKENGPSARSCHKMCIDIQRRQIYTLGRYLDSSVRNSKSLKSDFYRYDIDTNTWMLLSEDTAADGGPKLVFDHQMCMDSEKHMIYTFGGRILTCNGSVDDSRASEPQFSGLFAFNCQCQTWKLLREDSCNAGPEDIQSRIGHCMLFHSKNRCLYVFGGQRSKTYLNDFFSYDVDSDHVDIISDGTKKDSGMVPMTGFTQRATIDPELNEIHVLSGLSKDKEKREENVRNSFWIYDIVRNSWSCVYKNDQAAKDNPTKSLQEEEPCPRFAHQLVYDELHKVHYLFGGNPGKSCSPKMRLDDFWSLKLCRPSKDYLLRHCKYLIRKHRFEEKAQVDPLSALKYLQNDLYITVDHSDPEETKEFQLLASALFKSGSDFTALGFSDVDHTYAQRTQLFDTLVNFFPDSMTPPKGNLVDLITL

SEQ ID NO: 41814 - protein, 11 aa, Homo sapiens
TKYLKDVTLQK

SEQ ID NO: 41815 - protein, 52 aa, Homo sapiens
LFSSPASALLFFARPCVFCFKASKMGPQFENYPTFPTYSPLPIIPFQLHGRF

SEQ ID NO: 41816 - protein, 707 aa, Homo sapiens
ILRSEPVRTPPIPAFSPLKTLRIMSLHQFLLEPITCHAWNRDRTQIALSPNNHEVHIYKKNGSQWVKAHELKEHNGHITGIDWAPKSDRIVTCGADRNAYVWSQKDGVWKPTLVILRINRAATFVKWSPLENKFAVGSGARLISVCYFESENDWWVSKHIKKPIRSTVLSLDWHPNNVLLAAGSCDFKCRVFSAYIKEVDEKPASTPWGSKMPFGQLMSEFGGSGTGGWVHGVSFSASGSRLAWVSHDSTVSVADASKSVQVSTLKTEFLPLLSVSFVSENSVVAAGHDCCPMLFNYDDRGCLTFVSKLDIPKQSIQRNMSAMERFRNMDKRATTEDRNTALETLHQNSITSQAAMAYHSFLVEPISCHAWNKDRTQIAICPNNHEVHIYEKSGAKWTKVHELKEHNGQVTGIDWAPESNRIVTCGTDRNAYVWTLKGRTWKPTLVILRINRAARCVRWAPNENKFAVGSGSRVISICYFEQENDWWVCKHIKKPIRSTVLSLDWHPNNVLLAAGSCDFKCRIFSAYIKEVEERPAPTPWGSKMPFGELMFESSSSCGWVHGVCFSASGSRVAWVSHDSTVCLADADKKMAVATLASETLPLLALTFITDNSLVAAGHDCFPVLFTYDAAAGMLSFGGRLDVPKQSSQRGLTARERFQNLDKKASSEGGTAAGAGLDSLHKNSVRSRCSAAARPSARSSAPLAWMAA

SEQ ID NO: 41817 - protein, 23 aa, Homo sapiens
MVSIHILLLPALLKSCSHLSASQ

SEQ ID NO: 41818 - protein, 15 aa, Homo sapiens
KNRLDYHISVQNMMH

SEQ ID NO: 41819 - protein, 28 aa, Homo sapiens
RHFNAPSHIYRKTMSSPLSKELRQKYNV

SEQ ID NO: 41820 - protein, 7 aa, Homo sapiens
MVLYIFI

SEQ ID NO: 41821 - protein, 29 aa, Homo sapiens
IYLVYFSLSLMSCTIADLSTMSADCVEKL

SEQ ID NO: 41822 - protein, 183 aa, Homo sapiens
LAPDMQRQNFRPPTPPYPGPGGGGWGSGSSFRGTPGGGGPRPPSPRDGYGSPHHTPPYGPRSRPYGSSHSPRHGGSFPGGRFGSPSPGGYPGSYSRSPAGSQQQFGYSPGQQQTHPQGSPRTSTPFGSGRVREKRMSNELENYFKPSMLEDPWAGLEPVSVVDISQQYSNTQTFTGKKGRYFC

SEQ ID NO: 41823 - protein, 5 aa, Homo sapiens
RCVLL

SEQ ID NO: 41824 - protein, 40 aa, Homo sapiens
KSTLINSLFLTDLYSPEYPGPSHRIKKTVQNTHAGLERCY

SEQ ID NO: 41825 - protein, 187 aa, Homo sapiens [sequence omitted]

SEQ ID NO: 41826 - protein, 7 aa, Homo sapiens
LVPPILI

SEQ ID NO: 41827 - protein, 27 aa, Homo sapiens
LKEQRKESGKNKHSSGQQNLNTITYET

SEQ ID NO: 41828 - protein, 463 aa, Homo sapiens
RPSTYGIPRLERILLAKERIRFVIKKHELLSSTREDLQLDKPASGVKEEWYARITKLRKMVDQLFCKKFAEALGSTEAKAVPYQKFEAHPNDLYVEGLPENIPFRSPSWYGIPRLEKIIQVGNRIKFVIKRPELLTHSTTEVTQPRTNTPVKEDWNVRITKLRKQVEEIFNLKFAQALGLTEAVKVPYPVFESNPEFLYVEGLPEGIPFRSPTWFGIPRLERIVRGSNKIKFVVKKPELVISYLPPGMASKINTKALQSPKRPRSPGSNSKVPEIEVTVEGPNNNNPQTSAVRTPTQTNGSNVPFKPRGREFSFEAWNAKITDLKQKVENLFNEKCGEALGLKQAVKVPFALFESFPEDFYVEGLPEGVPFRRPSTFGIPRLEKILRNKAKIKFIIKKPEMFETAIKESTSSKSPPRKINSSPNVNTTASGVEDLNIIQVTIPDDDNERLSKVEKAVAKRTSE

SEQ ID NO: 41829 - protein, 127 aa, Homo sapiens
VNDLFSRKFGEAIGMGFPVKVPYRKITINPGCVVVDGMPPGVSFKAPSYLEISSMRRILDSAEFIKFTVIRPFPGLVINNQLVDQSESEGPVIQESAEPSQLEVPATEEIKETDGSSQIKQEPDPTW

SEQ ID NO: 41830 - protein, 12 aa, Homo sapiens
KAKAKELATKLG

SEQ ID NO: 41831 - protein, 17 aa, Homo sapiens
VVLMLLLYVTYTRLLGS

SEQ ID NO: 41832 - protein, 61 aa, Homo sapiens
TWSVGENMSLRRHIGNPEYLMKRIPQNPRYQHIKSRLDTGACVYLTSSPALPDCAMNGLCF

SEQ ID NO: 41833 - protein, 380 aa, Homo sapiens
TWSVGENMSLRRHIGNPEYLMKRIPQNPRYQHIKSRLDTGNSMTKYTEKLEEIKKNYRYKKDELFKRLKVTTFAQLIIQVASLSDQTLEVTAEEIQRLEDNDSAASDPDAETTARTNGKGNPGEQSPSPEQFINNAGAGDSSRSTLQSVISGVGELDLDKGPVKKAEPHTKDKPYPDCPFLLLDVRDRDSYQQCHIVGAYSYPIATLSRTMNPYSNDILEYKNAHGKIIILYDDDERLASQAATTMCERGFENLFMLSGGLKVLAQKFPEGLITGSLPASCQQALPPGSARKRSSPKGPPLPAENKWRFTPEDLKKIEYYLEEEQGPADHPSRLNQANSSGRESKVPGARSAQNLPGGGPASHSNPRSLSSGHLQGKPWK

SEQ ID NO: 41834 - protein, 104 aa, Homo sapiens
IKLNPRLAILYAKRASVFVKLQKPNAAIRDCDRAIEINPDSAQPHKWQGKAYRLLGHWEEAAHDLALACKLDYDEDASAMLKEVQHRAQKIAEHRRKYERKCEE

SEQ ID NO: 41835 - protein, 10 aa, Homo sapiens
LRKKFAQKML

SEQ ID NO: 41836 - protein, 24 aa, Homo sapiens
LLCMPLSPGAAAADHSSRSHRRRG

SEQ ID NO: 41837 - protein, 45 aa, Homo sapiens
LSTFTLAVSAGAVLLLPFSIISNEILLSFPQNYYIQWLNGSLIHG

SEQ ID NO: 41838 - protein, 38 aa, Homo sapiens
LKSESQCRVVVLMGSTSDLGHCEKIKKACGNFGIPCEL

SEQ ID NO: 41839 - protein, 33 aa, Homo sapiens
MRRIHLGLAFALGWCWKLLVVARSLLHCKGVRI

SEQ ID NO: 41840 - protein, 23 aa, Homo sapiens
LELQLPTCTLPGFRPVPESPQNG

SEQ ID NO: 41841 - protein, 563 aa, Homo sapiens
LWLHFYLWWLCYGGAEMRQKRKGDLSPAELMMLTIGDVIKQLIEAHEQGKDIDLNKVKTKTAAKYGLSAQPRLVDIIAAVPPQYRKVLMPKLKAKPIRTASGIAVVAVMCKPHRCPHISFTGNICVYCPGGPDSDFEYSTQSYTGYEPTSMRAIRARYDPFLQTRHRIEQLKQLGHSVDKVEFIVMGGTFMALPEEYRDYFIRNLHDALSGHTSNNIYEAVKYSERSLTKCIGITIETRPDYCMKRHLSDMLTYGCTRLEIGVQSVYEDVARDTNRGHTVKAVCESFHLAKDSGFKVVAHMMPDLPNVGLERDIEQFTEFFENPAFRPDGLKLYPTLVIRGTGLYELWKSGRYKSYSPSDLVELVARILALVPPWTRVYRVQRDIPMPLVSSGVEHGNLRELALARMKDLGIQCRDVRTREVGIQEIHHKVRPYQVELVRRDYVANGGWETFLSYEDPDQDILIGLLRLRKCSEETFRFELGGGVSIVRELHVYGSVVPVSSRDPTKFQHQGFGMLLMEEAERIAREEHGSGKIAVISGVGTRNYYRKIGYRLQGPYMVKMLK

SEQ ID NO: 41842 - protein, 341 aa, Homo sapiens
MAAEAGEAVASPMDDGFVSLDSPSYVLYRDRAEWADIDPVPQNDGPNPVVQIIYSDKFRDVYDYFRAVLQRDERSERAFKLTRDAIELNAANYTVWHFRRVLLKSLQKDLHEEMNYITAIIEEQPKNYQVWHHRRVLVEWLRDPSQELEFIADILNQDAKNYHAWQHRQWVIQEFKLWDNELQYVDQLLKEDVRNNSVWNQRYFVISNTTGYNDRAVLEREVQYTLEMIKLVPHNESAWNYLKGILQDRGLSKYPNLLNQLLDLQPSHSSPYLIAFLVDIYEDMLENQCDNKEDILNKALELCEILAKEKDTIRKEYWRYIGRSLQSKHSTENDSPTNVQQ

SEQ ID NO: 41843 - protein, 827 aa, Homo sapiens
KGKRLSPPIPLPLGAGAGGAALMAFSPWQILSPVQWAKWTWSAVRGGAAGEDEAGGPEGDPEEEDSQAETKSLSFSSDSEGNFETPEAETPIRSPFKESCDPSLGLAGPGAKSQESQEADEQLVAEVVEKCSSKTCSKPSENEVPQQAIDSHSVKNFREEPEHDFSKISIVRPFSIETKDSTDISAVLGTKAAHGCVTAVSGKALPSSPPDALQDEAMTEGSMGVTLEASAEADLKAGNSCPELVPSRRSKLRKPKPVPLRKKAIGGEFSDTNAAVEGTPLPKASYHFSPEELDENTSPLLGDARFQKSPPDLKETPGTLSSDTNDSGVELGEESRSSPLKLEFDFTEDTGNIEARKALPRKLGRKLGSTLTPKIQKDGISKSAGLEQPTDPVARDGPLSQTSSKPDPSQWESPSFNPFGSHSVLQNSPPLSSEGSYHFDPDNFDESMDPFKPTTTLTSSDFCSPTGNHVNEILESPKKAKSRLITSGCKVKKHETQSLALDACSRDEGAVISQISDISNRDGHATDEEKLASTSCGQKSAGAEVKGEPEEDLEYFECSNVPVSTINHAFSSSEAGIEKETCQKMEEDGSTVLGLLESSAEKAPVSVSCGGESPLDGICLSESDKTAVLTLIREEIITKEIEANEWKKKYEETRQEVLEMRKIVAEYEKTIAQMIEDEQRTSMTSQKSFQQLTMEKEQALADLNSVERSLSDLFRRYENLKGVLEGFKKNEEALKKCAQDYLARVKQEEQRYQALKIHAEEKLDKANEEIAQVRTKAKAESAALHAGLRKEQMKVESLERALQQKNQEIEELTKICDELIAKLGKTD

SEQ ID NO: 41844 - protein, 43 aa, Homo sapiens
INFKRKRVAAFRKNLIEMSELEIKHARNNVSLLQSCIDLFKNN

SEQ ID NO: 41845 - protein, 55 aa, Homo sapiens
LIWCLAWMPGLQALLVVALHSHPAEEDLLDWIFSGFLSDIVLYLPMKTLFFGLCK

SEQ ID NO: 41846 - protein, 261 aa, Homo sapiens
VMLFLALGSPWAVELPLCGRRTALCAAAALRGPRASVSRASSSSGPSGPVAGWSTGPSGAARLLRRPGRAQIPVYWEGYVRFLNTPSDKSEDGRLIYTGNMARAVFGVKCFSYSTSLIGLTFLPYIFTQNNAISESVPLPIQIIFYGIMGSFTVITPVLLHFITKGYVIRLYHEATTDTYKAITYNAMLAETSTVFHQNDVKIPDAKHVFTTFYAKTKSLLVNPVLFPNREDYIHLMGYDKEEFILYMEETSEEKRHKDDK

SEQ ID NO: 41847 - protein, 16 aa, Homo sapiens
KISQKKLKKQKLMAQE

SEQ ID NO: 41848 - protein, 226 aa, Homo sapiens
LFFSSVQWVLIPTMAITQFRLFKFCTCLATVFSFLKRLICRSGRGRKLSGDQITLPTTVDYSSVPKQTDVEEWTSWDEDAPTSVKIEGGNGNVATQQNSLEQLEPDYFKDMTPTIRKTQKIVIKKREPLNFGIPDGSTGFSSRLAATQDLPFIHQSSELGDLDTWQENTNAWEEEEDAAWQAEEVLRQQKLADREKRAAEQQRKKMEKEAQRLMKKEQNKIGVKLS

SEQ ID NO: 41849 - protein, 358 aa, Homo sapiens
LESTSRARRPASMEEKYLPELMAEKDSLDPSFTHALRLVNQEIEKFQKGEGKDEEKYIDVVINKNMKLGQKVLIPVKQFPKFNFVGKLLGPRGNSLKRLQEETLTKMSILGKGSMRDKAKEEELRKSGEAKYFHLNDDLHVLIEVFAPPAEAYARMGHALEEIKKFLIPDYNDEIRQAQLQELTYLNGGSENADVPVVRGKPTLRTRGVPAPAITRGRGGVTARPVGVVVPRGTPTPRGVLSTRGPVSRGRGLLTPRARGVPPTGYRPPPPPPTQETYGEYDYDDGYGTAYDEQSYDSYDNSYSTPAQSGADYYDYGHGLSEETYDSYGQEEWTNSRHKAPSARTAKGVYRDQPYGRY

SEQ ID NO: 41850 - protein, 137 aa, Homo sapiens
TAILSRMKIFLPVLLAALLGVERASSLMCFSCLNQKSNLYCLKPTICSDQDNYCVTVSASAGIGNLVTFGHSLSKTCSPACPIPEGVNVGVASMGISCCQSFLCNFSAADGGLRASVTLLGAGLLLSLLPALLRFGP

SEQ ID NO: 41851 - protein, 400 aa, Homo sapiens
LAARAMPGRSCVALVLLAAAVSCAVAQHAPPWTEDCRKSTYPPSGPTYRGAVPWYTINLDLPPYKRWHELMLDKAPVLKVIVNSLKNMINTFVPSGKIMQVVDEKLPGLLGNFPGPFEEEMKGIAAVTDIPLGEIISFNIFYELFTICTSIVAEDKKGHLIHGRNMDFGVFLGWNINNDTWVITEQLKPLTVNLDFQRNNKTVFKASSFAGYVGMLTGFKPGLFSLTLNERFSINGGYLGILEWILGKKDVMWIGFLTRTVLENSTSYEEAKNLLTKTKILAPAYFILGGNQSGEGCVITRDRKESLDVYELDAKQGRWYVVQTNYDRWKHPFFLDDRRTPAKMCLNRTSQENISFETMYDVLSTKPVLNKLTVYTTLIDVTKGQFETYLRDCPDPCIGW

SEQ ID NO: 41852 - protein, 20 aa, Homo sapiens
MLPTGGPPLPGSPAGQAGGL

SEQ ID NO: 41853 - protein, 326 aa, Homo sapiens
VAFTMEGISNFKTPSKLSEKKKSVLCSTPTINIPASPFMQKLGFGTGVNVYLMKRSPRGLSHSPWAVKKINPICNDHYRSVYQKRLMDEAKILKSLHHPNIVGYRAFTEANDGSLCLAMEYGGEKSLNDLIEERYKASQDPFPAAIILKVALNMARGLKYLHQEKKLLHGDIKSSNVVIKGDFETIKICDVGVSLPLDENMTVTDPEACYIGTEPWKPKEAVEENGVITDKADIFAFGLTLWEMMTLSIPHINLSNDDDDEDKTFDESDFDDEAYYAALGTRPPINMEELDESYQKVIELFSVCTNEDPKDRPSAAHIVEALETDV

SEQ ID NO: 41854 - protein, 16 aa, Homo sapiens
IVLTTSAGIMDHEEAR

SEQ ID NO: 41855 - protein, 292 aa, Homo sapiens
IMDPSLLRERELFKKRALSTPVVEKRSASSESSSSSSKKKKTKVEHGGSSGSKQNSDHSNGSFNLKALSGSSGYKFGVLAKIVNYMKTRHQRGDTHPLTLDEILDETQHLDIGLKQKQWLMTEALVNNPKIEVIDGKYAFKPKYNVRDKKALLRLLDQHDQRGLGGILLEDIEEALPNSQKAVKALGDQILFVNRPDKKKILFFNDKSCQFSVDEEFQKLWRSVTVDSMDEEKIEEYLKRQGISSMQESGPKKVAPIQRRKKPASQKKRRFKTHNEHLAGVLKDYSDITSSK

SEQ ID NO: 41856 - protein, 27 aa, Homo sapiens
KMAAVSVWGISAVRPGAPGSRLSFLPA

SEQ ID NO: 41857 - protein, 312 aa, Homo sapiens
LLCVLGLLLCGAASLELSRPHGDTAKKPIIGILMQKCRNKVMKNYGRYYIAASYVKYLESAGARVVPVRLDLTEKDYEILFKSINGILFPGGSVDLRRSDYAKVAKIFYNLSIQSFDDGDYFPVWGTCLGFEELSLLISGECLLTATDTVDVAMPLNFTGGQLHSRMFQNFPTELLLSLAVEPLTANFHKWSLSVKNFTMNEKLKKFFNVLTTNTDGKIEFISTMEGYKYPVYGVQWHPEKAPYEWKNLDGISHAPNAVKTAFYLAEFFVNEARKNNHHFKSESEEEKALIYQFSPIYTGNISSFQQCYIFD

SEQ ID NO: 41858 - protein, 8 aa, Homo sapiens
KNKPVGCT

SEQ ID NO: 41859 - protein, 21 aa, Homo sapiens
KKEVKKKRWNRPKMSLAWKKG

SEQ ID NO: 41860 - protein, 91 aa, Homo sapiens
TGPSKRLVPKMFTMGFLKTVLLGTSACVSPPTMPAFFSLPAERRLQAWPQSEAPLSVSSCFQNRPPEPASFQNLRPEPASLQNLRTEPTSF

SEQ ID NO: 41861 - protein, 496 aa, Homo sapiens
LSPAAMEQPPAPKSKLKKLSEDSLTKQPEEVFDVLEKLGEGSYGSVFKAIHKESGQVVAIKQVPVESDLQEIIKEISIMQQCDSPYVVKYYGSYFKNTDLWIVMEYCGAGSVSDIIRLRNKTLIEDEIATILKSTLKGLEYLHFMRKIHRDIKAGNILLNTEGHAKLADFGVAGQLTDTMAKRNTVIGTPFWMAPEVIQEIGYNCVADIWSLGITSIEMAEGKPPYADIHPMRAIFMIPTNPPPTFRKPELWSDDFTDFVKKCLVKNPEQRATATQLLQHPFIKNAKPVSILRDLITEAMEIKAKRHEEQQRELEEEEENSDEDELDSHTMVKTSVESVGTMRATSTMSEGAQTMIEHNSTMLESDLGTMVINSEDEEEEDGTMKRNATSPQVQRPSFMDYFDKQDFKNKSHENCNQNMHEPFPMSKNVFPDNWKVPQDGDFDFLKNLSLEELQMRLKALDPMMEREIEELRQRYTAKRQPILDAMDAKKRRQQNF

SEQ ID NO: 41862 - protein, 49 aa, Homo sapiens
KNMKSMNFDNPVYLKTTEEDLSIDIGRHSASVGHTYPAISVVSTDDDLA

SEQ ID NO: 41863 - protein, 398 aa, Homo sapiens
IGVTSPASVRSRRSRAAHVSSESAHMATQAHSLSYAGCNFLRQRLVLSTLSGRPVKIRKIRARDDNPGLRDFEASFIRLLDKITNGSRIEINQTGTTLYYQPGLLYGGSVEHDCSVLRGIGYYLESLLCLAPFMKHPLKIVLRGVTNDQVDPSVDVLKATALPLLKQFGIDGESFELKIVRRGMPPGGGGEVVFSCPVRKVLKPIQLTDPGKIKRIRGMAYSVRVSPQMANRIVDSARSILNKFIPDIYIYTDHMKGVNSGKSPGFGLSLVAETTSGTFLSAELASNPQGQGAAVLPEDLGRNCARLLLEEIYRGGCVDSTNQSLALLLMTLGQQDVSKVLLGPLSPYTIEFLRHLKSFFQIMFKIETKPCGEELKGGDKVLMTCVGIGFSNLSKTLK

SEQ ID NO: 41864 - protein, 18 aa, Homo sapiens
MGYACVQRTRRCAPASLS

SEQ ID NO: 41865 - protein, 149 aa, Homo sapiens
KTMALRACGLIIFRRCLIPKVDNNAIEFLLLQASDGIHHWTPPKGHVEPGEDDLETALRETQEEAGIEAGQLTIIEGFKRELNYVARNKPKTVIYWLAEVKDYDVEIRLSHEHQAYRWLGLEEACQLAQFKEMKAALQEGHQFLCSIEA

SEQ ID NO: 41866 - protein, 64 aa, Homo sapiens
RAMESRRRGIPAVEGQWIGARGLQLAWGSCLGFGRWGPVAHPFRSCPKWSWNWMLVTKTCWPSC

SEQ ID NO: 41867 - protein, 23 aa, Homo sapiens
KAAPKQKIVKPVKVSAPQVGGKR

SEQ ID NO: 41868 - protein, 52 aa, Homo sapiens
LYWSHPRKFGQGSRSCCVCSNNRHGLIRKYGLNMCRQCFRQYAKDIGFIKLD

SEQ ID NO: 41869 - skipped

SEQ ID NO: 41870 - protein, 482 aa, Homo sapiens
KRAGAQAAGSTWLQGFGRPSVYHAAIVIFLEFFAWGLLTTPMLTVLHETFSQHTFLMNGLIQGVKGLLSFLSAPLIGALSDVWGRKPFLLGTVFFTCFPIPLMRISPWWYFAMISVSGVFSVTFSVIFAYVADVTQEHERSTAYGWVSATFAASLVSSPAIGAYLSASYGDSLVVLVATVVALLDICFILVAVPESLPEKMRPVSWGAQISWKQADPFASLKKVGKDSTVLLICITVFLSYLPEAGQYSSFFLYLRQVIGFGSVKIAAFIAMVGILSIVAQTAFLSILMRSLGNKNTVLLGLGFQMLQLAWYGFGSQAWMMWAAGTVAAMSSITFPAISALVSRNAESDQQGVAQGIITGIRGLCNGLGPALYGFIFYMFHVELTELGPKLNSNNVPLQGAVIPGPPFLFGACIVLMSFLVALFIPEYSKASGVQKHSNSSSGSLTNTPERGSDEDIEPLLQDSSIWELSSFEEPGNQCTEL

SEQ ID NO: 41871 - protein, 557 aa, Homo sapiens
LALLALAGLGSVLRAQRGAGAGAAEPGPPRTPRPGRREPVMPRPPVPANALGARGEAVRLQLQGEELRLQEESVRLHQINIYLSDRISLHRRLPERWNPLCKEKKYDYDNLPRTSVIIAFYNEAWSTLLRTVYSVLETSPDILLEEVILVDDYSDREHLKERLANELSGLPKVRLIRANKREGLVRARLLGASAARGDVLTFLDCHCECHEGWLEPLLQRIHEEESAVVCPVIDVIDWNTFEYLGNSGEPQIGGFDWRLVFTWHTVPERERIRMQSPVDVIRSPTMAGGLFAVSKKYFEYLGSYDTGMEVWGGENLEFSFRIWQCGGVLETHPCSHVGHVFPKQAPYSRNKALANSVRAAEVWMDEFKELYYHRNPRARLEPFGDVTERKQLRDKLQCKDFKWFLETVYPELHVPEDRPGFFGMLQNKGLTDYCFDYNPPDENQIVGHQVILYLCHGMGQNQFFEYTSQKEIRYNTHQPEGCIAVEAGMDTLIMHLCEETAPENQKFILQEDGSLFHEQSKKCVQAARKESSDSFVPLLRDCTNSDHQKWFFKERML

SEQ ID NO: 41872 - protein, 626 aa, Homo sapiens
LLLFILFCIGMGFICGFSIATGAAARLVSGYDSYGNICGQKNTKLEAIPNSGMDHTQRKYVFFLDPCNLDLINRKIKSVALCVAACPRQELKTLSDVQKFAEINGSALCSYNLKPSEYTTSPKSSVLCPKLPVPASAPIPFFHRCAPVNISCYAKFAEALITFVSDNSVLHRLISGVMTSKEIILGLCLLSLVLSMILMVIIRYISRVLVWILTILVILGSLGGTGVLWWLYAKQRRSPKETVTPEQLQIAEDNLRALLIYAISATVFTVILFLIMLVMRKRVALTIALFHVAGKVFIHLPLLVFQPFWTFFALVLFWVYWIMTLLFLGTTGSPVQNEQGFVEFKISGPLQYMWWYHVVGLIWISEFILACQQMTVAGAVVTYYFTRDKRNLPFTPILASVNRLIRYHLGTVAKGSFIITLVKIPRMILMYIHSQLKGKENACARCVLKSCICCLWCLEKCLNYLNQNAYTATAINSTNFCTSAKDAFVILVENALRVATINTVGDFMLFLGKVLIVCSTGLAGIMLLNYQQDYTVWVLPLIIVCLFAFLVAHCFLSIYEMVVDVLFLCFAIDTKYNDGSPGREFYMDKVLMEFVENSRKAMKEAGKGGVADSRELKPMASGASSA

SEQ ID NO: 41873 - protein, 208 aa, Homo sapiens
LDLTWKESSADSQLFLEKMDHSHHMGMSYMDSNSTMQPSHHHPTTSASHSHGGGDSSMMMMPMTFYFGFKNVELLFSGLVINTAGEMAGAFVAVFLLAMFYEGLKIARESLLRKSQVSIRYNSMPVPGPNGTILMETHKTVGQQMLSFPHLLQTVLHIIQVVISYFLMLIFMTYNGYLCIAVAAGAGTGYFLFSWKKAVVVDITEHCH

SEQ ID NO: 41874 - protein, 387 aa, Homo sapiens
LDFGDSCQWPRPQDTMKQLPVLEPGDKPRKATWYTLTVPGDSPCARVGHSCSYLPPVGNAKRGKVFIVGGANPNRSFSDVHTMDLGKHQWDLDTCKGLLPRYEHASFIPSCTPDRIWVFGGANQSGNRNCLQVLNPETRTWTTPEVTSPPPSPRTFHTSSAAIGNQLYVFGGGERGAQPVQDTKLHVFDANTLTWSQPETLGNPPSPRHGHVMVAAGTKLFIHGGLAGDRFYDDLHCIDISDMKWQKLNPTGAAPAGCAAHSAVAMGKHVYIFGGMTPAGALDTMYQYHTEEQHWTLLKFDTLLPPGRLDHSMCIIPWPVTCASEKEDSNSLTLNHEAEKEDSADKVMSHSGDSHEESQTATLLCLVFGGMNTEGEIYDDCIVTVVD

SEQ ID NO: 41875 - protein, 228 aa, Homo sapiens
VVGDSMTSEVIEDEKQFYSKAKTYWKQIPPTVDGMLGGYGHISSIDINSSRKFLQRFLREGPNKTGTSCALDCGAGIGRITKRLLLPLFREVDMVDITEDFLVQAKTYLGEEGKRVRNYFCCGLQDFTPEPDSYDVIWIQWVIGHLTDQHLAEFLRRCKGSLRPNGIIVIKDNMAQEGVILDDVDSSVCRDLDVVRRIICSAGLSLLAEERQENLPDEIYHVYSFALR

SEQ ID NO: 41876 - protein, 603 aa, Homo sapiens
TGPQAEREAGPGSRAAASAASAAAATAAGAVMAELVQGQSAPVGMKAEGFVDALHRVRQIAAKIDSIPHLNNSTPLVDPSVYGYGVQKRPLDDGVGNQLGALVHQRTVITEEFKVPDKMVGFIIGRGGEQISRIQAESGCKIQIASESSGIPERPCVLTGTPESIEQAKRLLGQIVDRCRNGPGFHNDIDSNSTIQEILIPASKVGLVIGRGGETIKQLQERTGVKMVMIQDGPLPTGADKPLRITGDAFKVQQAREMVLEIIREKDQADFRGVRGDFNSRMGGGSIEVSVPRFAVGIVIGRNGEMIKKIQNDAGVRIQFKPDDGISPERAAQVMGPPDRCQHAAHIISELILTAQERDGFGGLAAARGRGRGRGDWSVGAPGGVQEITYTVPADKCGLVIGKGGENIKSINQQSGAHVELQRNPPPNSDPNLRRFTIRGVPQQIEVARQLIDEKVGGTNLGAPGAFGQSPFSQPPAPPHQNTFPPRSSGCFPNMAAKVNGNPHSTPVSGPPAFLTQGWGSTYQAWQQPTQQVPSQQSQPQSSQPNYSKAWEDYYKKQSHAASAAPQASSPPDYTMAWAEYYRQQVAFYGQTLGQAQAHSQEQ

SEQ ID NO: 41877 - protein, 466 aa, Homo sapiens
LPPARTQGTPVHLNYRQKGVIDVFLHAWKGYRKFAWGHDELKPVSRSFSEWFGLGLTLIDALDTMWILGLRKEFEEARKWVSKKLHFEKDVDVNLFESTIRILGGLLSAYHLSGDSLFLRKAEDFGNRLMPAFRTPSKIPYSDVNIGTGVAHPPRWTSDSTVAEVTSIQLEFRELSRLTGDKKFQEAVEKVTQHIHGLSGKKDGLVPMFINTHSGLFTHLGVFTLGARADSYYEYLLKQWIQGGKQETQLLEDYVEAIEGVRTHLLRHSEPSKLTFVGELAHGRFSAKMDHLVCFLPGTLALGVYHGLPASHMELAQELMETCYQMNRQMETGLSPEIVHFNLYPQPGRRDVEVKPADRHNLLRPETVESLFYLYRVTGDRKYQDWGWEILQSFSRFTRVPSGGYSSINNVQDPQKPEPRDKMESFFLGETLKYLFLLFSDDPNLLSLDAYVFNTEAHPLPIWTPA

SEQ ID NO: 41878 - protein, 20 aa, Homo sapiens
VSIFLLLTGPTYLLFKLSPG

SEQ ID NO: 41879 - protein, 7 aa, Homo sapiens
ISTLHGG

SEQ ID NO: 41880 - protein, 1125 aa, Homo sapiens
ILYILYMMTSVSSDHCRGAREKPQISAAQSTQPQKQVVQATAEQMRLAQVIFDKNDSDFEAKVKQLMEVTGKNQDECIVALHDCNGDVNKAINILLEGNSDTTSWETVGCKKKNFAKENSENKENREKKSEKESSRGRGNNNRKGRGGNRGREFRGEENGIDCNQVDKPSDRGKRARGRGFGRGRGRGAGRFSTQGMGTFNPADYSDSTSTDVCGTKLVVWEAAQNGADEGTELASNTHNIAQDLSNKSSYGLKGAWKNSVEEWTTEDWTEDLSETKVFTASSAPAENHILPGQSIDLVALLQKPVPHSQASEANSFETSQQQGFGQALVFTNSQHNNQMAPGTGSSTAVNSCSPQSLSSVLGSGFGELAPPKMANITSSQILDQLKAPSLGQFTTTPSTQQNSTSHPTTTTSWDLKPPTSQSSVLSHLDFKSQPEPSPVLSQLSQRQQHQSQAVTVPPPGLESFPSQAKLRESTPGDSPSTVNKLLQLPSTTIENISVSVHQPQPKHIKLAKRRIPPASKIPASAVEMPGSADVTGLNVQFGALEFGSEPSLSEFGSAPSSENSNQIPISLYSKSLSEPLNTSLSMTSAVQNSTYTTSVITSCSLTSSSLNSASPVAMSSSYDQSSVHNRIPYQSPVSSSESAPGTIMNGHGGGRSQQTLDTPKTTGPPSALPSVSSLPSTTSCTALLPSTSQHTGDLTSSPLSQLSSSLSSHQSSLSAHAALSSSTSHTHASVESASSHQSSATFSTAATSVSSSASSGASLSSSMNTANSLCLGGTPASASSSSSRAAPLVTSGKAPPNLPQGVPPLLHNQYLVGPGGLLPAYPIYGYDELQMLQSRLPVDYYGIPFAAPTALASRDGSLANNPYPGDVTKFGRGDSASPAPATTPAQPQQSQSQTHHTAQQPFVNPALPPGYSYTGLPYYTGMPSAFQYGPTMFVPPASAKQHGVNLSTPTPPFQQASGYGQHGYSTGYDDLTQGTAAGDYSKGGYAGSSQAPNKSAGSGPGKGVSVSSSTTGLPDMTGSVYNKTQTFDKQGFHAGTPPPFSLPSVLGSTGPLASGAAPGYAPPPFLHILPAHQQPHSQLLHHHLPQDAQSGSGQRSQPSSLQPKSQASKPAYGNSPYWTN

SEQ ID NO: 41881 - protein, 12 aa, Homo sapiens
LTPEEEEILNKK

SEQ ID NO: 41882 - protein, 164 aa, Homo sapiens
RMEHYRKAGSVELPAPSPMPQLPPDTLEMRVRDGSKIRNLLGLALGRLEGGSARHVVFSGSGRAAGKAVSCAEIVKRRVPGLHQLTKLRFLQTEDSWVPASPDTGLDPLTVRRHVPAVWVLLSRDPLDPNECGYQPPGAPPGLGSMPSSSCGPRSRRRARDTRS

SEQ ID NO: 41883 - protein, 228 aa, Homo sapiens
TQLLRRPAVFVGSAASGIRSGLWSASSGHWCAPAAGRAHAPVPRLVRGLGAASTAAPQDAQTGPQPIPRADCIMRHLPYFCRGQVVRGFGRGSKQLGIPTANFPEQVVDNLPADISTGIYYGWASVGSGDVHKMVVSIGWNPYYKNTKKSMETHIMHTFKEDFYGEILNVAIVGYLRPEKNFDSLESLISAIQGDIEEAKKRLELPEHLKIKEDNFFQVSKSKIMNGH

SEQ ID NO: 41884 - protein, 9 aa, Homo sapiens
LLLLLGPLF

SEQ ID NO: 41885 - protein, 285 aa, Homo sapiens
VSRPRSTLLQEQRKTPRRRRRHLRLLLRPAPGPRRRHQGARLSLPGGLGPASSCRLRARTRLSHLGPCRQKNMAQETNQTPGPMLCSTGCGFYGNPRTNGMCSVCYKEHLQRQQNSGRMSPMGTASGSNSPTSDSASVQRADTSLNNCEGAAGSTSEKSRNVPVAALPVTQQMTEMSISREDKITTPKTEVSEPVVTQPSPSVSQPSTSQSEEKAPELPKPKKNRCFMCRKKVGLTGFDCRCGNLFCGLHRYSDKHNCPYDYKAEAAAKIRKENPVVVAEKIQRI

SEQ ID NO: 41886 - protein, 470 aa, Homo sapiens
IDRVRLFLMQLRKMQTVKKEQASLDASSNVDKMMVLNSALTEVSEDSTTGEELLLSEGSVGKNKSSACRRKREFIPDEKKDAMYWEKRRKNNEAAKRSREKRRLNDLVLENKLIALGEENATLKAELLSLKLKFGLISSTAYAQEIQKLSNSTAVYFQDYQTSKSNVSSFVDEHEPSMVSSSCISVIKHSPQSSLSDVSEVSSVEHTQESSVQGSCRSPENKFQIIKQEPMELESYTREPRDDRGSYTASIYQNYMGNSFSGYSHSPPLLQVNRSSSNSPRTSETDDGVVGKSSDGEDEQQVPKGPIHSPVELKHVHATVVKVPEVNSSALPHKLRIKAKAMQIKVEAFDNEFEATQKLSSPIDMTSKRHFELEKHSAPSMVHSSLTPFSVQVTNIQDWSLKSEHWHQKELSGKTQNSFKTGVVEMKDSGYKVSDPENLYLKQGIANLSAEVVSLKRLIATQPISASDSG

SEQ ID NO: 41887 - protein, 39 aa, Homo sapiens
KLQIQCVVEDDKVGTDLLEEITKFEEHVQSVDIAAFNKI

SEQ ID NO: 41888 - protein, 20 aa, Homo sapiens
MDGGDLMSFFLLASLTDLLP

SEQ ID NO: 41889 - protein, 26 aa, Homo sapiens
VPSSCEPGARSRAPGRSLRKMKLWIT

SEQ ID NO: 41890 - protein, 33 aa, Homo sapiens
VTMSTCLWPHCTFHMLQTSPCTRISYSCGFEAT

SEQ ID NO: 41891 - protein, 9 aa, Homo sapiens
VKQYSGKFF

SEQ ID NO: 41892 - protein, 10 aa, Homo sapiens
MQLAWMSETL

SEQ ID NO: 41893 - protein, 1126 aa, Homo sapiens
IMADGPRCKRRKQANPRRNNVTNYNTVVETNSDSDDEDKLHIVEEESVTDAADCEGVPEDDLPTDQTVLPGRSSEREGNAKNCWEDDTGKEGQEILGPEAQADEAGCTVKDDECESDAENEQNHDPNVEEFLQQQDTAVIFPEAPEEDQRQGTPEASGHDENGTPDAFSQLLTCPYCDRGYKRFTSLKEHIKYRHEKNEDNFSCSLCSYTFAYRTQLERHMTSHKSGRDQRHVTQSGCNRKFKCTECGKAFKYKHHLKEHLRIHSGEKPYECPNCKKRFSHSGSYSSHISSKKCISLIPVNGRPRTGLKTSQCSSPSLSASPGSPTRPQIRQKIENKPLQEQLSVNQIKTEPVDYEFKPIVVASGINCSTPLQNGVFTGGGPLQATSSPQGMVQAVVLPTVGLVSPISINLSDIQNVLKVAVDGNVIRQVLENNQANLASKEQETINASPIQQGGHSVISAISLPLVDQDGTTKIIINYSLEQPSQLQVVPQNLKKENPVATNSCKSEKLPEDLTVKSEKDKSFEGGVNDSTCLLCDDCPGDINALPELKHYDLKQPTQPPPLPAAEAEKPESSVSSATGDGNLSPSQPPLKNLLSLLKAYYALNAQPSAEELSKIADSVNLPLDVVKKWFEKMQAGQISVQSSEPSSPEPGKVNIPAKNNDQPQSANANEPQDSTVNLQSPLKMTNSPVLPVGSTTNGSRSSTPSPSPLNLSSSRNTQGYLYTAEGAQEEPQVEPLDLSLPKQQGELLERSTITSVYQNSVYSVQEEPLNLSCAKKEPQKDSCVTDSEPVVNVIPPSANPINIAIPTVTAQLPTIVAIADQNSVPCLRALAANKQTILIPQVAYTYSTTVSPAVQEPPLKVIQPNGNQDERQDTSSEGVSNVEDQNDSDSTPPKKKMRKTENGMYACDLCDKIFQKSSSLLRHKYEHTGKRPHECGICKKAFKHKHHLIEHMRLHSGEKPYQCDKCGKRFSHSGSYSQHMNHRYSYCKREAEERDSTEQEEAGPEILSNEHVGARASPSQGDSDERESLTREEDEDSEKEEEEEDKEMEELQEEKECEKPQGDEEEEEEEEEVEEEEVEEAENEGEEAKTEGLMKDDRAESQASSLGQKVGESSEQVSEEKTNEA

SEQ ID NO: 41894 - protein, 178 aa, Homo sapiens [sequence omitted]

SEQ ID NO: 41895 - protein, 46 aa, Homo sapiens
ILGYRSVGKSSLTIQFVEGQFVDSYDPTIENTFTKLITVNGQEYHL

SEQ ID NO: 41896 - protein, 9 aa, Homo sapiens
MVPFARRRS

SEQ ID NO: 41897 - protein, 141 aa, Homo sapiens
VDPRYLVQDTDEFILPTGANKTWGRFELAFFTIGGCCMTGAAFGAMNGLRLGLKETQNMAWSKPGNVQILNMVTRQGALWANTLGSLALLYSAFGVIIEKTRGAEDDLNTVAAGTMTGMLYKCTVSEMALDSPFCVLLSGS

SEQ ID NO: 41898 - protein, 320 aa, Homo sapiens
VASYNNNEDAPHEPDGVALVWNMKYKKTTPEYVFHCQSAVMSATFAKFHPNLVVGGTYSGQTVLWDNRSNKRTPVQRTPLSAAAHTHPVYCVNVVGTQNAHNLISISTDGKICSWSLDMLSHPQDSMELVHKQSKAVAVTSMSFPVGDVNNFVVGSEEGSVYTACHHGSKAGISEMFEGHQGPITGIHCHAAVGAVDFSHLYVTSSFDWTVKLWTTKNNKPLYSFEDNADYVYDVMWSPTHPALFACVDGMGRLDLWNLNNDTEVPTASISVEGNPALNHVRWTHSGREIAVGDSEGQIAIYDVGEQIAVPRNDEWAWFG

SEQ ID NO: 41899 - protein, 18 aa, Homo sapiens
INANRADAEEEAATRIPA

SEQ ID NO: 41900 - protein, 286 aa, Homo sapiens
IFKMAAAPQAPGRGSLRKTRPLVVKTSLNNPYIIRWSALESEDMHFILQTLEDRLKAIGLQKIEDKKKKNKTPFLKKESREKCSIAVDISENLKEKKTDAKQQVSGWTPAHVRKQLAIGVNEVTRALERRELLLVLVCKSVKPAMITSHLIQLSLSRSVPACQVPRLSERIAPVIGLKCVLALAFKKNTTDFVDEVRAIIPRVPSLSVPWLQDRIEDSGENLETEPLESQDRELLDTSFEDLSKPKRKLADGRQASVTLQPLKIKKLIPNPNKIRKPPKSKKATPK

SEQ ID NO: 41901 - protein, 245 aa, Homo sapiens
LSSSANALASVLTMPSLWDRFSSSSTSSSPSSLPRTPTPDRPPRSAWGSATREEGFDRSTSLESSDCESLDSSNSGFGPEEDTAYLDGVSLPDFELLSDPEDEHLCANLMQLLQESLAQARLGSRRPARLLMPSQLVSQVGKELLRLAYSEPCGLRGALLDVCVEQGKSCHSVGQLALDPSLVPTFQLTLVLRLDSRLWPKIQGLFSSANSPFLPGFSQSLTLSTGFRVIKKKLYSSEQLLIEEC

SEQ ID NO: 41902 - protein, 347 aa, Homo sapiens
LGVLLREEEWSRGDAAAALTMSFLGGFFGPICEIDIVLNDGETRKMAEMKTEDGKVEKHYLFYDGESVSGKVNLAFKQPGKRLEHQGIRIEFVGQIELFNDKSNTHEFVNLVKELALPGELTQSRSYDFEFMQVEKPYESYIGANVRLRYFLKVTIVRRLTDLVKEYDLIVHQLATYPDVNNSIKMEVGIEDCLHIEFEYNKSKYHLKDVIVGKIYFLLVRIKIQHMELQLIKKEITGIGPSTTTETETIAKYEIMDGAPVKGESIPIRLFLAGYDPTPTMRDVNKKFSVRYFLNLVLVDEEDRRYFKQQEIILWRKAPEKLRKQRTNFHQRFESPESQASAEQPEM

SEQ ID NO: 41903 - protein, 60 aa, Homo sapiens
LGWLCLLLLPIPLIVWVKRKEVQKTCRKHRKENQGSHESPTLNPETVAINLSDYFLFFRC

SEQ ID NO: 41904 - protein, 136 aa, Homo sapiens
IAIMNDTVTIRTRKFMTNRLLQRKQMVIDVLHPGKATVPKTEIREKLAKMYKTTPDVIFVFGFRTHFGGGKTTGFGMIYDSLDYAKKNEPKHRLARHGLYEKKKTSRKQRKERKNRMKKVRGTAKANVGAGKKPKE

SEQ ID NO: 41905 - protein, 105 aa, Homo sapiens
KHGHAKVHLVGIDIFTGKKYEDICPSTHNMDVPNIKRNDFQLIGIQDGYLSLLQDSGEVPEDLRLPEGDLGKEIEQKYDCGEEILITVLSAMTEEAAVAIKAMAK

SEQ ID NO: 41906 - protein, 65 aa, Homo sapiens
LPPDCGLLRRLSVLLSLGLALSGSTGEGRVRRLRGRCRTKPYSRCWTEVAGFVLLLMKMIEQLNG

SEQ ID NO: 41907 - protein, 46 aa, Homo sapiens
LAPKRMKFFFKRYLDYEKQHGTEKDVQAVKAKALEYVEAKSSVLED

SEQ ID NO: 41908 - protein, 813 aa, Homo sapiens
LPRSSARPPRPAPAFTLERPRQPQQGRRRRIEELSRSSRERLLQSRDRMFSKFTSILQHAVEALAPSLPLQEDFVYHWKAITHYYIETSDDKAPVTDTNIPSHLEQMLDILVQEENERESGETGPCMEYLLHHKILETLYTLGKADCPPGMKQQVLVFYTKLLGRIRQPLLPHINVHRPVQKLIRLCGEVLATPTENEEIQFLCIVCAKLKQDPYLVNFFLENKMKSLASKGVPNVISEDTLKGQDSLSTDTGQSRQPEELSGATGMEQTELEDEPPHQMDHLSTSLDNLSVTSLPEASVVCPNQDYNLVNSLLNLTRSPDGRIAVKACEGLMLLVSLPEPAAAKCLTQSTCLCELLTDRLASLYKALPQSVDPLDIETVEAINWGLDSYSHKEDASAFPGKRALISFLSWFDYCDQLIKEAQKTAAVALAKAVHERFFIGVMEPQLMQTSEMGILTSTALLHRIVRQVTSDVLLQEMVFFILGEQREPETLAEISRHPLRHRLIEHCDHISDEISIMTLRMFEHLLQKPNEHILYNLVLRNLEERNYTEYKPLCPEDKDVVENGLIAGAVDLEEDPLFTDISPENTLPNQEWLSSSPPATPDHPKNDGKTEVHKIVNSFLCLVPDDAKSSYHVEGTGYDTYLRDAHRQFRDYCAICLRWEWPGSPKALEKCNLEAAFFEGHFLKVLFDRMGRILDQPYDVNLQVTSVLSRLSLFPHPHIHEYLLDPYVNLAPGCRSLFSVIVRVVGDLMLRIQRIQDFTPKLLLVRKRLLGLEPEGPIIDHITLLEGVIVLEEFCKELAAIAFVKYHASSTP

SEQ ID NO: 41909 - protein, 301 aa, Homo sapiens
VVHFWAPWAPQCAQMNEVMAELAKELPQVSFVKLEAEGVPEVSEKYEISSVPTFLFFKNSQKIDRLDGAHAPELTKKVQRHASSGSFLPSANEHLKEDLNLRLKKLTHAAPCMLFMKGTPQEPRCGFSKQMVEILHKHNIQFSSFDIFSDEEVRQGLKAYSSWPTYPQLYVSGELIGGLDIIKELEASEELDTICPKAPKLEERLKVLTNKASVMLFMKGNKQEAKCGFSKQILEILNSTGVEYETFDILEDEEVRQGLKAYSNWPTYPQLYVKGELVGGLDIVKELKENGELLPILRGEN

SEQ ID NO: 41910 - protein, 288 aa, Homo sapiens
MDLMVEASPRRIFANAHTYHINSISVNSDHETYLSADDLRINLWHLEITDRSFNIVDIKPANMEELTEVITAAEFHPHQCNVFVYSSSKGTIRLCDMRSSALCDRHSKFFEEPEDPSSRSFFSEIISSISDVKFSHSGRYMMTRDYLSVKVWDLNMESRPVETHQVHEYLRSKLCSLYENDCIFDKFECCWNGSDSAIMTGSYNNFFRMFDRDTRRDVTLEASRESSKPRASLKPRKVCTGGKRRKDEISVDSLDFNKKILHTAWHPVDNVIAVAATNNLYIFQDKIN

SEQ ID NO: 41911 - protein, 396 aa, Homo sapiens
VVAMGKSDFLTPKAIANRIKSKGLQKLRWYCQMCQKQCRDENGFKCHCMSESHQRQLLLASENPQQFMDYFSEEFRNDFLELLRRRFGTKRVHNNIVYNEYISHREHIHMNATQWETLTDFTKWLGREGLCKVDETPKGWYIQYIDRDPETIRRQLELEKKKKQDLDDEEKTAKFIEEQVRRGLEGKEQEVPTFTELSRENDEEKVTFNLSKGACSSSGATSSKSSTLGPSALKTIGSSASVKRKESSQSSTQSKEKKKKKSALDEIMEIEEEKKRTARTDYWLQPEIIVKIITKKLGEKYHKKKAIVKEVIDKYTAVVKMIDSGDKLKLDQTHLETVIPAPGKRILVLNGGYRGNEGTLESINEKTFSATIVIETGPLKGRRVEGIQYEDISKLA

SEQ ID NO: 41912 - protein, 53 aa, Homo sapiens
VAVGLALSPAPFSSLSLPLSFAPKSASQPRRVVTEPLRLFLARVLRPRLPRHE

SEQ ID NO: 41913 - protein, 13 aa, Homo sapiens
MLKFFKNQSFGGI

SEQ ID NO: 41914 - protein, 22 aa, Homo sapiens
MRPHRMNEPRQDSVLPCRNSDC

SEQ ID NO: 41915 - protein, 132 aa, Homo sapiens
MPCSEQNLYPVEDENGERTAGSRWELIQTALLNKFTRPQNLKDAILKYTVAYSKKWDFTALIDFWDKVLEETEAQHLYQSILPDMVKIALCLPNICTQPIPLLKQKMNHSITMSQEQIASLLANAFFCTFPR

SEQ ID NO: 41916 - protein, 46 aa, Homo sapiens; identical to SEQ ID NO: 41895

SEQ ID NO: 41917 - protein, 35 aa, Homo sapiens
IPTEGGDFNEFPVPEQFKTLWNGQKFVATVTEIAG

SEQ ID NO: 41918 - protein, 15 aa, Homo sapiens
REFVFCNKTQSKLLR

SEQ ID NO: 41919 - protein, 12 aa, Homo sapiens
LDSPFCVLLSGS

SEQ ID NO: 41920 - protein, 461 aa, Homo sapiens
IVSHLVTQAGVQWRNLSSLQRRSSSWAQAILLLHPPEYLGLQKMIHSLFLINCSGDIFLEKHWKSVVSQSVCDYFFEAQEKAADVENVPPVISTPHHYLISIYRDKLFFVSVIQTEVPPLFVIEFLHRVADTFQDYFGECSEAAIKDNVVIVYELLEEMLDNGFPLATESNILKELIKPPTILRSVVNSITGSSNVGDTLPTGQLSNIPWRRAGVKYTNNEAYFDVVEEIDAIIDKSGSTVFAEIQGVIDACIKLSGMPDLSLSFMNPRLLDDVSFHPCIRFKRWESERVLSFIPPDGNFRLISYRVSSQNLVAIPVYVKHSISFKENSSCGRFDITIGPKQNMGKTIEGITVTVHMPKVVLNMNLTPTQGSYTFDPVTKVLTWDVGKITPQKLPSLKGLVNLQSGAPKPEENPSLNIQFKIQQLAISGLKVNRLDMYGEKYKPFKGVKYVTKAGKFQVRT

SEQ ID NO: 41921 - protein, 105 aa, Homo sapiens
KHGHAKVHLVGIDIFTGKKYEDICPSTHNMDVPNIRRNDFQLIGIQDGYLSLLQDSGEVPEDLRLPEGDLGKETEQKYDCGEEILITVLSAMTEEAAVAIKAMAK

SEQ ID NO: 41922 - protein, 34 aa, Homo sapiens
MSVSSIKQAVDFLSNEGHIYSSVDDYHFKSTDAE

SEQ ID NO: 41923 - protein, 560 aa, Homo sapiens
VAMYRYLGEALLLSRAGPAALGSASADSAALLGWARGQPAAAPQPGLALAARRHYSEAVADREDDPNFFKMVEGFFDRGASIVEDKLVEDLRTRESEEQKRNRVRGILRIIKPCNHVLSLSFPIRRDDGSWEVIEGYRAQHSQHRTPCKGGIRYSTDVSVDEVKALASLMTYKCAVVDVPFGGAKAGVKINPKNYTDNELEKITRRFTMELAKKGFIGPGIDVPAPDMSTGEREMSWIADTYASTIGHYDINAHACVTGKPISQGGIHGRISATGRGVFHGIENFINEASYMSILGMTPGFGDKTFVVQGFGNVGLHSMRYLHRFGAKCIAVGESDGSIWNPDGIDPKELEDFKLQHGSILGFPKAKPYEGSILEADCDILIPAASEKQLTKSNAPRVKAKIIAEGANGPTTPEADKIFLERNIMVIPDLYLNAGGVTVSYFEWLKNLNHVSYGRLTFKYERDSNYHLLMSVQESLERKFGKHGGTIPIVPTAEFQDRISGASEKDIVHSGLAYTMERSARQIMRTAMKYNLGLDLRTAAYVNAIEKVFKVYNEAGVTFT

SEQ ID NO: 41924 - protein, 586 aa, Homo sapiens
LPGALGVAAAAALWLLLLLLPRTRADEHEHTYQDKEEVVLWMNTVGPYHNRQETYKYFSLPFCVGSKKSISHYHETLGEALQGVELEFSGLDIKFKDDVMPATYCEIDLDKEKRDAFVYAIKNHYWYQMYIDDLPIWGIVGEADENGEDYYLWTYKKLEIGFNGNRIVDVNLTSEGKVKLVPNTKIQMSYSVKWKKSDVKFEDRFDKYLDPSFFQHRIHWFSIFNSFMMVIFLVGLVSMILMRTLRKDYARYSKEEEMDDMDRDLGDEYGWKQVHGDVFRPSSHPLIFSSLIGSGCQIFAVSLIVIIVAMIEDLYTERGSMLSTAIFVYAATSPVNGYFGGSLYARQGGRRWIKQMFIGAFLIPAMVCGTAFFINFIAIYYHASRAIPFGTMVAVCCICFFVILPLNLVGTILGRNLSGQPNFPCRVNAVPRPIPEKKWFMEPAVIVCLGGILPFGSIFIEMYFIFTSFWAYKIYYVYGFMMLVLVILCIVTVCVTIVCTYFLLNAEDYRWQWTSFLSAASTAIYVYMYSFYYYFFKTKMYGLFQTSFYFGYMAVFSTALGIMCGAIGYMGTSAFVRKIYTNVKID

SEQ ID NO: 41925 - protein, 95 aa, Homo sapiens [sequence omitted]

SEQ ID NO: 41926 - protein, 1015 aa, Homo sapiens
LAVFFQGTRGHSLALRLGFWRPSLKPRLRLTKGSRRCRRPSHPGIRVPAEREGEGQRGRGRSRRGAHLELKPSPGLRAGAPTDRGRGGPAEVAAAGGRRMVQKESQATLEERESELSSNPAASAGASLEPPAAPAPGEDNPAGAGGAAVAGAAGGARRFLCGVVEGFYGRPWVMEQRKELFRRLQKWELNTYLYAPKDDYKHRMFWREMYSVEEAEQLMTLISAAREYEIEFIYAISPGLDITFSNPKEVSTLKRKLDQVSQFGCRSFALLFDDIDHNMCAADKEVFSSFAHAQVSITNEIYQYLGEPETFLFCPTEYCGTFCYPNVSQSPYLRTVGEKLLPGIEVLWTGPKVVSKEIPVESIEEVSKIIKRAPVIWDNIHANDYDQKRLFLGPYKGRSTELIPRLKGVLTNPNCEFEANYVAIHTLATWYKSNMNGVRKDVVMTDSEDSTVSIQIKLENEGSDEDIETDVLYSPQMALKLALTEWLQEFGVPHQYSSRQVAHSGAKASVVDGTPLVAAPSLNATTVVTTVYQEPIMSQGAALSGEPTTLTKEEEKKQPDEEPMDMVVEKQEETDHKNDNQILSEIVEAKMAEELKPMDTDKESIAESKSPEMSMQEDCISDIAPMQTDEQTNKEQFVPGPNEKPLYTAEPVTLEDLQLLADLFYLPYEHGPKGAQMLREFQWLRANSSVVSVNCKGKDSEKIEEWRSRAAKFEEMCGLVMGMFTRLSNCANRTILYDMYSYVWDIKSIMSMVKSFVQWLGCRSHSSAQFLIGDQEPWAFRGGLAGEFQRLLPIDGANDLFFQPPPLTPTSKVYTIRPYFPKDEASVYKICREMYDDGVGLPFQSQPDLIGDKLVGGLLSLSLDYCFVLEDEDGICGYALGTVDVTPFIKKCKISWIPFMQEKYTKPNGDKELSEAEKIMLSFHEEQEVLPETFLANFPSLIKMDIHKKVTDPSVAKSMMACLLSSLKANGSRGAFCEVRPDDKRILEFYSKLGCFEIAKMEGFPKDVVILGRSL

SEQ ID NO: 41927 - protein, 463 aa, Homo sapiens
LATLYFALPLLDLLLSAEVSGGDRLDCVKASDQCLKEQSCSTKYRTLRQCVAGKETNFSLASGLEAKDECRSAMEALKQKSLYNCRCKRGMKKEKNCLRIYWSMYQSLQGNDLLEDSPYEPVNSRLSDIFRVVPFISDVFQQVEHIPKGNNCLDAAKACNLDDICKKYRSAYITPCTTSVSNDVCNRRKCHKALRQFFDKVPAKHSYGMLFCSCRDIACTERRRQTIVPVCSYEEREKPNCLNLQDSCKTNYICRSRLADFFTNCQPESRSVSSCLKENYADCLLAYSGLIGTVMTPNYIDSSSLSVAPWCDCSNSGNDLEECLKFLNFFKDNTCLKNAIQAFGNGSDVTVWQPAFPVQTTTATTTTALRVKNKPLGPAGSENEIPTHVLPPCANLQAQKLKSNVSGNTHLCISNGNYEKEGLGASSHITTKSMAAPPSCGLSPLLVLVVTALSTLLSLTETS

SEQ ID NO: 41928 - protein, 194 aa, Homo sapiens
MSQNGAPGMQEESLQGSWVELHFSNNGNGGSVPASVSIYNGDMEKILLDAQHESGRSSSKSSHCDSPPRSQTPQDTNRASETDTHSIGEKNSSQSEEDDIERRKEVESILKKNSDWIWDWSSRPENIPPKEFLFKHPKRTATLSMRNTSVMKKGGIFSAEFLKVFLPSLLLSHLLAIGLGIYIGRRLTTSTSTF

SEQ ID NO: 41929 - protein, 518 aa, Homo sapiens
LAAHGTRGPAAAAAMFPREKTWNISFAGCGFLGVYYVGVASCLREHAPFLVANATHIYGASAGALTATALVTGVCLGEAGAKFIEVSKEARKRFLGPLHPSFNLVKIIRSFLLKVLPADSHEHASGRLGISLTRVSDGENVIISHFNSKDELIQANVCSGFIPVYCGLIPPSLQGVRYVDGGISDNLPLYELKNTITVSPFSGESDICPQDSSTNIHELRVTNTSIQFNLRNLYRLSKALFPPEPLVLREMCKQGYRDGLRFLQRNGLLNRPNPLLALPPARPHGPEDKDQAVESAQAEDYSQLPGEDHILEHLPARLNEALLEACVEPTDLLTTLSNMLPVRLATAMMVPYTLPLESALSFTIRLLEWLPDVPEDIRWMKEQTGSICQYLVMRAKRKLGRHLPSRLPEQVELRRVQSLPSVPLSCAAYREALPGWMRNNLSLGDALAKWEECQRQLLLGLFCTNVAFPPEALRMRAPADPAPAPADPASPQHQLAGPAPLLSTPAPEARPVIGALGL

SEQ ID NO: 41930 - protein, 5 aa, Homo sapiens
MLTET

SEQ ID NO: 41931 - protein, 13 aa, Homo sapiens
VDSQILPKIKAIP

SEQ ID NO: 41932 - protein, 765 aa, Homo sapiens
IQDISGGRINSILVSPSYRVVEVSYILFELIMNSMKTEENKSFSAMEDDQRTRPEVSKDTVMKQTHADTPVDHCLSGIRKCSSTFKLKSEVNKHETALEMQNPNLNNKECCFTFTLNGNSRKLDRSVFTAYGKPSESIYSALSANDYFSERIKNQFNKNIIVYEEKTIDGHINLGMPLKCLPSDSHFKITFGQRKSSKEDGHILRQCENPNMECILFHVVAIGRTRKKIVKINELHEKGSKLCIYALKGETIEGALCKDGRFRSDIGEFEWKLKEGHKKIYGKQSMVDEVSGKVLEMDISKKKALQQKDIHKKIKQNESATDEINHQSLIQSKKKVHKPKKDGETKDVEHSREQILPPQDLSHYIKDKTRQTIPRIRNYYFCSLPRKYRQINSQVRRRPHLGRRYAINLDVQKEAINLLKNYQTLNEAIMHQYPNFKEEAQWVRKYFREEQKRMNLSPAKQFNIYKKDFGKMTANSVSVATCEQLTYYSKSVGFMQWDNNGNTGNATCFVFNGGYIFTCRHVVHLMVGKNTHPSLWPDIISKCAKVTFTYTEFCPTPDNWFSIEPWLKVSNENLDYAILKLKENGNAFPPGLWRQISPQPSTGLIYLIGHPEGQIKKIDGCTVIPLNERLKKYPNDCQDGLVDLYDTTSNVYCMFTQRSFLSEVWNTHTLSYDTCFSDGSSGSPVFNASGKLVALHTFGLFYQRGFNVHALIEFGYSMDSILCDIKKTNESLYKSLNDEKLETYDEEKGKQESSLQDHQIEPMEC

SEQ ID NO: 41933 - protein, 181 aa, Homo sapiens
LTILKKMKQKERELRLLMLGLDNAGKTTILKKFNGEDIDTISPTLGFNIKTLEHRGFKLNIWDVGGQKSLRSYWRNYFESTDGLIWVVDSADRQRMQDCQRELQSLLVEERLAGATLLIFANKQDLPGALSSNAIREVLELDSIRSHHWCIQGCSAVTGENLLPGIDWLLDDISSRIFTAD

SEQ ID NO: 41934 - protein, 40 aa, Homo sapiens
LGLLGFLALLALMSRLGRAAADSDPNLDPLMNPHIRVGPS

SEQ ID NO: 41935 - protein, 556 aa, Homo sapiens
TDSIQRGSGPRCAMEQVNELKEKGNKALSVGNIDDALQCYSEAIKLDPHNHVLYSNRSAAYAKKGDYQKAYEDGCKTVDLKPDWGKGYSRKAAALEFLNRFEEAKRTYEEGLKHEANNPQLKEGLQNMEARLAERKFMNPFNMPNLYQKLESDPRTRTLLSDPTYRELIEQLRNKPSDLGTKLQDPRIMTTLSVLLGVDLGSMDEEEEIATPPPPPPPKKETKPEPMEEDLPENKKQALKEKELGNDAYKKKDFDTALKHYDKAKELDPTNMTYITNQAAVYFEKGDYNKCRELCEKAIEVGRENREDYRQIAKAYARIGNSYFKEEKYKDAIHFYNKSLAEHRTPDVLKKCQQAEKILKEQERLAYINPDLALEEKNKGNECFQKGDYPQAMKHYTEAIKRNPKDAKLYSNRAACYTKLLEFQLALKDCEECIQLEPTFIKGYTRKAAALEAMKDYTKAMDVYQKALDLDSSCKEAADGYQRCMMAQYNRHDSPEDVKRRAMADPEVQQIMSDPAMRLILEQMQKDPQALSEHLKNPVIAQKIQKLMDVGLIAIR

SEQ ID NO: 41936 - protein, 50 aa, Homo sapiens
VETQNVQRLLETEMWAELCPSAKGAIILYNRVQGSPTGAALGSPALLPPL

SEQ ID NO: 41937 - protein, 129 aa, Homo sapiens
LTSVKFLMTSPEIASLSWGQMKVKGSNTTYKDCKVWPGGSRTWDWRETGTEHSPGVQPADVKEVVEKGVQTLVIGRGMSEALKVPSSTVEYLKKHGIDVRVLQTEQAVKEYNALVAQGVRVGGVFHSTC

SEQ ID NO: 41938 - protein, 27 aa, Homo sapiens
ITRETAAFHTRGSPCVVPHPPSAVSMW

SEQ ID NO: 41939 - protein, 204 aa, Homo sapiens
LNGAAVAMFGCLVAGRLVQTAAQQVAEDKFVFDLPDYESINHVVVFMLGTIPFPEGMGGSVYFSYPDSNGMPVWQLLGFVTNGKPSAIFKISGLKSGEGSQHPFGAMNIVRTPSVAQIGISVELLDSMAQQTPVGNAAVSSVDSFTQFTQKMLDNFYNFASSFAVSQAQMTPSPSEMFIPANVVLKWYENFQRRLAQNPLFWKT

SEQ ID NO: 41940 - protein, 10 aa, Homo sapiens
MAGLLTSWSS

SEQ ID NO: 41941 - protein, 527 aa, Homo sapiens
IPSGAGVRARPTTALTMVLLAAAVCTKAGKAIVSRQFVEMTRTRIEGLLAAFPKLMNTGKQHTFVETESVRYVYQPMEKLYMVLITTKNSNILEDLETLRLFSRVIPEYCRALEENEISEHCFDLIFAFDEIVALGYRENVNLAQIRTFTEMDSHEEKVFRAVRETQEREAKAEMRRKAKELQQARRDAERQGKKAPGFGGFGSSAVSGGSTAAMITETIIETDKPKVAPAPARPSGPSKALKLGAKGKEVDNFVDKLKSEGETIMSSSMGKRTSEATKMHAPPINMESVHMKIEEKITLTCGRDGGLQNMELHGMIMLRISDDKYGRIRLHVENEDKKGVQLQTHPNVDKKLFTAESLIGLKNPEKSFPVNSDVGVLKWRLQTTEESFIPLTINCWPSESGNGCDVNIEYELQEDNLELNDVVITIPLPSGVGAPVIGEIDGEYRHDSRRNTLEWCLPVIDAKNKSGSLEFSIAGQPNDFFPVQVSFVSKKNYCNIQVTKVTQVDGNSPVRFSTETTFLVDKYEIL

SEQ ID NO: 41942 - protein, 36 aa, Homo sapiens
LLGMYWAMSLHGTAMATMSPRSLGASSHRSHPSGCS

SEQ ID NO: 41943 - protein, 182 aa, Homo sapiens
LSCLALSVLLLAQLSDAAKNFEDVRCKCICPPYKENSGHIYNKNISQKDCDCLHVVEPMPVRGPDVEAYCLRCECKYEERSSVTIKVTIIIYLSILGLLLLYMVYLTLVEPILKRRLFGHAQLIQSDDDIGDHQPFANAHDVLARSRSRANVLNKVEYAQQRWKLQVQEQRKSVFDRHVVLS

SEQ ID NO: 41944 - protein, 192 aa, Homo sapiens
TMQSIKCVVVGDGAVGKTCLLICYTTNAFPKEYIPTVFDNYSAQSAVDGRTVNLNLWDTAGQEEYDRLRTLSYPQTNVFVICFSIASPPSYENVRHKWHPEVCHHCPDVPILLVGTKKDLRAQPDTLRRLKEQGQAPITPQQGQALAKQIHAVRYLECSALQQDGVKEVFAEAVRAVLNPTPIKRGRSCILL

SEQ ID NO: 41945 - protein, 152 aa, Homo sapiens
IMGRMHAPGKGLSQSALPYRRSVPTWLKLTSDDVKEQIYKLAKKGLTPSQIGVILRDSHGVAQVRFVTGNKILRILKSKGLAPDLPEDLYHLIKKAVAVRKHLERNRKDKDAKFRLILIESRIHRLARYYKTKRVLPPNWKYESSTASALVA

SEQ ID NO: 41946 - protein, 279 aa, Homo sapiens [sequence omitted]

SEQ ID NO: 41947 - protein, 19 aa, Homo sapiens
KRGFAFVTFDDHDKIVVQK

SEQ ID NO: 41948 - protein, 164 aa, Homo sapiens
TNLITHYNLEQAYNKFCGKKVKEKLSNFLPDLPGMIDLPGSHDNSSLRSLIEKPPILSSSFNPITGTMLAGFRLHTGPLPEQCRLMHIQPPKKKNKHKHKQSRTQDPVPPETPSDSDHKKKKKKKEEDPERKRKKKEKKKKKNRHSPDHPGMGSSQASSSSSLR

SEQ ID NO: 41949 - protein, 466 aa, Homo sapiens
RRGRGSSARARFLLRFCRARLSGTGLAMDPLSELQDDLTLDDTSEALNQLKLASIDEKNWPSDEMPDFPKSDDSKSSSPELVTHLKWDDPYYDIARHQIVEVAGDDKYGRKIIVFSACRMPPSHQLDHSKLLGYLKHTLDQYVESDYTLLYLHHGLTSDNKPSLSWLRDAYREFDRKYKKNIKALYIVHPTMFIKTLLILFKPLISFKFGQKIFYVNYLSELSEHVKLEQLGIPRQVLKYDDFLKSTQKSPATAPKPMPPRPPLPNQQFGVSLQHLQEKNPEQEPIPIVLRETVAYLQAHALTTEGIFRRSANTQVVREVQQKYNMGLPVDFDQYNELHLPAVILKTFLRELPEPLLTFDLYPHVVGFLNIDESQRVPATLQVLQTLPEENYQVLRFLTAFLVQISAHSDQNKMTNTNLAVVFGPNLLWAKDAAITLKAINPINTFTKFLLDHQGELFPSPDPSGL

SEQ ID NO: 41950 - protein, 45 aa, Homo sapiens
KVERGITERRTPYFRKGVPYLRAPGSRMRDHLIHERMMFHLRIDE

SEQ ID NO: 41951 - protein, 270 aa, Homo sapiens
VQETAGVAGGAPRRRTPVTMWRLLARASAPLLRVPLSDSWALLPASAGVKTLLPVPSFEDVSIPEKPKLRFIERAPLVPKVRREPKNLSDIRGPSTEATEFTEGNFAILALGGGYLHWGHFEMMRLTINRSMDPKNMFAIWRVPAPFKPITRKSVGHRMGGGKGAIDHYVTPVKAGRLVVEMGGRCEFEEVQGFLDQVAHKLPFAAKAVSRGTLEKMRKDQEERERNNQNPWTFERIATANMLGIRKVLSPYDLTHKGKYWGKFYMPKRV

SEQ ID NO: 41952 - protein, 13 aa, Homo sapiens
IYRSRLPHYFPVA

SEQ ID NO: 41953 - protein, 822 aa, Homo sapiens
LGSVSRKGEGRRRRSKHCAAGPCAASAPACVRSLARAQCWRVRRRRAAAAAPARSDSVDGSQGRRRREAEEAAAAMEVKRLKVTELRSELQRRGLDSRGLKVDLAQRLQEALDAEMLEDEAGGGGAGPGGACKAEPRPVAASGGGPGGDEEEDEEEEEEDEEALLEDEDEEPPPAQALGQAAQPPPEPPEAAAMEAAAEPDASEKPAEATAGSGGVNGGEEQGLGKREEDEPEERSGDETPGSEVPGDKAAEEQGDDQDSEKSKPAGSDGERRGVKRQRDEKDEHGRAYYEFREEAYHSRSKSPLPPEEEAKDEEEDQTLVNLDTYTSDLHFQVSKDRYGGQPLFSEKFPTLWSGARSTYGVTKGKVCFEAKVTQNLPMKEGCTEVSLLRVGWSVDFSRPQLGEDEFSYGFDGRGLKAENGQFEEFGQTFGENDVIGCFANFETEEVELSFSKNGEDLGVAFWISKDSLADRALLPHVLCKNCVVELNFGQKEEPFFPPPEEFVFIHAVPVEERVRTAVPPKTIEECEVILMVGLPGSGKTQWALKYAKENPEKRYNVLGAETVLNQMRMKGLEEPEMDPKSRDLLVQQASQCLSKLVQIASRTKRNFILDQCNVYNSGQRRKLLLFKTFSRKVVVVVPNEEDWKKRLELRKEVEGDDVPESIMLEMKANFSLPEKCDYMDEVTYGELEKEEAQPIVTKYKEEARKLLPPSEKRTNRRNNRNKRNRQNRSRGQGYVGGQRRGYDNRAYGQQYWGQPGNRGGYRNFYDRYRGDYDRFYGRDYEYNRYRDYYRQYNRDWQSYYYHHPQDRDRYYRNYYGYQGYR

SEQ ID NO: 41954 - protein, 258 aa, Homo sapiens
IAASAAAAAVFACSCSPDPQSSTMNPVYSPVQPGAPYGNPKNMAYTGYPTAYPAAAPAYNPSLYPTNSPSYAPATLLMKQAWPQNSSSCGTEGTFHLPVDTGTENRTYQASSAAFRYTAGTPYKVPPTQSNTAPPPYSPSPNPYQTAMYPIRSAYPQQNLYAQGAYYTQPVYAAQPHVIHHTTVVQPNSIPSAIYPAPVAAPRTNGVAMGMVAGTTMAMSAGTLLTTPQHTAIGAHPVSMPTYRAQGTPAYSYVPPHW

SEQ ID NO: 41955 - protein, 90 aa, Homo sapiens
IPRMSTSVPQGHTWTQRVKKDDEEEDPLDQLISRSGCAASHFAVQECMAQHQDWRQCQPQVQAFKDCMSEQQARRQEELQRRQEQAGAHH

SEQ ID NO: 41956 - protein, 353 aa, Homo sapiens
IKTALKLKMKQLKRKRKSNFSVQETQTLLKEITKRKEVIFSKQLNTTINVMKRMAWEEIAQCVNAVGEGEQRTGTEVKRRYLDWRALMKRKRMKANIKLVGSGFPLPSSDLDDSLTEEIDEKIGFRNDANFDWQNVADFRDAGGSLTEVKVEEEERDPQSPEFEIEEEEEMLSSVIPDSRRENELPDFPHIDEFFTLNSTPSRSAYDEPHLLVNIEKQKLELEKRRLDIEAERLQVEKERLQIEKERLRHLDMEHERLQLEKERLQIEREKLRLQIVNSEKPSLENELGQGEKSMLQPQDIETEKLKLERERLQLEKDRLQFLKFESEKLQIEKERLQVEKDRLRIQKEGHLQ

SEQ ID NO: 41957 - protein, 5 aa, Homo sapiens
MLMAD

SEQ ID NO: 41958 - protein, 4 aa, Homo sapiens
MDLT

SEQ ID NO: 41959 - protein, 4 aa, Homo sapiens
MMSV

SEQ ID NO: 41960 - protein, 88 aa, Homo sapiens
MENLVELHNKAPVWNSDTQSYVLNFRGRVTQASVKNFQIVHKNDPDYIVMQFGRVADDVFTLDYNYPLCAVQAFGIGLSSFDSKLACE

SEQ ID NO: 41961 - protein, 19 aa, Homo sapiens
ILRMILIFVRVRIMTKTSL

SEQ ID NO: 41962 - protein, 32 aa, Homo sapiens
MVLGAVLSLALASQIGEMPSTLMSPCRITSSG

SEQ ID NO: 41963 - protein, 2183 aa, Homo sapiens
LSVLSEASSGSARTRPAAVPCRPLRGRLGPSRPFRSRIRARSPLSSEPTMSGGAAEKQSSTPGSLFLSPPAPAPKNGSSSDSSVGEKLGAAAADAVTGRTEEYRRRRHTMDKDSRGAAATTTTTEHRFFRRSVICDSNATALELPGLPLSLPQPSIPAAVPQSAPPEPHREETVTATATSQVAQQPPAAAAPGEQAVAGPAPSTVPSSTSKDRPVSQPSLVGSKEEPPPARSGSGGGSAKEPQEERSQQQDDIEELETKAVGMSNDGRFLKFDIEIGRGSFKTVYKGLDTETTVEVAWCELQDRKLTKSERQRFKEEAEMLKGLQHPNIVRFYDSWESTVKGKKCIVLVTELMTSGTLKTYLKRFKVMKIKVLRSWCRQILKGLQFLHTRTPPIIHRDLKCDNIFITGPTGSVKIGDLGLATLKRASFAKSVIGTPEFMAPEMYEEKYDESVDVYAFGMCMLEMATSEYPYSECQNAAQIYRRVTSGVKPASFDKVAIPEVKEIIEGCIRQNKDERYSIKDLLNHAFFQEETGVRVELAEEDDGEKIAIKLWLRIEDIKKLKGKYKDNEAIEFSFDLERDVPEDVAQEMVESGYVCEGDHKTMAKAIKDRVSLIKRKREQRQLVREEQEKKKQEESSLKQQVEQSSASQTGIKQLPSASTGIPTASTTSASVSTQVEPEEPEADQHQQLQYQQPSISVLSDGTVDSGQGSSVFTESRVSSQQTVSYGSQHEQAHSTGTVPGHIPSTVQAQSQPHGVYPPSSVAQGQSQGQPSSSSLTGVSSSQPIQHPQQQGIQQTAPPQQTVQYSLSQTSTSSEATTAQPVSQPQAPQVLPQVSAGKQSTQGVSQVAPAEPVAVAQTQATQPTTLASSVDSAHSDVASGMSDGNENVPSSSGRHEGRTTKRHYRKSVRSRSRHEKTSRPKLRILNVSNKGDRVVECQLETHNRKMVTFKFDLDGDNPEEIATIMVNNDFILAIERESFVDQVREIIEKADEMLSEDVSVEPEGDQGLESLQGKDDYGFSGSQKLEGEFKQPIPASSMPQQIGIPTSSLTQVVHSAGRRFIVSPVPESRLRESKVFPSEITDTVAASTAQSPGMNLSHSASSLSLQQAFSELRRAQMTEGPNTAPPNFSHTGPTFPVVPPFLSSIAGVPTTAAATAPVPATSSPPNDISTSVIQSEVTVPTEEGIAGVATSTGVVTSGGLPIPPVSESPVLSSVVSSITIPAVVSISTTSPSLQVPTSTSEIVVSSTALYPSVTVSATSASAGGSTATPGPKPPAVVSQQAAGSTTVGATLTSVSTTTSFPSTASQLCIQLSSSTSTPTLAETVVVSAHSLDKTSHSSTTGLAFSLSAPSSSSSPGAGVSSYISQPGGLHPLVIPSVIASTPILPQAAGPTSTPLLPQVPSIPPLVQPVANVPAVQQTLIHSQPQPALLPNQPHTHCPEVDSDTQPKAPGIDDIKTLEEKLRSLFSEHSSSGAQHASVSLETSLVIESTVTPGIPTTAVAPSKLLTSTTSTCLPPTNLPLGTVALPVTPVVTPGQVSTPVSTTTSGVKPGTAPSKPPLTKAPVLPVGTELPAGTLPSEQLPPFPGPSLTQSQQPLEDLDAQLRRTLSPEMITVTSAVGPVSMAAPTAITEAGTQPQKVSQVKEGPVLATSSGAGVFKMGRFQVSVAADGAQKEGKNKSEDAKSVHFESSTSESSVLSSSSPESTLVKPEPNGITIPGISSDVPESAHKTTASEAKSDTGQPTKVGRFQVTTTANKVGRFSVSKTEDKITDTKKEGPVASPPFMDLEQAVLPAVIPKKEKPELSEPSHLNGPSSDPEAAFLSRDVDDGSGSPHSPHQLSSKSLPSQNLSQSLSNSFNSSYMSSDNESDIEDEDLKLELRRLRDKHLKEIQDLQSRQKHEIESLYTKLGKVPPAVIIPPAAPLSGRRRRPTKSKGSKSSRSSSLGNKSPQLSGNLSGQSAASVLHPQQTLHPPGNIPESGQNQLLQPLKPSPSSDNLYSAFTSDGAISVPSLSAPGQGTSSTNTVGATVNSQAAQAQPPAMTSSRKGTFTDDLHKLVDNWARDAMNLSGRRGSKGHMNYEGPGMARKFSAPGQLCISMTSNLGGSAPISAASATSLGHFTKSMCPPQQYGFPATPFGAQWSGTGGPAPQPLGQFQPVGTASLQNFNISNLQKSISNPPGSNLRTT

SEQ ID NO: 41964 - protein, 50 aa, Homo sapiens
LFAALMSFLTGQLFQKSVDAAPTQQEDSWTSLEHILWPFTRLRHNGPPPV

SEQ ID NO: 41965 - protein, 66 aa, Homo sapiens [sequence omitted]

SEQ ID NO: 41966 - protein, 28 aa, Homo sapiens
MTPVAYHGHGVSAFRCCSPLLLQAKARR

SEQ ID NO: 41967 - protein, 18 aa, Homo sapiens
LVTWTVELVSCGSAPCGG

SEQ ID NO: 41968 - protein, 226 aa, Homo sapiens
LVWVTGCRMNCRSEVLEVSVEGRQVEEAMLAVLHTVLLHRSTGKFHYKKEGTYSIGTVGTQDVDCDFIDFTYVRVSSEELDRALRKVVGEFKDALRNSGGDGLGQMSLEFYQKKKSRWPFSDECIPWEVWTVKVHVVALATEQERQICREKVGEKLCEKIINIVEVMNRHEYLPKMPTQSEVDNVFDTGLRDVQPYLYKISFQITDALGTSVTTTMRRLIKDTLAL

SEQ ID NO: 41969 - protein, 18 aa, Homo sapiens
TIGLSRGRHVAFRGAGSI

SEQ ID NO: 41970 - protein, 34 aa, Homo sapiens
MQVLPFVCLWRLQGPMSIWSLISFRLACCLPWAP

SEQ ID NO: 41971 - protein, 217 aa, Homo sapiens
LAMTSRSTARPNGQPQASKICQFKLVLLGESAVGKSSLVLRFVKGQFHEYQESTIGAAFLTQSVCLDDTTVKFEIWDTAGQERYHSLAPMYYRGAQAAIVVYDITNQETFARAKTWVKELQRQASPSIVIALAGNKADLANKRMVEYEEAQAYADDNSLLFMETSAKTAMNVNDLFLAIAKKLPKSEPQNLGGAAGRSRGVDLHEQSQQNKSQCCSN

SEQ ID NO: 41972 - protein, 629 aa, Homo sapiens [sequence omitted]

SEQ ID NO: 41973 - protein, 687 aa, Homo sapiens
ISFLRPVDVQMREFEVLKKLNHKNIVKLFAIEEETTTRHKVLIMEFCPCGSLYTVLEEPSNAYGLPESEFLIVLRDVVGGMNHLRENGIVHRDIKPGNIMRVIGEDGQSVYKLTDFGAARELEDDEQFVSLYGTEEYLHPDMYERAVLRKDHQKKYGATVDLWSIGVTFYHAATGSLPFRPFEGPRRNKEVMYKIITGKPSGAISGVQKAENGPIDWSGDMPVSCSLSRGLQVLLTPVLANILEADQEKCWGFDQFFAETSDILHRMVIHVFSLQQMTAHKIYIHSYNTATIFHELVYKQTKIISSNQELIYEGRRLVLEPGRLAQHFPKTTEENPIFVVSREPLNTIGLIYEKISLPKVHPRYDLDGDASMAKAITGVVCYACRIASTLLLYQELMRKGIRWLIELIKDDYNETVHKKTEVVITLDFCIRNIEKTVKVYEKLMKINLEAAELGEISDIHTKLLRLSSSQGTIETSLQDIDSRLSPGGSLADAWAHQEGTHPKDRNVEKLQVLLNCMTEIYYQFKKDKAERRLAYNEEQIHKFDKQKLYYHATKAMTHFTDECVKKYEAFLNKSEEWIRKMLHLRKQLLSLTNQCFDIEEEVSKYQEYTNELQETLPQKMFTASSGIKHTMTPIYPSSNTLVEMTLGMKKLKEEMEGVVKELAENNHILERFGSLTMDGGLRNVDCL

SEQ ID NO: 41974 - protein, 17 aa, Homo sapiens
LYAPPPMSSFSREQRRR

SEQ ID NO: 41975 - protein, 44 aa, Homo sapiens
LLVGLIMKRLGSVQRKMPCVFVTEVKEEPSSKREHQISHTFGLD

SEQ ID NO: 41976 - protein, 204 aa, Homo sapiens
VVLLGEGCVGKTSLVLRYCENKFNDKHITTLQASFLTKKLNIGGKRVNLAIWDTAGQERFHALGPIYYRDSNGAILVYDITDEDSFQKVKNWVKELRKMLGNEICLCIVGNKIDLEKERHVSIQEAESYAESVGAKHYHTSAKQNKGIEELFLDLCKRMIETAQVDERAKGNGSSQPGTARRGVQIIDDEPQAQTSGGGCCSSG

SEQ ID NO: 41977 - protein, 178 aa, Homo sapiens
KMEALILEPSLYTVKAILILDNDGDRLFAKYYDDTYPSVKEQKAFEKNIFNKTHRTDSEIALLEGLTVVYKSSIDLYFYVIGSSYENELMLMAVLNCLFDSLSQMLRKNVEKRALLENMEGLFLAVDEIVDGGVILESDPQQVVHRVALRGEDVPLTEQTVSQVLQSAKEQIKWSLLR

SEQ ID NO: 41978 - protein, 553 aa, Homo sapiens
LIASGTVRKGHDSMVRTDGHTLSEKRNYQVTNSMFGASRKKFVEGVDSDYHDENMYYSQSSMFPHRSEKDMLASPSTSGQLSQFGASLYGQQSALGLPMRGMSNNTPQLNRSLSQGTQLPSHVTPTTGVPTMSLHTPPSPSRGILPMNPRNMMNHSQVGQGIGIPSRTNSMSSSGLGSPNRSSPSIICMPKQQPSRQPFTVNSMSGFGMNRNQAFGMNNSLSSNIFNGTDGSENVTGLDLSDFPALADRNRREGSGNPTPLINPLAGRAPYVGMVTKPANEQSQDFSIHNEDFPALPGSSYKDPTSSNDDSKSNLNTSGKTTSSTDGPKFPGDKSSTTQNNNQQKKGIQVLPDGRVTNIPQGMVTDQFGMIGLLTFIRAAETDPGMVHLALGSDLTTLGLNLNSPENLYPKFASPWASSPCRPQDIDFHVPSEYLTNIHIRDKLAAIKLGRYGEDLLFYLYYMNGGDVLQLLAAVELFNRDWRYHKEERVWITRAPGMEPTMKTNTYERGTYYFFDCLNWRKVAKEFHLEYDKLEERPHLPSTFNYNPAQQAF

SEQ ID NO: 41979 - protein, 134 aa, Homo sapiens
VSALRGSPGISIQHQQEIMNQTDKNQQEIPSYLNDEPPEGSMKDHPQQQPGMLSRVTGGIFSVTKGAVGATIGGVAWIGGKSLEVTKTAVTTVPSMGIGLVKGGVSAVAGGVTAVGSAVVNKVPLTGKKKDKSD

SEQ ID NO: 41980 - protein, 23 aa, Homo sapiens
LFDHNKGRILTQVNRLPALSTSL

SEQ ID NO: 41981 - protein, 515 aa, Homo sapiens
MKREKGVLVALPKSKWMNVDHPIHLGDEQHSQYSKLLLASKEQVLHRVVLEEKVALEQQLAEEKHTPESCFIEAAIQELKTREEALSGLAGSRREVTGVVAALEQLVLMAPLAKESVFQPRKGVLEYLSAFDEETTEVCSLDTPSRPLALPLVEEEEAVSEPEPEGLPEACDDLELADDNLKEGTICTESSQQEPITKSGFTRLSSSPCYYFYQAEDGQHMFLHPVNVRCLVREYGSLERSPEKISATVVEIAGYSMSEDVRQRHRYLSHLPLTCEFSICELALQPPVVSKETLEMFSDDIEKRKRQRQKKAREERRRERRIEIEENKKQGKYPEVHIPLENLQQFPAFNSYTCSSDSALGPTSTEGHGALSISPLSRSPGSHADFLLTPLSPTASQGSPSFCVGSLEEDSPFPSFAQMLRVGKAKADVWPKTAPKKDENSLVPPAPVDSDGESDNSDRVPVPSFQNSFSQAIEAAFMKLDTPATSDPLSEEKGGKKRKKQKQKLLFSTSVVHTK

SEQ ID NO: 41982 - protein, 286 aa, Homo sapiens
LATPVSHDTMFPFYSCWRTGLLLLLLAVAVRESWQTEEKTCDLVGEKGKESEKELALVKRLKPLFNKSFESTVGQGSDTYIYIFRVCREAGNHTSGAGLVQINKSNGKETVVGRLNETHIFNGSNWIMLIYKGGDEYDNHCGKEQRRAVVMISCNRHTLADNFNPVSEERGKVQDCFYLFEMDSSLACSPEISHLSVGSILLVTFASLVAVYVVGGFLYQRLVVGAKGMEQFPHLAFWQDLGNLVADGCDFVCRSKPRNVPAAYRGVGDDQLGEESEERDDHLLPM

SEQ ID NO: 41983 - protein, 34 aa, Homo sapiens
TFRAATLTLQRTGKRNRPDGPLSPNRALCGAPWS

SEQ ID NO: 41984 - protein, 26 aa, Homo sapiens
MTSLQGAGGHVGCVFGGLPGYKNGCG

SEQ ID NO: 41985 - protein, 409 aa, Homo sapiens
IRPGLPESEPRPPRPPAALTADQPPPRRLSESRGGGGMSEAGEATTTTTTTLPQAPTEAAAAAPQDPAPKSPVGSGAPQAAAPAPAAHVAGNPGGDAAPAATGTAAAASLATAAGSEDAEKKVLATKVLGTVKWFNVRNGYGFINRNDTKEDVFVHQTAIKKNNPRKYLRSVGDGETVEFDVVEGEKGAEAANVTGPDGVPVEGSRYAADRRRYRRGYYGRRRGPPRNYAGEEEEEGSGSSEGFDPPATDRQFSGARNQLRRPQYRPQYRQRRFPPYHVGQTFDRRSRVLPHPNRIQAGEIGEMKDGVPEGAQLQGPVHRNPTYRPRYRSRGPPRPRPAPAVGEAEDKENQQATSGPNQPSVRRGYRRPYNYRRRPRPPNAPSQDGKEAKAGEAPTENPAPPTQQSSAE

SEQ ID NO: 41986 - protein, 32 aa, Homo sapiens
IIFPACCWIWGNFLFVFYDLYLTERNPLKTSA

SEQ ID NO: 41987 - protein, 46 aa, Homo sapiens [sequence omitted]

SEQ ID NO: 41988 - protein, 42 aa, Homo sapiens
MYVCALSYFSFWWWWWKGGGASRASLELAGQSYRPMGPGSAR

SEQ ID NO: 41989 - protein, 5 aa, Homo sapiens
MLDPN

SEQ ID NO: 41990 - protein, 45 aa, Homo sapiens
MLASQVPPLSSLRIRRKQTPLLSRICSSVSSTSSTRSQGPACSQR

SEQ ID NO: 41991 - protein, 183 aa, Homo sapiens
IEQWLWSIFLGMGTLLWGQLISTIPTSRLKFLKEAGHGTQKEEIPEEELAEDVEEIDHAERELRRGQILWFRGLNRIQTQIRVVNAFRSSLYEGLEKPESRSSIHNFMTHPEFRIEDSEPHIPLIDDTDAEDDAPTKRNSSPPPSPNKNNNAVDSGIHLTIEMNKSATSSSPGSPLHSLETSL

SEQ ID NO: 41992 - protein, 28 aa, Homo sapiens
LSHCLRSSGRLAPHTSRRYLEFLQHGRH

SEQ ID NO: 41993 - protein, 397 aa, Homo sapiens
IWSSYNMADIDNKEQSELDQDLDDVEEVEEEETGEETKLKARQLTVQMMQNPQILAALQERLDGLVETPTGYIESLPRVVKRRVNALKNLQVKCAQIEAKFYEEVHDLERKYAVLYQPLFDKRFEIINAIYEPTEEECEWKPDEEDEISEELKEKAKIEDEKKDEEKEDPKGIPEFWLTVFKNVDLLSDMVQEHDEPILKHLKDIKVKFSDAGQPMSFVLEFHFEPNEYFTNEVLTKTYRMRSEPDDSDPFSFDGPEIMGCTGCQIDWKKGKNVTLKTIKKKQKHKGRGTVRTVTKTVSNDSFFNFFAPPEVPESGDLDDDAEAILAADFEIGHFLRERIIPRSVLYFTGEAIEDDDDDYDEEGEEADEEGEEEGDEENDPDYDPKKDQNPAECKQQ

SEQ ID NO: 41994 - protein, 62 aa, Homo sapiens
LPTMPAGVPMSTYLKMFAASLLAMCAGAEVVHRYYRPDLQNWITSLSVGELEGLGRVEQRRP

SEQ ID NO: 41995 - protein, 84 aa, Homo sapiens
MKGWGWLALLLGALLGTAWARRSQDLHCGACRALVDELEWEIAQVDPKKTIQMGSFRINPDGSQSVVEVTVTVPPNKVAHSGFG

SEQ ID NO: 41996 - protein, 79 aa, Homo sapiens
MTPASNTQSPQNSFPAAQQTVFTIHPSHVQPAYTNPPHMAHVPQYKPTTNSSCKAALEEPKGQIPSSLLLLLPTGSTEN

SEQ ID NO: 41997 - protein, 224 aa, Homo sapiens
ILVPRSLHKMPGEATETVPATEQELPQPQAETGSGTESDSDESVPELEEQDSTQATTQQAQLAAAAEIDEEPVSKAKQSRSEKKARKAMSKLGLRQVTGVTRVTIRKSKNILFVITKPDVYKSPASDTYIVFGEAKIEDLSQQAQLAAAEKFKVQGEAVSNIQENTQTPTVQEESEEEEVDETGVEVKDIELVMSQANVSRAKAVRALKNNSNDIVNAIMELTM

SEQ ID NO: 41998 - protein, 17 aa, Homo sapiens
IVMCGTQITLFLSAVPF

SEQ ID NO: 41999 - protein, 12 aa, Homo sapiens
MKVLIAWGVLIT

SEQ ID NO: 42000 - protein, 223 aa, Homo sapiens
KGAADREASTDPARPRAPPPPAMARDYDHLFKLLIIGDSGVGKSSLLLRFADNTFSGSYITTIGVDFKIRTVEINGEKVKLQIWDTAGQERFRTITSTYYRGTHGVIVVYDVTSAESFVNVKRWLHEINQNCDDVCRILVGNKNDDPERKVVETEDAYKFAGQMGIQLFETSAKENVNVEEMFNCITELVLRAKKDNLAKQQQQQQNDVVKLTKNSKRKKRCC

SEQ ID NO: 42001 - protein, 328 aa, Homo sapiens
KMAAPGSCALWSYCGRGWSRAMRGCQLLGLRSSWPGDLLSARLLSQEKRAAETHFGFETVSEEEKGGKVYQVFESVAKKYDVMNDMMSLGIHRVWKDLLLWKMHPLPGTQLLDVAGGTGDIAFRFLNYVQSQHQRKQKRQLRAQQNLSWEEIAKEYQNEEDSLGGSRVVVCDINKEMLKVGKQKALAQGYRAGLAWVLGDAEELPFDDDKFDIYTIAFGIRNVTHIDQALQEAHRVLKPGGRFLCLEFSQVNNPLISRLYDLYSFQVIPVLGEVIAGDWKSYQYLVESIRRFPSQEEFKDMIEDAGFHKVTYESLTSGIVAIHSGFKL

SEQ ID NO: 42002 - protein, 128 aa, Homo sapiens
LAPPRPARPPPGGMSYKPNLAAHMPAAALNAAGSVHSPSTSMATSSQYRQLLSDYGPPSLGYTQGTGNSQVPQSKYAELLAIIEELGKEIRPTYAGSKSAMERLKRGIIHARGLVRECLAETERNARS

SEQ ID NO: 42003 - protein, 9 aa, Homo sapiens
LWIAVIVTW

SEQ ID NO: 42004 - protein, 20 aa, Homo sapiens
VLSLTFVYVVMKHSTVLCEV

SEQ ID NO: 42005 - protein, 65 aa, Homo sapiens
IKHSKSRDSFLKRVKENDQKKKEAKEKGTWVQLKRQPAPPREAHFVRTNGKEPELLEPIPYEFMA

SEQ ID NO: 42006 - protein, 53 aa, Homo sapiens
IKDMENTLQLVRNIIPPLSSTKHKGQDGRIGVVGGCQEYTGAPYFAAISALKV

SEQ ID NO: 42007 - protein, 503 aa, Homo sapiens
VAPGSVTSRLGSVFPFLLVLVDLQYEGAECGVNADVEKHLELGKKLLAAGQLADALSQFHAAVDGDPDNYIAYYRRATVFLAMGKSKAALPDLTKVIQLKMDFTAARLQRGHLLLKQGKLDEAEDDFKKVLKSNPSENEEKEAQSQLIKSDEMQRLRSQALNAFGSGDYTAAIAFLDKILEVCVWDAELRELRAECFIKEGEPRKAISDLKAASKLKNDNTEAFYKISTLYYQLGDHELSLSEVRECLKLDQDHKRCFAHYKQVKKLNKLIESAEELIRDGRYTDATSKYESVMKTEPSIAEYTVRSKERICHCFSKDEKPVEAIRVCSEVLQMEPDNVNALKDRAEAYLIEEMYDEAIQDYETAQEHNENDQQIREGLEKAQRLLKQSQKRDYYKILGVKRNAKKQEIIKAYRKLALQWHPDNFQNEEEKKKAEKKFIDIAAAKEVLSDPEMRKKFDDGEDPLDAESQQGGGGNPFHRSWNSWQGFNPFSSGGPFRFKFHFN

SEQ ID NO: 42008 - protein, 1083 aa, Homo sapiens
LGNLLSPDNVVRKQAEETYENIPGQSKITFLLQAIRNTTAAEEARQMAAVLLRRLLSSAFDEVYPALPSDVQTAIKSELLMIIQMETQSSMRKKVCDIAAELARNLIDEDGNNQWPEGLKFLFDSVSSQNVGLREAALHIFWNFPGIFGNQQQHYLDVIKRMLVQCMQDQEHPSIRTLSARATAAFILANEHNVALFKHFADLLPGFLQAVNDSCYQNDDSVLKSLVEIADTVPKYLRPHLEATLQLSLKLCGDTSLNNMQRQLALEVIVTLSETAAAMLRKHTNIVAQTIPQMLAMMVDLEEDEDWANADELEDDDFDSNAVAGESALDRMACGLGGKLVLPMIKEHIMQMLQNPDWKYRHAGLMALSAIGEGCHQQMEGILNEIVNFVLLFLQDPHPRVRYAACNAVGQMATDFAPGFQKKFHEKVIAALLQTMEDQGNQRVQAHAAAALINFTEDCPKSLLIPYLDNLVKHLHSIMVLKLQELIQKGTKLVLEQVVTSIASVADTAEEKFVPYYDLFMPSLKHIVENAVQKELRLLRGKTIECISLIGLAVGKEKFMQDASDVMQLLLKTQTDFNDMEDDDPQISYMISAWARMCKILGKEFQQYLPVVMGPLMKTASIKPEVALLDTQDMENMSDDDGWEFVNLGDQQSFGIKTAGLEEKSTACQMLVCYAKELKEGFVEYTEQVVKLMVPLLKFYFHDGVRVAAAESMPLLLECARVRGPEYLTQMWHFMCDALIKAIGTEPDSDVLSEIMHSFAKCIEVMGDGCLNNEHFEELGGILKAKLEEHFKNQELRQVKRQDEDYDEQVEESLQDEDDNDVYILTKVSDILHSIFSSYKEKVLPWFEQLLPLIVNLICPHRPWPDRQWGLCIFDDVIEHCSPASFKYAEYFLRPMLQYVCDNSPEVRQAAAYGLGVMAQYGGDNYRPFCTEALPLLVRVIQSADSKTKENVNATENCISAVGKIMKFKPDCVNVEEVLPHWLSWLPLHEDKEEAVQTFNYLCDLIESNHPIVLGPNNTNLPKIFSIIAEGEMHEAIKHEDPCAKRLANVVRQVQTSGGLWTECIAQLSPEQQAAIQELLNSA

SEQ ID NO: 42009 - protein, 406 aa, Homo sapiens
LLLLLLLLLGLMHCASAAMFMVKNGNGTACIMANFSAAFSVNYDTKSGPKNMTFDLPSDATVVLNRSSCGKENTSDPSLVIAFGRGHTLTLNFTRNATRYSVQLMSFVYNLSDTHLFPNASSKEIKTVESITDIRADIDKKYRCVSGTQVHMNNVTVTLHDATIQAYLSNSSFSRGETRCEQDRPSPTTAPPAPPSPSPSPVPKSPSVDKYNVSGTNGTCLLASMGLQLNLTYERKDNTTVTRLLNINPNKTSASGSCGAHLVTLELHSEGTTVLLFQFGMNASSSRFFLQGIQLNTILPDARDPAFKAANGSLRALQATVGNSYKCNAEEHVRVTKAFSVNIFKVWVQAFKVEGGQFGSVEECLLDENSMLIPIAVGGALAGLVLIVLIAYLVGRKRSHAGYQTI

SEQ ID NO: 42010 - protein, 44 aa, Homo sapiens
LVNCLLIALRWLVIGWDAPSITCFLMGSSQKRHKQLKDGYHGIC

SEQ ID NO: 42011 - protein, 633 aa, Homo sapiens
LNSNMGCKVLLNIGQQMLRRKVVDCSREETRLSRCLNTFDLVALGVGSTLGAGVYVLAGAVARENAGPAIVISFLIAALASVLAGLCYGEFGARVPKTGSAYLYSYVTVGELWAFITGWNLILSYIIGTSSVARAWSATFDELIGRPIGEFSRTHMTLNAPGVLAENPDIFAVIIILILTGLLTLGVKESAMVNKIFTCINVLVLGFIMVSGFVKGSVKNWQLTEEDFGNTSGRLCLNNDTKEGKPGVGGFMPFGFSGVLSGAATCFYAFVGFDCIATTGEEVKNPQKAIPVGIVASLLICFIAYFGVSAALTLMMPYFCLDNNSPLPDAFKHVGWEGAKYAVAVGSLCALSASLLGSMFPMPRVIYAMAEDGLLFKFLANVNDRTKTPIIATLASGAVAAVMAFLFDLKDLVDLMSIGTLLAYSLVAACVLVLRYQPEQPNLVYQMASTSDELDPADQNELASTNDSQLGFLPEAEMFSLKTILSPKNMEPSKISGLIVNISTSLIAVLIITFCIVTVLGREALTKGALWAVFLLAGSALLCAVVTGVIWRQPESKTKLSFKVPFLPVLPILSIFVNVYLMMQLDQGTWVRFAVWMLIGFIIYFGYGLWHSEEASLDADQARTPDGNLDQCK

SEQ ID NO: 42012 - protein, 162 aa, Homo sapiens
RLLVFPLFFHEGVFGCNCMKSQWCRPVAMDLGVYQLRHFSISFLSSLLGTENASVRLDNSSSGASVVAIDNKIEQAMDLVKSHLMYAVREEVEVLKEQIKELIEKNSQLEQENNLLKTLASPEQLAQFQAQLQTGSPPATTQPQGTTQPPAQPASQGSGPTA

SEQ ID NO: 42013 - protein, 71 aa, Homo sapiens
KRPLLSSAILTFLTYLMKMSFERCTARNKMFVNSPFTKVDNYCTFLMEKVLFKVLFLIEYYQKGKKNDLNF

SEQ ID NO: 42014 - protein, 46 aa, Homo sapiens
IDYSDSAMLQAQQLLLGLGSFLEDARAYMKGQLACGSVREAMLWER

SEQ ID NO: 42015 - protein, 505 aa, Homo sapiens
KMVLADLGRKITSALRSLSNATIINEEVLNAMLKEVCTALLEADVNIKLVKQLRENVKSAIDLEEMASGLNKRKMIQHAVFKELVKLVDPGVKAWTPTKGKQNVIMFVGLQGSGKTTTCSKLAYYYQRKGWKTCLICADTFRAGAFDQLKQNATKARIPFYGSYTEMDPVIIASEGVEKFKNENFEIIIVDTSGRHKQEDSLFEEMLQVANAIQPDNIVYVMDASIGQACEAQAKAFKDKVDVASVIVTKLDGHAKGGGALSAVAATKSPIIFIGTGEHIDDFEPFKTQPFISKLLGMGDIEGLIDKVNELKLDDNEALIEKLKHGQFTLRDMYEQFQNIMKMGPFSQILGMIPGFGTDFMSKGNEQESMARLKKLMTIMDSMNDQELDSTDGAKVFSKQPGRIQRVARGSGVSTRDVQELLTQYTKFAQMVKKMGGIKGLFKGGDMSKNVSQSQMAKLNQQMAKMMDPRVLHHMGGMAGLQSMMRQFQQGAAGNMKGMMGFNNM

SEQ ID NO: 42016 - protein, 24 aa, Homo sapiens
IDRLNEQASEEILKVEQKYNKLRK

SEQ ID NO: 42017 - protein, 477 aa, Homo sapiens
TTEQQRDWPPRAPFAAVPFPGALTPFSGWDCSGGADSAGIAAEAAASAAASAAERGSMFSPGQEEHCAPNKEPVKYGELVVLGYNGALPNGDRGRRKSRFALYKRPKANGVKPSTVHVISTPQASKAISCKGQHSISYTLSRNQTVVVEYTHDKDTDMFQVGRSTESPIDFVVTDTISGSQNTDEAQITQSTISRFACRIVCDRNEPYTARIFAAGFDSSKNIFLGEKAAKWKNPDGHMDGLTTNGVLVMHPRGGFTEESQPGVWREISVCGDVYTLRETRSAQQRGKLVESETNVLQDGSLIDLCGATLLWRTADGLFHTPTQKHIEALRQEINAARPQCPVGLNTLAFPSINRKEVVEEKQPWAYLSCGHVHGYHNWGHRSDTEANERECPMCRTVGPYVPLWLGCEAGFYVDAGPPTHAFTPCGHVCSEKSAKYWSQIPLPHGTHAFHAACPFCATQLVGEQNCIKLIFQGPID

SEQ ID NO: 42018 - protein, 5 aa, Homo sapiens
MWPHG

SEQ ID NO: 42019 - protein, 13 aa, Homo sapiens
MSLVIPEKFQHIL

SEQ ID NO: 42020 - protein, 121 aa, Homo sapiens [sequence omitted]

SEQ ID NO: 42021 - protein, 17 aa, Homo sapiens
IWPALPLWVLYLFKVIH

SEQ ID NO: 42022 - protein, 13 aa, Homo sapiens
IYKMAAVGKERRR

SEQ ID NO: 42023 - protein, 165 aa, Homo sapiens
VAPLQLKVRVSQRELSRGVCAERYSQEVFEKTKRLLFLGAQAYLDHVWDEGCAVVHLPESPKPGPTGAPRAARGQMLIGPDGRLIRSLGQASEADPSGVASIACSSCVRAVDGKAVCGQCERALCGQCVRTCWGCGSVACTLCGLVDCSDMYEKVLCTSCAMFET

SEQ ID NO: 42024 - protein, 581 aa, Homo sapiens
MADFYKEFLSKNFQKHMYYNRMYDNMSTMVYIKEDKLEKLTQDEIISKTKQVIQGLEALKNEHNSILQSLLETLKCLKKDDESNLVEEKSNMIRKSLEMLELGLSEAQVMMALSNHLNAVESEKQKLRAQVRRLCQENQWLRDELANTQQKLQKSEQSVAQLEEEKKHLEFMNQLKKYDDDISPSEDKDTDSTKEPLDDLFPNDEDDPGQGIQQQHSSAAAAAQQGGYEIPARLRTLHNLVIQYASQGRYEVAVPLCKQALEDLEKTSGHDHPDVATMLNILALVYRDQNKYKDAANLLNDALAIREKTLGKDHPAVAATLNNLAVLYGKRGKYKEAEPLCKRALEIREKVLGKDHPDVAKQLNNLALLCQNQGKYEEVEYYYQRALEIYQTKLGPDDPNVAKTKNNLASCYLKQGKFKQAETLYKEILTRAHEREFGSVDDENKPIWMHAEEREECKGKQKDGTSFGEYGGWYKACKVDSPTVTTTLKNLGALYRRQGKFEAAETLEEAAMRSRKQGLDNVHKQRVAEVLNDPENMEKRRSRESLNVDVVKYESGPDGGEEVSMSVEWNGMRKMKLGLVN

SEQ ID NO: 42025 - protein, 27 aa, Homo sapiens
MLRKMIPMILKMFLHRNEGNTKNQIQF

SEQ ID NO: 42026 - protein, 45 aa, Homo sapiens
RATLFASGSRRVIPELAIRTEFQARAQRPSSPALCMDQTSKCHFG

SEQ ID NO: 42027 - protein, 6 aa, Homo sapiens
MKVRTI

SEQ ID NO: 42028 - protein, 64 aa, Homo sapiens
KTLVEQLLSLLNSSPGPPTRKLLAKNLAILYSIGDTFSVHEAIDKCNDLIRSKDDSPSYLPTKL

SEQ ID NO: 42029 - protein, 607 aa, Homo sapiens
RMTVVGNPRSWSCQWLPILILLLGTGHGPGVEGVTHYKAGDPVILYVNKVGPYHNPQETYHYYQLPVCCPEKIRHKSLSLGEVLDGDRMAESLYEIRFRENVEKRILCHMQLSSAQVEQLRQAIEELYYFEFVVDDLPIRGFVGYMEESGFLPHSHKIGLWTHLDFHLEFHGDRIIFANVSVRDVKPHSLDGLRPDEFLGLTHTYSVRWSETSVERRSDRRRGDDGGFFPRTLEIHWLSIINSMVLVFLLVGFVAVILMRVLRNDLARYNLDEETTSAGSGDDFDQGDNGWKIIHTDVFRFPPYRGLLCAVLGVGAQFLALGTGIIVMALLGMFNVHRHGAINSAAILLYALTCCISGYVSSHFYRQIGGERWVWNIILTTSLFSVPFFLTWSVVNSVHWANGSTQALPATTILLLLTVWLLVGFPLTVIGGIFGKNNASPFDAPCRTKNIAREIPPQPWYKSTVIHMTVGGFLPFSAISVELYYIFATVWGREQYTLYGILFFVFAILLSVGACISIALTYFQLSGEDYRWWWRSVLSVGSTGLFIFLYSVFYYARRSNMSGAVQTVEFFGYSLLTGYVFFLMLGTISFFSSLKFIRYIYVNLKMD

SEQ ID NO: 42030 - protein, 18 aa, Homo sapiens
VEAIRTNYNDRYDEIRHH

SEQ ID NO: 42031 - protein, 493 aa, Homo sapiens
LRAHGPRPSVRTGLPSVGRQAAGAAMGRGWGFLFGLLGAVWLLSSGHGEEQPPETAAQRCFCQVSGYLDDCTCDVETIDRFNNYRLFPRLQKLLESDYFRYYKVNLKRPCPFWNDISQCGRRDCAVKPCQSDEVPDGIKSASYKYSEEANNLIEECEQAERLGAVDESLSEETQKAVLQWTKHDDSSDNFCEADDIQSPEAEYVDLLLNPERYTGYKGPDAWKIWNVIYEENCFKPQTIKRPLNPLASGQGTSEENTFYSWLEGLCVEKRAFYRLISGLHASINVHLSARYLLQETWLEKKWGHNITEFQQRFDGILTEGEGPRRLKNLYFLYLIELRALSKVLPFFERPDFQLFTGNKIQDEENKMLLLEILHEIKSFPLHFDENSFFAGDKKEAHKLKEDFRLHFRNISRIMDCVGCFKCRLWGKLQTQGLGTALKILFSEKLIANMPESGPSYEFHLTRQEIVSLFNAFGRISTSVKELENFRNLLQNIH

SEQ ID NO: 42032 - protein, 231 aa, Homo sapiens
VARAVEEEVGLALKPDPDPVLCTLVGESPTRLARSADRRASTDLTRKMKPDETPMFDPSLLKEVDWSQNTATFSPAISPTHPGEGLVLRPLCTADLNRGFFKVLGQLTETGVVSPEQFMKSFEHMKKSGDYYVTVVEDVTLGQIVATATLIIEHKFIHSCAKRGRVEDVVVSDECRGKQLGKLLLSTLTLLSKKLNCYKITLECLPQNVGFYKKFGYTVSEENYMCRRFLK

SEQ ID NO: 42033 - protein, 268 aa, Homo sapiens
LEADKPVEDILTYEEFHPFLFSQHSQCPYIEFESFDKAVDEFYSKIEGQKIDLKALQQEKQALKKLDNVRKDHENRLEALQQAQEIDKLKGELIEMNLQIVDRAIQVVRSALANQIDWTEIGLIVKEAQAQGDPVASAIKELKLQTNHVTMLLRNPYLLSEEEDDDVDGDVNVEKNETEPPKGKKKKQKNKQLQKPQKNKPLLVDVDLSLSAYANAKKYYDHKRYAAKKTQKTVEAAEKAFKSAEKKTKQTLKEVQTVTSIQKARKVY

SEQ ID NO: 42034 - protein, 37 aa, Homo sapiens
MGKLSRCSSLRNLDLRSVCGTSIKMIYGNKVLSLCLK

SEQ ID NO: 42035 - protein, 24 aa, Homo sapiens
KKNEPKHRLARHGLYEKKKTSRKQ

SEQ ID NO: 42036 - protein, 32 aa, Homo sapiens
LELSWGSLFAAAAAAATAVLGARSPGKKPSHV

SEQ ID NO: 42037 - protein, 392 aa, Homo sapiens
ILFSWGCPLLFVLCVEMANSANTNTVPKLYRSVIEDVINDVRDIFLDDGVDEQVLMELKTLWENKLMQSRAVDGFHSEEQQLLLQVQQQHQPQQQQHHHHHHHQQAQPQQTVPQQAQTQQVLIPASQQATAPQVIVPDSKLIQHMNASNMSAAATAATLALPAGVTPVQQILTNSGQLLQVVRAANGAQYIFQPQQSVVLQQQVIPQMQPGGVQAPVIQQVLAPLPGGISPQTGVIIQPQQILFTGNKTQVIPTTVAAPTPAQAQITATGQQQPQAQPAQTQAPLVLQVDGTGDTSSEEDEDEEEDYDDDEEEDKEKDGAEDGQVEEEPLNSEDDVSDEEGQELFDTENVVVCQYDKIHRSKNKWKFHLKDGIMNLNGRDYIFSKAIGDAEW

SEQ ID NO: 42038 - protein, 817 aa, Homo sapiens
VAESVVAEAKATALGVGTGPERRMRVRIGLTLLLCAVLLSLASASSDEEGSQDESLDSKTTLTSDESVKDHTTAGRVVAGQIFLDSEESELESSIQEEEDSLKSQEGESVTEDISFLESPNPENKDYEEPKKVRKPALTAIEGTAHGEPCHFPFLFLDKEYDECTSDGREDGRLWCATTYDYKADEKWGFCETEEEAAKRRQMQEAEMMYQTGMKILNGSNKKSQKREAYRYLQKAASMNHTKALERVSYALLFGDYLPQNIQAAREMFEKLTEEGSPKGQTALGFLYASGLGVNSSQAKALVYYTFGALGGNLIAHMVLGYRYWAGIGVLQSCESALTHYRLVANHVASDISLTGGSVVQRIRLPDEVENPGMNSGMLEEDLIQYYQFLAEKGDVQAQVGLGQLHLHGGRGVEQNHQRAFDYFNLAANAGNSHAMAFLGKMYSEGSDIVPQSNETALHYFKKAADMGNPVGQSGLGMAYLYGRGVQVNYDLALKYFQKAAEQGWVDGQLQLGSMYYNGIGVKRDYKQALKYFNLASQGGHILAFYNLAQMHASGTGVMRSCHTAVELFKNVCERGRWSERLMTAYNSYKDGDYNAAVIQYLLLAEQGYEVAQSNAAFILDQREASIVGENETYPRALLHWNRAASQGYTVARIKLGDYHFYGFGTDVDYETAFIHYRLASEQQHSAQAMFNLGYMHEKGLGIKQDIHLAKRFYDMAAEASPDAQVPVFLALCKLGVVYFLQYIRETNIRDMFTQLDMDQLLGPEWDLYLMTIIALLLGTVIAYRQRQHQDMPAPRPPGPRPAPPQQEGPPEQQPPQ

SEQ ID NO: 42039 - protein, 7 aa, Homo sapiens
MRLIGTI

SEQ ID NO: 42040 - protein, 12 aa, Homo sapiens
MQVLPLQIILPT

SEQ ID NO: 42041 - protein, 74 aa, Homo sapiens
LAADLWCVLSRLSCAKMLQSIIKNIWIPMKPYYTKVYQEIWIGMGLMGFIVYKIRAADKRSKALKASAPAPGHH

SEQ ID NO: 42042 - protein, 64 aa, Homo sapiens
IAQMREATTLANGVLASLNLPAAIEDVSGDTVPQSILTKSRSVIEQGGIQTVDQLIKELPELLQ

SEQ ID NO: 42043 - protein, 233 aa, Homo sapiens
VETLPSPFLTPSPSFPPSFPPVAVSSGAAAPGGAPGTAMGSRASTLLRDEELEEIKKETGFSHSQITRLYSRFTSLDKGENGTLSREDFQRIPELAINPLGDRIINAFFPEGEDQVNFRGFMRTLAHFRPIEDNEKSKDVNGPEPLNSRSNKLHFAFRLYDLDKDEKISRDELLQVLRMMVGVNISDEQLGSIADRTIQEADQDGDSAISFTEFVKVLEKVDVEQKMSIRFLH

SEQ ID NO: 42044 - protein, 19 aa, Homo sapiens
MSQMWWFQNVLLLYMLCSS

SEQ ID NO: 42045 - protein, 123 aa, Homo sapiens
IRAEMSRSVALAVLALLSLSGLEAIQRTPKIQVYSRHPAENGKSNFLNCYVSGFHPSDIEVDLLKNGERIEKVEHSDLSFSKDWSFYLLYYTEFTPTEKDEYACRVNHVTLSQPKIVKWDRDM

SEQ ID NO: 42046 - protein, 640 aa, Homo sapiens
IETKLGSMEPAPARSPRPQQDPARPQEPTMPPPETPSEGRQPSPSPSPTERAPASEEEFQFLRCQQCQAEAKCPKLLPCLHTLCSGCLEASGMQCPICQAPWPLGADTPALDNVFFESLQRRLSVYRQIVDAQAVCTRCKESADFWCFECEQLLCAKCFEAHQWFLKHEARPLAELRNQSVREFLDGTRKTNNIFCSNPNHRTPTLTSIYCRGCSKPLCCSCALLDSSHSELKCDISAEIQQRQEELDAMTQALQEQDSAFGAVHAQMHAAVGQLGRARAETEELIRERVRQVVAHVRAQERELLEAVDARYQRDYEEMASRLGRLDAVLQRIRTGSALVQRMKCYASDQEVLDMHGFLRQALCRLRQEEPQSLQAAVRTDGFDEFKVRLQDLSSCITQGKDAAVSKKASPEAASTPRDPIDVDLPEEAERVKAQVQALGLAEAQPMAVVQSVPGAHPVPVYAFSIKGPSYGEDVSNTTTAQKRKCSQTQCPRKVIKMESEEGKEARLARSSPEQPRPSTSKAVSPPHLDGPPSPRSPVIGSEVFLPNSNHVASGAGEAEERVVVISSSEDSDAENSSSRELDDSSSESSDLQLEGPSTLRVLDENLADPQAEDRPLVFFDLKIDNESGFSWGYPHPFLI

SEQ ID NO: 42047 - protein, 889 aa, Homo sapiens
IETKLGSMEPAPARSPRPQQDPARPQEPTMPPPETPSEGRQPSPSPSPTERAPASEEEFQFLRCQQCQAEAKCPKLLPCLHTLCSGCLEASGMQCPICQAPWPLGADTPALDNVFFESLQRRLSVYRQIVDAQAVCTRCKESADFWCFECEQLLCAKCFEAHQWFLKHEARPLAELRNQSVREFLDGTRKTNNIFCSNPNHRTPTLTSIYCRGCSKPLCCSCALLDSSHSELKCDISAEIQQRQEELDAMTQALQEQDSAFGAVHAQMHAAVGQLGRARAETEELIRERVRQVVAHVRAQERELLEAVDARYQRDYEEMASRLGRLDAVLQRIRTGSALVQRMKCYASDQEVLDMHGFLRQALCRLRQEEPQSLQAAVRTDGFDEFKVRLQDLSSCITQGKDAAVSKKASPEAASTPRDPIDVDLPEEAERVKAQVQALGLAEAQPMAVVQSVPGAHPVPVYAFSIKGPSYGEDVSNTTTAQKRKCSQTQCPRKVIKMESEEGKEARLARSSPEQPRPSTSKAVSPPHLDGPPSPRSPVIGSEVFLPNSNHVASGAGEAEERVVVISSSEDSDAENSSSRELDDSSSESSDLQLEGPSTLRVLDENLADPQAEDRPLVFFDLKIDNETQKISQLAAVNRESKFRVVIQPEAFFSIYSKAVSLEVGLQHFLSFLSSMRRPILACYKLWGPGLPNFFRALEDINRLWEFQEAISGFLAALPLIRERVPGASSFKLKNLAQTYLARNMSERSAMAAVLAMRDLCRLLEVSPGPQLAQHVYPFSSLQCFASLQPLVQAAVLPRAEARLLALHNVSFMELLSAHRRDRQGGLKKYSRYLSLQTTTLPPAQPAFNLQALGTYFEGLLEGPALARAEGVSTPLAGRGLAERASQQS

SEQ ID NO: 42048 - protein, 137 aa, Homo sapiens [sequence omitted]

SEQ ID NO: 42049 - protein, 1508 aa, Homo sapiens
VDQGCRCPERSFSFHWSGGKSAAMAAPAQPKKIVAPTVSQINAEFVTQLACKYWAPHIKKKSPFDIKVIEDIYEKEIVKSRFAIRKIMLLEFSQYLENYLWMNYSPEVSSKAYLMSICCMVNEKFRENVPAWEIFKKKPDHFPFFFKHILKAALAETDGEFSLHEQTVLLLFLDHCFNSLEVDLIRSQVQQLISLPMWMGLQLARLELELKKTPKLRKFWNLIKKNDEKMDPEAREQAYQERRFLSQLIQKFISVLKSVPLSEPVTMDKVHYCERFIELMIDLEALLPTRRWFNTILDDSHLLVHCYLSNLVRREEDGHLFSQLLDMLKFYTGFEINDQTGNALTENEMTTIHYDRITSLQRAAFAHFPELYDFALSNVAEVDTRESLVKFFGPLSSNTLHQVASYLCLLPTLPKNEDTTFDKEFLLELLVSRHERRISQIQQLNQMPLYPTEKIIWDENIVPTEYYSGEGCLALPKLNLQFLTLHDYLLRNFNLFRLESTYEIRQDIEDSVSRMKPWQSEYGGVVFGGWARMAQPIVAFTVVEVAKPNIGENWPTRVRADVTINLNVRDHIKDEWEGLRKHDVCFLITVRPTKPYGTKFDRRRPFIEQVGLVYVRGCEIQGMLDDKGRVIEDGPEPRPNLRGESRTFRVFLDPNQYQQDMTNTIQNGAEDVYETFNIIMRRKPKENNFKAVLETIRNLMNTDCVVPDWLHDIILGYGDPSSAHYSKMPNQIATLDFNDTFLSIEHLKASFPGHNVKVTVEDPALQIPPFRITFPVRSGKGKKRKDADVEDEDTEEAKTLIVEPHVIPNRGPYPYNQPKRNTIQFTHTQIEAIRAGMQPGLTMVVGPPGTGKTDVAVQIISNIYHNFPEQRTLIVTHSNQALNQLFEKIMALDIDERHLLRLGHGEEELETEKDFSRYGRVNYVLARRIELLEEVKRLQKSLGVPGDASYTCETAGYFFLYQVMSRWEEYISKVKNKGSTLPDVTEVSTFFPFHEYFANAPQPIFKGRSYEEDMEIAEGCFRHIKKIFTQLEEFRASELLRSGLDRSKYLLVKEAKIIAMTCTHAALKRHDLVKLGFKYDNILMEEAAQILEIETFIPLLLQNPQDGFSRLKRWIMIGDHHQLPPVIKNMAFQKYSNMEQSLFTRFVRVGVPTVDLDAQGRARASLCNLYNWRYKNLGNLPHVQLLPEFSTANAGLLYDFQLINVEDFQGVGESEPNPYFYQNLGEAEYVVALFMYMCLLGYPADKISILTTYNGQKHLIRDIINRRCGNNPLIGRPNKVTTVDRFQGQQNDYILLSLVRTRAVGHLRDVRRLVVAMSRARLGLYIFARVSLFQNCFELTPAFSQLTARPLHLHIIPTEPFPTTRKNGERPSHEVQIIKNMPQMANFVYNMYMHLIQTTHHYHQTLLQLPPAMVEEGEEVQNQETELETEEEAMTVQADIIPSPTDTSCRQETPAFQTDTTPSETGATSTPEAIPALSETTPTVVGAVSAPAEANTPQDATSAPEETK

SEQ ID NO: 42050 - protein, 1790 aa, Homo sapiens
INSDDRRPQWRREDRIPYQDRESYSQPAWHHRGPPQRDWKWEKDGFNNTRKNSFPHSLRNGGGPRGRSGWHKGVAGGSSTWFHNHSNSGGGWLSNSGAVDWNHNGTGRNSSWLSEGTGGFSSWHMNNSNGNWKSSVRSTNNWNYSGPGDKFQPGRNRNSNCQMEDMTMLWNKKSNKSNKYSHDRYNWQRQENDKLGTVATYRGPSEGFTSDKFPSEGLLDFNFEQLESQTTKQADTATSKVSGKNGSAAREKPRRWTPYPSQKTLDLQSGLKDITGNKSEMIEKPLFDFSLITTGIQEPQTDETRNSPTQKTQKEIHTGSLNHKASSDSAASFEVVRQCPTAEKPEQEHTPNKMPSLKSPLLPCPATKSLSQKQDPKNISKNTKTNFFSPGEHSNPSNKPTVEDNHGPYISKLRSSCPHVLKGNKSTFGSQKQSGDNLNDTLRKAKEVLQCHESLQNPLLSTSKSTRNYAKASRNVEESEKGSLKIEFQVHALEDESDGETSDTEKHGTKIGTLGSATTELLSGSTRTADEKEEDDRILKTSRELSTSPCNPIVRQKESELQMTSAASPHPGLLLDLKTSLEDAQVDDSIKSHVSYETEGFESASLDAELQKSDISQPSGPLLPELSKLGFPASLQRDLTRHISLKSKTGVHLPEPNLNSARRIRNISGHRKSETEKESGLKPTLRQILNASRRNVNWEQVIQQVTKKKQELGKGLPRFGIEMVPLVQNEQEALDLDGEPDLSSLEGFQWEGVSISSSPGLARKRSLSESSVIMDRAPSVYSFFSEEGTGKENEPQQMVSPSNSLRAGQSQKATMHLKQEVTPRAASLRTGERAENVATQRRHSAQLSSDHIIPLMHLAKDLNSQERSIPPSENQNSQESNGEGNCLSSSASSALAISSLADAATDSSCTSGAEQNDGQSIRKKRRATGDGSSPELPSLERKNKRRKIKGKKERSQVDQLLNISLREEELSKSLQCMDNNLLQARAALQTAYVEVQRLLMLKQQITMEMSALRTHRIQILQGLQETYEPSEHPDQVPCSLTRERRNSRSQTSIDAALLPTPFFPLFLEPPSSHVSPSPTGASLQITTSPTFQTHGSVPAPDSSVQIKQEPMSPEQDENVNAVPPSSACNVSKELLEANREISDSCPVYPVITARLSLPESTESFHEPSQELKFSVEQRNTRNRENSPSSQSAGLSSINKEGEEPTKGNSGSEACTSSFLRLSFASETPLEKEPHSPADQPEQQAESTLTSAETRGSKKKKKLRKKKSLRAAHVPENSDTEQDVLTVKPVRKVKAGKLIKGGKVTTSTWEDSRTGREQESVRDEPDSDSSLEVLEIPNPQLEVVAIDSSESGEEKPDSPSKKDIWNSTEQNPLETSRSGCDEVSSTSEIGTRYKDGIPVSVAETQTVISSIKGSKNSSEISSEPGDDDEPTEGSFEGHQAAVNAIQIFGNLLYTCSADKTVRVYNLVSRKCIGVFEGHTSKVNCLLVTQTSGKNAALYTGSSDHTIRCYNVKSRECVEQLQLEDRVLCLHSRWRILYAGLANGTVVTFNIKNNKRLEIFECHGPRAVSCLATAQEGARKLLVVGSYDCTISVRDARNGLLLRTLEGHSKTILCMKVVNDLVFSGSSDQSVHAHNIHTGELVRIYKGHNHAVTVVNILGKVMVTACLDKFVRVYELQSHDRLQVYGGHKDMIMCMTIHKSMIYTGCYDGSIQAVRLNLMQNYRCWWHGCSLIFGVVDHLKQHLLTDHTNPNFQTLKCRWKNCDAFFTARKGSKQDAAGHIERHAEDDSKIDS

SEQ ID NO: 42051 - protein, 667 aa, Homo sapiens
IMADMEDLFGSDADSEAERKDSDSGSDSDSDQENAASGSNASGSESDQDERGDSGQPSNKELFGDDSEDEGASHHSGSDNHSERSDNRSEASERSDHEDNDPSDVDQHSGSEAPNDDEDEGHRSDGGSHHSEAEGSEKAHSDDEKWGREDKSDQSDDEKIQNSDDEERAQGSDEDKLQNSDDDEKMQNTDDEERPQLSDDERQQLSEEEKANSDDERPVASDNDDEKQNSDDEEQPQLSDEEKMQNSDDERPQASDEEHRHSDDEEEQDHKSESARGSDSEDEVLRMKRKNAIASDSEADSDTEVPKDNSGTMDLFGGADDISSGSDGEDKPPTPGQPVDENGLPQDQQEEEPIPETRIEVEIPKVNTDLGNDLYFVKLPNFLSVEPRPFDPQYYEDEFEDEEMLDEEGRTRLKLKVENTIRWRIRRDEEGNEIKESNARIVKWSDGSMSLHLGNEVFDVYKAPLQGDHNHLFIRQGTGLQGQAVFKTKLTFRPHSTDSATHRKMTLSLADRCSKTQKIRILPMAGRDPECQRTEMIKKEEERLRASIRRESQQRRMREKQHQRGLSASYLEPDRYDEEEEGEESISLAAIKNRYKGGIREERARIYSSDSDEGSEEDKAQRLLKAKKLTSDEEGEPSGKRKAEDDDKANKKHKKYVISDEEEEDDD

SEQ ID NO: 42052 - protein, 550 aa, Homo sapiens
TEAAQRRDSEPTPPSELRRTVPSHPAPTSPMGPQRRLSPAGAALLWGFLLQLTAAQEAILHASGNGTTKDYCMLYNPYWTALPSTLENATSISLMNLTSTPLCNLSDIPPVGIKSKAVVVPWGSCHFLEKARIAQKGGAEAMLVVNNSVLFPPSGNRSEFPDVKILIAFISYKDFRDMNQTLGDNITVKMYSPSWPNFDYTMVVIFVIAVFTVALGGYWSGLVELENLKAVTTEDREMRKKKEEYLTFSPLTVVIFVVICCVMMVLLYFFYKWLVYVMIAIFCIASAMSLYNCLAALIHKIPYGQCTIACRGKNMEVRLIFLSGLCIAVAVVWAVFRNEDRWAWILQDILGIAFCLNLIKTLKLPNFKSCVILLGLLLLYDVFFVFITPFITKNGESIMVELAAGPFGNNEKLPVVIRVPKLIYFSVMSVCLMPVSILGFGDIIVPGLLIAYCRRFDVQTGSSYIYYVSSTVAYAIGMILTFVVLVLMKKGQPALLYLVPCTLITASVVAWRRKEMKKFWKGNSYQMMDHLDCATNEENPVISGEQIVQQ

SEQ ID NO: 42053 - protein, 26 aa, Homo sapiens
MLHFFHDSGWFFLYLECFSSVVPLPL

SEQ ID NO: 42054 - protein, 87 aa, Homo sapiens
RINMPLARDLLHPSLEEEKKKHKKKRLVQSPNSYFMDVKCPGCYKITTVFSHAQTVVLCVGCSTVLCQPTGGKARLTEGCSFRRKQH

SEQ ID NO: 42055 - protein, 29 aa, Homo sapiens
LSPAPPPRKPLQPGPEWRRRSMKRRRPAP

SEQ ID NO: 42056 - protein, 38 aa, Homo sapiens
LSAPRWGRGAQAGSSENPLRRLPVPAGLRMPGRLICTY

SEQ ID NO: 42057 - protein, 190 aa, Homo sapiens
LVFAKMKGYPHWPARIDELPEGAVKPPANKYPIFFFGTHETAFLGPKDLFPYKEYKDKFGKSNKRKGFNEGLWEIENNPGVKFTGYQAIQQQSSSETEGEGGNTADASSEEEGDRVEEDGKGKRKNEKAGSKRKKSYTSKKSSKQSRKSPGDEDDKDCKEEENKSSSEGGDAGNDTRNTTSDLQKTSEGT

SEQ ID NO: 42058 - protein, 659 aa, Homo sapiens
TARGAATRSDIAGVCGWLLLSGPCGVGLDLDSRLLGASAMRRSEVLAEESIVCLQKALNHLREIWELIGIPEDQRLQRTEVVKKHIKELLDMMIAEEESLKERLIKSISVCQKELNTLCSELHVEPFQEEGETTILQLEKDLRTQVELMRKQKKERKQELKLLQEQDQELCEILCMPHYDIDSASVPSLEELNQFRQHVTTLRETKASRREEFVSIKRQIILCMEALDHTPDTSFERDVVCEDEDAFCLSLENIATLQKLLRQLEMQKSQNEAVCEGLRTQIRELWDRLQIPEEEREAVATIMSGSKAKVRKALQLEVDRLEELKMQNMKKVIEAIRVELVQYWDQCFYSQEQRQAFAPFCAEDYTESLLQLHDAEIVRLKNYYEVHKELFEGVQKWEETWRLFLEFERKASDPNRFTNRGGNLLKEEKQRAKLQKMLPKLEEELKARIELWEQEHSKAFMVNGQKFMEYVAEQWEMHRLEKERAKQERQLKNKKQTETEMLYGSAPRTPSKRRGLAPNTPGKARKLNTTTMSNATANSSIRPIFGGTVYHSPVSRLPPSGSKPVAASTCSGKKTPRTGRHGANKENLELNGSILSGGYPGSAPLQRNFSINSVASTYSEFAKDPSLSDSSTVGLQRELSKASKSDATSGILNSTNIQS

SEQ ID NO: 42059 - protein, 16 aa, Homo sapiens
VFFGALLPTAAFGGAV

SEQ ID NO: 42060 - protein, 2656 aa, Homo sapiens
MLLEKDVNPGGKEETPGQRPAVTETHQLAELNEKKNERLRAAFGISDSYVDGSSFDPQRRAREAKQPAPEPPKPYSLVRESSSSRSPTPKQKKKKKKKDRGRRSESSSPRRERKKSSKKKKHRSESESKKRKHRSPTPKSKRKSKDKKRKRSRSTTPAPKSRRAHRSTSADSASSSDTSRSRSRSAAAKTHTTALAGRSPSPASGRRGEGDAPFSEPGTTSTQRPSSPETATKQPSSPYEDKDKDKKEKSATRPSPSPERSSTGPEPPAPTPLLAERHGGSPQPLATTPLSQEPVNPPSEASPTRDRSPPKSPEKLPQSSSSESSPPSPQPTKVSRHASSSPESPKPAPAPGSHREISSSPTSKNRSHGRAKRDKSHSHTPSRRMGRSRSPATAKRGRSRSRTPTKRGHSRSRSPQWRRSRSAQRWGRSRSPQRRGRSRSPQRPGWSRSRNTQRRGRSRSARRGRSHSRSPATRGRSRSRTPARRGRSRSRTPARRRSRSRTPTRRRSRSRTPARRGRSRSRTPARRRSRTRSPVRRRSRSRSPARRSGRSRSRTPARRGRSRSRTPARRGRSRSRTPARRSGRSRSRTPARRGRSRSRTPRRGRSRSRSLVRRGRSHSRTPQRRGRSGSSSERKNKSRTSQRRSRSNSSPEMKKSRISSRRSRSLSSPRSKAKSRLSLRRSLSGSSPCPKQKSQTPPRRSRSGSSQPKAKSRTPPRRSRSSSSPPPKQKSKTPSRQSHSSSSPHPKVKSGTPPRQGSITSPQANEQSVTPQRRSCFESSPDPELKSRTPSRHSCSGSSPPRVKSSTPPRQSPSRSSSPQPKVKAIISPRQRSHSGSSSPSPSRVTSRTTPRRSRSVSPCSNVESRLLPRYSHSGSSSPDTKVKPETPPRQSHSGSISPYPKVKAQTPPGPSLSGSKSPCPQEKSKDSLVQSCPGSLSLCAGVKSSTPPGESYFGVSSLQLKGQSQTSPDHRSDTSSPEVRQSHSESPSLQSKSQTSPKGGRSRSSSPVTELASRSPIRQDRGEFSASPMLKSGMSPEQSRFQSDSSSYPTVDSNSLLGQSRLETAESKEKMALPPQEDATASPPRQKDKFSPFPVQDRPESSLVFKDTLRTPPRERSGAGSSPETKEQNSALPTSSQDEELMEVVEKSEEPAGQILSHLSSELKEMSTSNFESSPEVEERPAVSLTLDQSQSQASLEAVEVPSMASSWGGPHFSPEHKELSNSPLRENSFGSPLEFRNSGPLGTEMNTGFSSEVKEDLNGPFLNQLETDPSLDMKEQSTRSSGHSSSELSPDAVEKAGMSSNQSISSPVLDAVPRTPSRERSSSASSPEMKDGLPRTPSRRSRSGSSPGLRDGSGTPSRHSLSGSSPGMKDIPRTPSRGRSECDSSPEPKALPQTPRPRSRSPSSPELNNKCLTPQRERSGSESSVDQKTVARTPLGQRSRSGSSQELDVKPSASPQERSESDSSPDSKAKTRTPLRQRSRSGSSPEVDSKSRLSPRRSRSGSSPEVKDKPRAAPRAQSGSDSSPEPKAPAPRALPRRSRSGSSSKGRGPSPEGSSSTESSPEHPPKSRTARRGSRSSPEPKTKSRTPPRRRSSRSSPELTRKARLSRRSRSASSSPETRSRTPPRHRRSPSVSSPEPAEKSRSSRRRRSASSPRTKTTSRRGRSPSPKPRGLQRSRSRSRREKTRTTRRRDRSGSSQSTSRRRQRSRSRSRVTRRRRGGSGYHSRSPARQESSRTSSRRRRGRSRTPPTSRKRSRSRTSPAPWKRSRSRASPATHRRSRSRTPLISRRRSRSRTSPVSRRRSRSRTSVTRRRSRSRASPVSRRRSRSRTPPVTRRRSRSRTPTTRRRSRSRTPPVTRRRSRSRTPPVTRRRSRSRTSPITRRRSRSRTSPVTRRRSRSRTSPVTRRRSRSRTSPVTRRRSRSRTPPAIRRRSRSRTPLLPRKRSRSRSPLAIRRRSRSRTPRTARGKRSLTRSPPAIRRRSASGSSSDRSRSATPPATRNHSGSRTPPVALNSSRMSCFSRPSMSPTPLDRCRSPGMLEPLGSSRTPMSVLQQAGGSMMDGPGPRIPDHQRTSVPENHAQSRIALALTAISLGTARPPPSMSAAGLAARMSQVPAPVPLMSLRTAPAANLASRIPAASAAAMNLASARTPAIPTAVNLADSRTPAAAAAMNLASPRTAVAPSAVNLADPRTPTAPAVNLAGARTPAALAALSLTGSGTPPTAANYPSSSRTPQAPASANLVGPRSAHATAPVNIAGSRTAAALAPASLTSARMAPALSGANLTSPRVPLSAYERVSGRTSPPLLDRARSRTPPSAPSQSRMTSERAPSPSSRMGQAPSQSLLPPAQDQPRSPVPSAFSDQSRCLIAQTTPVAGSQSLSSGAVATTTSSAGDHNGMLSVPAPGVPHSDVGEPPASTGAQQPSALAALQPAKERRSSSSSSSSSSSSSSSSSSSSSSSSSGSSSSDSEGSSLPVQPEVALKRVPSPTPAPKEAVREGRPPEPTPAKRKRRSSSSSSSSSSSSSSSSSSSSSSSSSSSSSSSSSSSSSSSSSSPSPAKPGPQALPKPASPKKPPPGERRSRSPRKPIDSLRDSRSLSYSPVERRRPSPQPSPRDQQSSSSERGSRRGQRGDSRSPSHKRRRETPSPRPMRHRSSRSP

SEQ ID NO: 42061 - protein, 30 aa, Homo sapiens
ICAGCGRDFKLPPGATAATATERCPECEGS

SEQ ID NO: 42062 - protein, 394 aa, Homo sapiens
LTTKGLRLDFQGRISSEAPELATTSTMPYQYPALTPEQKKELSDIAHRIVAPGKGILAADESTGSIAKRLQSIGTENTEENRRFYRQLLLTADDRVNPCIGGVILFHETLYQKADDGRPFPQVIKSKGGVVGIKVDKGVVPLAGTNGETTTQGLDGLSERCAQYKKDGADFAKWRCVLKIGEHTPSALAIMENANVLARYASICQQVGLQNGIVPIVEPEILPDGDHDLKRCQYVTEKVLAAVYKALSDHHIYLEGTLLKPNMVTPGHACTQKFSHEEIAMATVTALRRTVPPAVTGITFLSGGQSEEEASINLNAINKCPLLKPWALTFSYGRALQASALKAWGGKKENLKAAQEEYVKRALANSLACQGKYTPSGQAGAAASESLFVSNHAY

SEQ ID NO: 42063 - protein, 22 aa, Homo sapiens
MEQQAQRPSPQPCLPASERTEA

SEQ ID NO: 42064 - protein, 47 aa, Homo sapiens
ITLIGLFFAGIHKRVVAPSIIAARCRTVLAEYNMSCDDVSIFLVRKL

SEQ ID NO: 42065 - protein, 28 aa, Homo sapiens
ILLFVVVAVFLCVFGLSSYGNQPCKSLL

SEQ ID NO: 42066 - protein, 682 aa, Homo sapiens
KVHRVRFFNYVPSGIRCVAYNNQSNRLAVSRTDGTVEIYNLSANYFQEKFFPGHESRATEALCWAEGQRLFSAGLNGEIMEYDLQALNIKYAMDAFGGPIWSMAASPSGSQLLVGCEDGSVKLFQITPDKIQFERNFDRQKSRILSLSWHPSGTHIAAGSIDYISVFDVKSGSAVHKMIVDRQYMGVSKRKCIVWGVAFLSDGTIISVDSAGKVQFWDSATGTLVKSHLIANADVQSIAVADQEDSFVVGTAEGTVFHFQLVPVTSNSSEKQWVRTKPFQHHTHDVRTVAHSPTALISGGTDTHLVFRPLMEKVEVKNYDAALRKITFPHRCLISCSKKRQLLLFQFAHHLELWRLGSTVATGKNGDTLPLSKNADHLLHLKTKGPENIICSCISPCGSWIAYSTVSRFFLYRLNYEHDNISLKRVSKMPAFLRSALQILFSEDSTKLFVASNQGALHIVQLSGGSFKHLHAFQPQSGTVEAMCLLAVSPDGNWLAASGTSAGVHVYNVKQLKLHCTVPAYNFPVTAMAIAPNTNNLVIAHSDQQVFEYSIPDKQYTDWSRTVQKQGFHHLWLQRDTPITHISFHPKRPMHILLHDAYMFCIIDKSLPLPNDKTLLYNPFPPTNESDVIRRRTAHAFKISKIYKPLLFMDLLDERTLVAVERPLDDIIAQLPPPIKKKKFGT

SEQ ID NO: 42067 - protein, 191 aa, Homo sapiens
ILHVLRQYLDPAQRGVRVLEVASGSGQHAAHFARAFPLAEWQPSDVDQRCLDSIAATTQAQGLTNVKAPLHLDVTWGWEHWGGILPQSLDLLLCINMAHVSPLRCTEGLFRAAGHLLKPRALLITYGPYAINGKISPQSNVDFDLMLRCRNPEWGLRDTALLEDLGKASGLLLERMVDMPANNKCLIFRKN

SEQ ID NO: 42068 - protein, 61 aa, Homo sapiens
VSKLSPEEVQKNYEHLFKVNDKSVGGSFYLQSKVVRAKERLDEELKIQAQEDREKGQMPHT

SEQ ID NO: 42069 - protein, 309 aa, Homo sapiens
LDRIRPILVLMVDKKLVVVFGGTGAQGGSVARTLLEDGTFKVRVVTRNPRKKAAKELRLQGAEVVQGDQDDQVIMELALNGAYATFIVTNYWESCSQEQEVKQGKLLADLARRLGLHYVVYSGLENIKKLTAGRLAAAHFDGKGEVEEYFRDIGVPMTSVRLPCYFENLLSHFLPQKAPDGKSYLLSLPTGDVPMDGMSVSDLGPVVLSLLKMPEKYVGQNIGLSTCRHTAEEYAALLTKHTRKVVHDAKMTPEDYEKLGFPGARDLANMFRFYALRPDRDIELTLRLNPKALTLDQWLEQHKGDFNLL

SEQ ID NO: 42070 - protein, 10 aa, Homo sapiens
MMITLLMFLL

SEQ ID NO: 42071 - protein, 127 aa, Homo sapiens
MSSGIFVTPTGVLKEAGSPGLALVVWAACGVFSIVGALCYAELGTTISKSGGDYAYMLDVYGSLPAFLKLWIELLIIRPSSQYIVALVFATYLLKPLFPTCPVPEEAAKLVACHSVQLIVHQPTQVI

SEQ ID NO: 42072 - protein, 163 aa, Homo sapiens
LDPSMTIHCDMVITYGLDQLENCQTCGTNYIISVLNLLTLIVEQINTKLPSSFVEKLFIPSSKLLFLRYHKEKEVVAVAHAVYQAMLSLKNIPVLETAYKLILGEMTCALNNLLHSLQLPEACSEIKHEAFKNHVFNVDNAKFVVKFDLSALTTTGNAKNSSL

SEQ ID NO: 42073 - protein, 163 aa, Homo sapiens
LDPSMTIHCDMVITYGLDQLENCQTCGTNYIISVLNLLTLIVEQINTKLPSSFVEKLFIPSSKLLFLRYHKEKEVVAVAHAVYQAMLSLKNIPVLETAYKLILGEMTCALNNLLHSLQLPEACSEIKHEAFKNHVFNVDNAKFVVKFDLSALTTIGNAKNSSL

SEQ ID NO: 42074 - protein, 20 aa, Homo sapiens
LDSLLSALSLNEESLGNRRI

SEQ ID NO: 42075 - protein, 23 aa, Homo sapiens
ILPTLVIKLLAPLGLHLLPYRSG

SEQ ID NO: 42076 - protein, 27 aa, Homo sapiens
LLWYIVPLVVVYFAEYFINQGLVSEGC

SEQ ID NO: 42077 - protein, 17 aa, Homo sapiens
VLKVTKAAGTKKQFQKF

SEQ ID NO: 42078 - protein, 493 aa, Homo sapiens
KMAPVGVEKKLLLGPNGPAVAAAGDLTSEEEEGQSLWSSILSEVSTRARSKLPSGKNILVFGEDGSGKTTLMTKLQGAEHGKKGRGLEYLYLSVHDEDRDDHTRCNVWILDGDLYHKGLLKFAVSAESLPETLVIFVADMSRPWTVMESLQKWASVLREHIDKMKIPPEKMRELERKFVKDFQDYMEPEEGCQGSPQRRGPLTSGSDEENVALPLGDNVLTHNLGIPVLVVCTKCDAVSVLEKEHDYRDEHLDFIQSHLRRFCLQYGAALIYTSVKEEKNLDLLYKYIVHKTYGFHFTTPALVVEKDAVFIPAGWDNEKKIAILHENFTTVKPEDAYEDFIVKPPVRKLVHDKELAAEDEQVFLMKQQSLLAKQPATPTRASESPARGPSGSPRTQGRGGPASVPSSSPGTSVKKPDPNIKNNAASEGVLASFFNSLLSKKTGSPGSPGAGGVQSTAKKSGQKTVLSNVQEELDRMTRKPDSMVTNSSTENEA

SEQ ID NO: 42079 - protein, 17 aa, Homo sapiens
LLPPPPELLVSFEVSGR

SEQ ID NO: 42080 - protein, 972 aa, Homo sapiens
VTFKMDSTLTASEIRQRFIDFFKRNEHTYVHSSATIPLDDPTLLFANAGMNQFKPIFLNTIDPSHPMAKLSRAANTQKCIRAGGKHNDLDDVGKDVYHHTFFEMLGSWSFGDYFKELACKMALELLTQEFGIPIERLYVTYFGGDEAAGLEADLECKQIWQNLGLDDTKILPGNMKDNFWEMGDTGPCGPCSEIHYDRIGGRDAAHLVNQDDPNVLEIWNLVFIQYNREADGILKPLPKKSIDTGMGLERLVSVLQNKMSNYDTDLFVPYFEAIQKGTGARPYTGKVGAEDADGIDMAYRVLADHARTITVALADGGRPDNTGRGYVLRRILRRAVRYAHEKLNASRGFFATLVDVVVQSLGDAFPELKKDPDMVKDIINEEEVQFLKTLSRGRRILDRKIQSLGDSKTIPGDTAWLLYDTYGFPVDLTGLIAEEKGLVVDMDGFEEERKLAQLKSQGKGAGGEDLIMLDIYAIEELRARGLEVTDDSPKYNYHLDSSGSYVFENTVATVMALRREKMFVEEVSTGQECGVVLDKTCFYAEQGGQIYDEGYLVKVDDSSEDKTEFTVKNAQVRGGYVLHIGTIYGDLKVGDQVWLFIDEPRRRPIMSNHTATHILNFALRSVLGEADQKGSLVAPDRLRFDFTAKGAMSTQQIKKAEEIANEMIEAAKAVYTQDCPLAAAKAIQGLRAVFDETYPDPVRVVSIGVPVSELLDDPSGPAGSLTSVEFCGGTHLRNSSHAGAFVIVTEEAIAKGIRRIVAVTGAEAQKALRKAESLKKCLSVMEAKVKAQTAPNKDVQREIADLGEALATAVIPQWQKDELRETLKSLKKVMDDLDRASKADVQKRVLEKTKQFIDSNPNQPLVILEMESGASAKALNEALKLFKMHSPQTSAMLFTVDNEAGKITCLCQVPQNAANRGLKASEWVQQVSGLMDGKGGGKDVSAQATGKNVGCLQEALQLATSFAQLRLGDVKN

SEQ ID NO: 42081 - protein, 13 aa, Homo sapiens
MWKRMGVWLMHMA

SEQ ID NO: 42082 - protein, 10 aa, Homo sapiens
LVIVMMLIGS

SEQ ID NO: 42083 - protein, 145 aa, Homo sapiens [sequence omitted]

SEQ ID NO: 42084 - protein, 89 aa, Homo sapiens
LVFLFFFSLMGLLSSHLTSNSTTDLPKAFHVCAAILECLEKRKISWLALFQLTESGKKHAAEAQMRRAALFRGILQMVKNEPSLRFLAK

SEQ ID NO: 42085 - protein, 240 aa, Homo sapiens
KMAATLLAARGAGPAPAWGPEAFTPDWESREVSTGTTIMAVQFDGGVVLGADSRTTTGSYIANRVTDKLTPIHDRIFCCRSGSAADTQAVADAVTYQLGFHSIELNEPPLVHTAASLFKEMCYRYREDLMAGIIIAGWDPQEGGQVYSVPMGGMMVRQSFAIGGSGSSYIYGYVDATYREGMTKEECLQFTANALALAMERDGSSGGVIRLAAIAESGVERQVLLGDQIPKFAVATLPPA

SEQ ID NO: 42086 - protein, 37 aa, Homo sapiens
KVLTLISTIGWFTMTSSETLSTGQKLRRPFLGGRWEP

SEQ ID NO: 42087 - protein, 31 aa, Homo sapiens
RNRSREARKDRTPPPRFRPAGAAPCLPPKPM

SEQ ID NO: 42088 - protein, 64 aa, Homo sapiens
VQPIKLARVTKVLGRTGSQGQCTQVRVEFMDDTSRSIIRNVKGPVREGDVLTLLESEREARRLR

SEQ ID NO: 42089 - protein, 1381 aa, Homo sapiens
KMASGRDERPPWRLGRLLLLMCLLLLGSSARAAHIKKAEATTTTTSAGAEAAEGQFDRYYHEEELESALREAAAAGLPGLARLFSIGRSVEGRPLWVLRLTAGLGSLIPEGDAGPDAAGPDAAGPLLPGRPQVKLVGNMHGDETVSRQVLIYLARELAAGYRRGDPRLVRLLNTTDVYLLPSLNPDGFERAREGDCGFGDGGPSGASGRDNSRGRDLNRSFPDQFSTGEPPALDEVPEVRALIEWIRRNKFVLSGNLHGGSVVASYPFDDSPEHKATGIYSKTSDDEVFKYLAKAYASNHPIMKTGEPHCPGDEDETFKDGITNGAHWYDVEGGMQDYNYVWANCFEITLELSCCKYPPASQLRQEWENNRESLITLIEKVHIGVKGFVKDSITGSGLENATISVAGINHNITTGRFGDFYRLLVPGTYNLTVVLTGYMPLTVTNVVVKEGPATEVDFSLRPTVTSVIPDTTEAVSTASTVAIPNILSGTSSSYQPIQPKDFHHHHFPDMEIFLRRFANEYPNITRLYSLGKSVESRELYVMEISDNPGVHEPGEPEFKYIGNMHGNEVVGRELLLNLIEYLCKNFGTDPEVTDLVHNTRIHLMPSMNPDGYEKSQEGDSISVIGRNNSNNFDLNRNFPDQFVQITDPTQPETIAVMSWMKSYPFVLSANLHGGSLVVNYPFDDDEQGLATYSKSPDDAVFQQIALSYSKENSQMFQGRPCKNMYPNEYFPHGITNGASWYNVPGGMQDWNYLQTNCFEVTIELGCVKYPLEKELPNFWEQNRRSLIQFMKQVHQGVRGFVLDATDGRGILNATISVAEINHPVTTYKTGDYWRLLVPGTYKITASARGYNPVTKNVTVKSEGAIQVNFTLVRSSTDSNNESKKGKGASSSTNDASDPTTKEFETLIKDLSAENGLESLMLRSSSNLALALYRYHSYKDLSEFLRGLVMNYPHITNLTNLGQSTEYRHIWSLEISNKPNVSEPEEPKIRFVAGIHGNAPVGTELLLALAEFLCLNYKKNPAVTQLVDRTRIVIVPSLNPDGRERAQEKDCTSKIGQTNARGKDLDTDFTNNASQPETKAIIENLIQKQDFSLSVALDGGSMLVTYPYDKPVQTVENKETLKHLASLYANNHPSMHMGQPSCPNKSDENIPGGVMRGAEWHSHLGSMKDYSVTYGHCPEITVYTSCCYFPSAARLPSLWADNKRSLLSMLVEVHKGVHGFVKDKTGKPISKAVIVLNEGIKVQTKEGGYFHVLLAPGVHNIIAIADGYQQQHSQVFVHHDAASSVVIVFDTDNRIFGLPRELVVTVSGATMSALILTACIIWCICSIKSNRHKDGFHRLRQHHDEYEDEIRMMSTGSKKSLLSHEFQDETDTEEETLYSSKH

SEQ ID NO: 42090 - protein, 29 aa, Homo sapiens
LHSPSEIVKQITSISIEPGVEVEVTIADA

SEQ ID NO: 42091 - protein, 21 aa, Homo sapiens
MASRVLPFPLILFFRFQTTVL

SEQ ID NO: 42092 - protein, 100 aa, Homo sapiens
LAQWFPRTPARSVVALKTPIKVELVAGKTYRWCVCGRSKKQPFCDGSHFFQRTGLSPLKFKAQETRMVALCTCKATQRPPYCDGTHRSERVQKAEVGSPL

SEQ ID NO: 42093 - protein, 704 aa, Homo sapiens
KMADRRRQRASQDTEDEESGASGSDSGGSPLRGGGSCSGSAGGGGSGSLPSQRGGRTGALHLRRVESGGAKSAEESECESEDGIEGDAVLSDYESAEDSEGEEGEYSEEENSKVELKSEANDAVNSSTKEEKGEEKPDTKSTVTGERQSGDGQESTEPVENKVGKKGPKHLDDDEDRKNPAYIPRKGLFFEHDLRGQTQEEEVRPKGRQRKLWKDEGRWEHDKFREDEQAPKSRQELIALYGYDIRSAHNPDDIKPRRIRKPRYGSPPQRDPNWNGERLNKSHRHQGLGGTLPPRTFINRNAAGTGRMSAPRNYSRSGGFKEGRAGFRPVEAGGQHGGRSGETVKHEISYRSRRLEQTSVRDPSPEADAPVLGSPEKEEAASEPPAAAPDAAPPPPDRPIEKKSYSRARRTRTKVGDAVKLAEEVPPPPEGLIPAPPVPETTPTPPTKTGTWEAPVDSSTSGLEQDVAQLNIAEQNWSPGQPSFLQPRELRGMPNHIHMGAGPPPQFNRMEEMGVQGGRAKRYSSQRQRPVPEPPAPPVHISIMEGHYYDPLQFQGPIYTHGDSPAPLPPQGMLVQPGMNLPHPGLHPHQTPAPLPNPGLYPPPVSMSPGQPPPQQLLAPTYFSAPGVMNFGNPSYPYAPGALPPPPPPHLYPNTQAPSQVYGGVTYYNPAQQQVQPKPSPPRRTPQPVTIKPPPPEVVSRGSS

SEQ ID NO: 42094 - protein, 25 aa, Homo sapiens
IFTSVGTLVIFLDATYHLPPPDPFP

SEQ ID NO: 42095 - protein, 15 aa, Homo sapiens
RVMTCFLLALRIISI

SEQ ID NO: 42096 - protein, 9 aa, Homo sapiens
LGIFGFTDF

SEQ ID NO: 42097 - protein, 646 aa, Homo sapiens
RIGTDTEAATEPAGATVPAAAAAARIGTVGPQPPAMPRRKRNAGSSSDGTEDSDFSTDLEHTDSSESDGTSRRSARVTRSSARLSQSSQDSSPVRNLQSFGTEEPAYSTRRVTRSQQQPTPVTPKKYPLRQTRSSGSETEQVVDFSDRETKNTADHDESPPRTPTGNAPSSESDIDISSPNVSHDESIAKDMSLKDSGSDLSHRPKRRRFHESYNFNMKCPTPGCNSLGHLTGKHERHFSISGCPLYHNLSADECKVRAQSRDKQIEERMLSHRQDDNNRHATRHQAPTERQLRYKEKVAELRKKRNSGLSKEQKEKYMEHRQTYGNTREPLLENLTSEYDLDLFRRAQARASEDLEKLRLQGQITEGSNMIKTIAFGRYELDTWYHSPYPEEYARLGRLYMCEFCLKYMKSQTILRRHMAKCVWKHPPGDEIYRKGSISVFEVDGKKNKIYCQNLCLLAKLFLDHKTLYYDVEPFLFYVMTEADNTGCHLIGYFSKEKNSFLNYNVSCILTMPQYMRQGYGKMLIDFSYLLSKVEEKVGSPERPLSDLGLISYRSYWKEVLLRYLHNFQGKEISIKEISQETAVNPVDIVSTLQALQMLKYWKGKHLVLKRQDLIDEWIAKEAKRSNSNKTMDPSCLKWTPPKGT

SEQ ID NO: 42098 - protein, 9 aa, Homo sapiens
MFPSNGLLV

SEQ ID NO: 42099 - protein, 901 aa, Homo sapiens
IPSSSRRPKGRAVVLGGVAAAATSAMELITILEKTVSPDRLELEAAQKFLERAAVENLPTFLVELSRVLANPGNSQVARVAAGLQIKNSLTSKDPDIKAQYQQRWLAIDANARREVKNYVLQTLGTETYRPSSASQCVAGIACAEIPVNQWPELIPQLVANVTNPNSTEHMKESTLEAIGYICQDIDPEQLQDKSNEILTAIIQGMRKEEPSNNVKLAATNALLNSLEFTKANFDKESERHFIMQVVCEATQCPDTRVRVAALQNLVKIMSLYYQYMETYMGPALFAITIEAMKSDIDEVALQGIEFWSNVCDEEMDLAIEASEAAEQGRPPEHTSKFYAKGALQYLVPILTQTLTKQDENDDDDDWNPCKAAGVCLMLLATCCEDDIVPHVLPFIKEHIKNPDWRYRDAAVMAFGCILEGPEPSQLKPLVIQAMPTLIELMKDPSVVVRDTAAWTVGRICELLPEAAINDVYLAPLLQCLIEGLSAEPRVASNVCWAFSSLAEAAYEAADVADDQEEPATYCLSSSFELIVQKLLETTDRPDGHQNNLRSSAYESLMEIVKNSAKDCYPAVQKTTLVIMERLQQVLQMESHIQSTSDRIQFNDLQSLLCATLQNVLRKVQHQDALQISDVVMASLLRMFQSTAGSGGVQEDALMAVSTLVEVLGGEFLKYMEAFKPFLGIGLKNYAEYQVCLAAVGLVGDLCRALQSNIIPFCDEVMQLLLENLGNENVHRSVKPQILSVFGDIALAIGGEFKKYLEVVLNTLQQASQAQVDKSDYDMVDYLNELRESCLEAYTGIVQGLKGDQENVHPDVMLVQPRVEFILSFIDHIAGDEDHTDGVVACAAGLIGDLCTAFGKDVLKLVEARPMIHELLTEGRRSKTNKAKTLATWATKELRKLKNQA

SEQ ID NO: 42100 - protein, 941 aa, Homo sapiens
IGTMNWNKGGPGTKRGFGFGGFAISAGKKEEPKLPQQSHSAFGATSSSSGFGKSAPPQLPSFYKIGSKRANFDEENAYFEDEEEDSSNVDLPYIPAENSPTRQQFHSKPVDSDSDDDPLEAFMAEVEDQAARDMKRLEEKDKERKNVKGIRDDIEEEDDQEAYFRYMAENPTAGVVQEEEEDNLEYDSDGNPIAPTKKIIDPLPPIDHSEIDYPPFEKNFYNEHEEITNLTPQQLIDLRHKLNLRVSGAAPPRPGSSFAHFGFDEQLMHQIRKSEYTQPTPIQCQGVPVALSGRDMIGIAKTGSGKTAAFIWPMLIHIMDQKELEPGDGPIAVIVCPTRELCQQIHAECKRFGKAYNLRSVAVYGGGSMWEQAKALQEGAEIVVCTPGRLIDHVKKKATNLQRVSYLVFDEADRMFDMGFEYQVRSIASHVRPDRQTLLFSATFRKKIEKLARDILIDPIRVVQGDIGEANEDVTQIVEILHSGPSKWNWLTRRLVEFTSSGSVLLFVTKKANAEELANNLKQEGHNLGLLHGDMDQSERNKVISDFKKKDIPVLVATDVAARGLDIPSIKTVINYDVARDIDTHTHRIGRTGRAGEKGVAYTLLTPKDSNFAGDLVRNLEGANQHVSKELLDLAMQNAWFRKSRFKGGKGKKLNIGGGGLGYRERPGLGSENMDRGNNNVMSNYEAYKPSTGAMGDRLTAMKAAFQSQYKSHFVAASLSNQKAGSSAAGASGWTSAGSLNSVPTNSAQQGHNSPDSPVTSAAKGIPGFGNTGNISGAPVTYPSAGAQGVNNTASGNNSREGTGGSNGKRERYTENRGSSRHSHGETGNRHSDSPRHGDGGRHGDGYRHPESSSRHTDGHRHGENRHGGSAGRHGENRGANDGRNGESRKEAFNRESKMEPKMEPKVDSSKMDKVDSKTDKTADGFAVPEPPKRKKSRWDS

SEQ ID NO: 42101 - protein, 156 aa, Homo sapiens
LEGTMANCERTFIAIKPDGVQRGLVGEIIKRFEQKGFRLVGLKFMQASEDLLKEHYVDLKDRPFFAGLVKYMHSGPVVAMVWEGLNVVKTGRVMLGETNPADSKPGTIRGDFCIQVGRNIIHGSDSVESAEKEIGLWFHPEELVDYTSCAQNWIYE

SEQ ID NO: 42102 - protein, 38 aa, Homo sapiens
RLECVEPNCRSKRMLAIKRCKHFELGGDKKRKGQVIQF

SEQ ID NO: 42103 - protein, 55 aa, Homo sapiens
LLQYLPPGVIALVNFLGPLLFTFLVQLENYPPNTEVNLTLIWRRRKGGARLQSGS

SEQ ID NO: 42104 - protein, 16 aa, Homo sapiens
KMAAEGDPEWGPSNSD

SEQ ID NO: 42105 - protein, 1681 aa, Homo sapiens
ITPDSAMAQILPIRFQEHLQLQNLGINPANIGFSTLTMESDKFICIREKVGEQAQVVIIDMNDPSNPIRRPISADSAIMNPASKVIALKAGKTLQIFNIEMKSKMKAHTMTDDVTFWKWISLNTVALVTDNAVYHWSMEGESQPVKMFDRHSSLAGCQIINYRTDAKQKWLLLTGISAQQNRVVGAMQLYSVDRKVSQPIEGHAASFAQFKMEGNAEESTLFCFAVRGQAGGKLHIIEVGTPPTGNQPFPKKAVDVFFPPEAQNDFPVAMQISEKHDVVFLITKYGYIHLYDLETGTCIYMNRISGETIFVTAPHEATAGIIGVNRKGQVLSVCVEEENIIPYITNVLQNPDLALRMAVRNNLAGAEELFARKFNALFAQGNYSEAAKVAANAPKGILRTPDTIRRFQSVPAQPGQTSPLLQYFGILLDQGQLNKYESLELCRPVLQQGRKQLLEKWLKEDKLECSEELGDLVKSVDPTLALSVYLRANVPNKVIQCFAETGQVQKIVLYAKKVGYTPDWIFLLRNVMRISPDQGQQFAQMLVQDEEPLADITQIVDVFMEYNLIQQCTAFLLDALKNNRPSEGPLQTRLLEMNLMHAPQVADAILGNQMFTHYDRAHIAQLCEKAGLLQRALEHFTDLYDIKRAVVHTHLLNPEWLVNYFGSLSVEDSLECLRAMLSANIRQNLQICVQVASKYHEQLSTQSLIELFESFKSFEGLFYFLGSIVNFSQDPDVHFKYIQAACKTGQIKEVERICRESNCYDPERVKNFLKEAKLTDQLPLIIVCDRFDFVHDLVLYLYRNNLQKYIEIYVQKVNPSRLPVVIGGLLDVDCSEDVIKNLILVVRGQFSTDELVAEVEKRNRLKLLLPWLEARIHEGCEEPATHNALAKIYIDSNNNPERFLRENPYYDSRVVGKYCEKRDPHLACVAYERGQCDLELINVCNENSLFKSLSRYLVRRKDPELWGSVLLESNPYRRPLIDQVVQTALSETQDPEEVSVTVKAFMTADLPNELIELLEKIVLDNSVFSEHRNLQNLLILTAIKADRTRVMEYINRLDNYDAPDIANIAISNELFEEAFAIFRKFDVNTSAVQVLIEHIGNLDRAYEFAERCNEPAVWSQLAKAQLQKGMVKEAIDSYIKADDPSSYMEVVQAANTSGNWEELVKYLQMARKKARESYVETELIFALAKTNRLAELEEFINGPNNAHIQQVGDRCYDEKMYDAAKLLYNNVSNFGRLASTLVHLGEYQAAVDGARKANSTRTWKEVCFACVDGKEFRLAQMCGLHIVVHADELEELINYYQDRGYFEELITMLEAALGLERAHMGMFTELAILYSKFKPQKMREHLELFWSRVNIPKVLRAAEQAHLWAELVFLYDKYEEYDNAIITMMNHPTDAWKEGQFKDIITKVANVELYYRAIQFYLEFKPLLLNDLLMVLSPRLDHTRAVNYFSKVKQLPLVKPYLRSVQNHNNKSVNESLNNLFITEEDYQALRTSIDAYDNFDNISLAQRLEKHELIEFRRIAAYLFKGNNRWKQSVELCKKDSLYKDAMQYASESKDTELAEELLQWFLQEEKRECFGACLFTCYDLLRPDVVLETAWRHNIMDFAMPYFIQVMKEYLTKVDKLDASESLRKEEEQATETQPIVYGQPQLMLTAGPSVAVPPQAPFGYGYTAPPYGQPQPGFGYSM

SEQ ID NO: 42106 - protein, 16 aa, Homo sapiens
RRMWGDRALSLMVLIF

SEQ ID NO: 42107 - protein, 41 aa, Homo sapiens
LAAWFVQRVAVMALVSGLHGVHLESGARLCVQFGSVTKRCN

SEQ ID NO: 42108 - protein, 4 aa, Homo sapiens
MNLG

SEQ ID NO: 42109 - protein, 293 aa, Homo sapiens
LHLHVFAVVSAMLPLLRCVPRVLGSSVAGLRAAAPASPFRQLLQPAPRLCTRPFGLLSVRAGSERRPGLLRPRGPCACGCGCGSLHTDGDKAFVDFLSDEIKEERKIQKHKTLPKMSGGWELELNGTEAKLVRKVAGEKITVTFNINNSIPPTFDGEEEPSQGQKVEEQEPELTSTPNFVVEVIKNDDGKKALVLDCHYPEDEVGQEDEAESDIFSIREVSFQSTGESEWKDTNYTLNTDSLDWALYDHLMDFLADRGVDNTFADELVELSTALEHQEYITFLEDLKSFVKSQ

SEQ ID NO: 42110 - protein, 49 aa, Homo sapiens
LGWFFICCFLKSRAAGPEMDGGTGDLGTRKRAEGREPVEIDWSLGSVVS

SEQ ID NO: 42111 - protein, 1981 aa, Homo sapiens
IVPFTMAQRTGLEDPERYLFVDRAVIYNPATQADWTAKKLVWIPSERHGFEAASIKEERGDEVMVELAENGKKAMVNKDDIQKMNPPKFSKVEDMAELTCLNEASVLHNLKDRYYSGLIYTYSGLFCVVINPYKNLPIYSENIIEMYRGKKRHEMPPHIYAISESAYRCMLQDREDQSILCTGESGAGKTENTKKVIQYLAHVASSHKGRKDHNIPGELERQLLQANPILESFGNAKTVKNDNSSRFGKFIRINFDVTGYIVGANIETYLLEKSRAVRQAKDERTFHIFYQLLSGAGEHLKSDLLLEGFNNYRFLSNGYIPIPGQQDKDNFQETMEAMHIMGFSHEEILSMLKVVSSVLQFGNISFKKERNTDQASMPENTVAQKLCHLLGMNVMEFTRAILTPRIKVGRDYVQKAQTKEQADFAVEALAKATYERLFRWLVHRINKALDRTKRQGASFIGILDIAGFEIFELNSFEQLCINYTNEKLQQLFNHTMFILEQEEYQREGIEWNFIDFGLDLQPCIDLIERPANPPGVLALLDEECWFPKATDKTFVEKLVQEQGSHSKFQKPRQLKDKADFCIIHYAGKVDYKADEWLMKNMDPLNDNVATLLHQSSDRFVAELWKDVDRIVGLDQVTGMTETAFGSAYKTKKGMFRTVGQLYKESLTKLMATLRNTNPNFVRCIIPNHEKRAGKLDPHLVLDQLRCNGVLEGIRICRQGFPNRIVFQEFRQRYEILTPNAIPKGFMDGKQACERMIRALELDPNLYRIGQSKIFFRAGVLAHLEEERDLKITDIIIFFQAVCRGYLARKAFAKKQQQLSALKVLQRNCAAYLKLRHWQWWRVFTKVKPLLQVTRQEEELQAKDEELLKVKEKQTKVEGELEEMERKHQQLLEEKNILAEQLQAETELFAEAEEMRARLAAKKQELEEILHDLESRVEEEEERNQILQNEKKKMQAHIQDLEEQLDEEEGARQKLQLEKVTAEAKIKKMEEEILLLEDQNSKFIKEKKLMEDRIAECSSQLAEEEEKAKNLAKIRNKQEVMISDLEERLKKEEKTRQELEKAKRKLDGETTDLQDQIAELQAQIDELKLQLAKKEEELQGALARGDDETLHKNNALKVVRELQAQIAELQEDFESEKASRNKAEKQKRDLSEELEALKTELEDTLDTTAAQQELRTKREQEVAELKKALEEETKNHEAQIQDMRQRHATALEELSEQLEQAKRFKANLEKNKQGLETDNKELACEVKVLQQVKAESEHKRKKLDAQVQELHAKVSEGDRLRVELAEKASKLQNELDNVSTLLEEAEKKGIKFAKDAASLESQLQDTQELLQEETRQKLNLSSRIRQLEEEKNSLQEQQEEEEEARKNLEKQVLALQSQLADTKKKVDDDLGTIESLEEAKKKLLKDAEALSQRLEEKALAYDKLEKTKNRLQQELDDLTVDLDHQRQVASNLEKKQKKFDQLLAEEKSISARYAEERDRAEAEAREKETKALSLARALEEALEAKEEFERQNKQLRADMEDLMSSKDDVGKNVHELEKSKRALEQQVEEMRTQLEELEDELQATEDAKLRLEVNMQAMKAQFERDLQTRDEQNEEKKRLLIKQVRELEAELEDERKQRALAVASKKKMEIDLKDLEAQIEAANKARDEVIKQLRKLQAQMKDYQRELEEARASRDEIFAQSKESEKKLKSLEAEILQLQEELASSERARRHAEQERDELADEITNSASGKSALLDEKRRLEARIAQLEEELEEEQSNMELLNDRFRKTTLQVDTLNAELAAERSAAQKSDNARQQLERQNKELKAKLQELEGAVKSKFKATISALEAKIGQLEEQLEQEAKERAAANKLVRRTEKKLKEIFMQVEDERRHADQYKEQMEKANARMKQLKRQLEEAEEEATRANASRRKLQRELDDATEANEGLSREVSTLKNRLRRGGPISFSSSRSGRRQLHLEGASLELSDDDTESKTSDVNETQPPQSE

SEQ ID NO: 42112 - protein, 134 aa, Homo sapiens
LSCDFWAVKNVTGRLMVGLRWWNHIDEDGKSHWVFESRKESSQENKTVSEAESRIFWLGLIACSVLWVIFAFSALFSFTVKWLAVVIMGVVLQGANLYGYIRCKVRSRKHLTSMATSYFGKQFLRQNTGDDQTS

SEQ ID NO: 42113 - protein, 33 aa, Homo sapiens
VLVALTYIVALLYEEPFTAEIYRQKASGSHKRS

SEQ ID NO: 42114 - protein, 127 aa, Homo sapiens
LGEAGLHFDELNKLRVLDPEVTQQTIELKEECKDFVDKIGQFQKIVGGLIELVDQLAKEAENEKMKAIGARNLLKSIAKQREAQQQQLQALIAEKKMQLERYRVEYEALCKVEAEQNEFIDQFIFQK

SEQ ID NO: 42115 - protein, 38 aa, Homo sapiens
IIISTTTATTTTTTIITSSLTNTCSMEPRAAPRPSQSR

SEQ ID NO: 42116 - protein, 235 aa, Homo sapiens
LHSTSPHPHALWTTTAGRAMAGRGGAARPNGPAAGNKICQFKLVLLGESAVGKSSLVLRFVKGQFHEYQESTIGAAFLTQTVCLDDTTVKFEIWDTAGQERYHSLAPMYYRGAQAAIVVYDITNTDTFARAKNWVKELQRQASPNIVIALAGNKADLASKRAVEFQEAQAYADDNSLLFMETSAKTAMNVNEIFMAIAKKLPKNEPQNATGAPGRNRGVDLQENNPASRSQCCSN

SEQ ID NO: 42117 - protein, 26 aa, Homo sapiens
LLKLPDLRTLNNMHSEKLLSFRVDAQ

SEQ ID NO: 42118 - protein, 769 aa, Homo sapiens
LDSWRMNGEADCPTDLEMAAPKGQDRWSQEDMLTLLECMKNNLPSNDSSKFKTTESHMDWEKVAFKDFSGDMCKLKWVEISNEVRKFRTLTELILDAQEHVKNPYKGKKLKKHPDFPKKPLTPYFRFFMEKRAKYAKLHPEMSNLDLTKILSKKYKELPEKKKMKYIQDFQREKQEFERNLARFREDHPDLIQNAKKSDIPEKPKTPQQLWYTHEKKVYLKVRPDATTKEVKDSLGKQWSQLSDKKRLKWIHKALEQRKEYEEIMRDYIQKHPELNISEEGITKSTLTKAERQLKDKFDGRPTKPPPNSYSLYCAELMANMKDVPSTERMVLCSQQWKLLSQKEKDAYHKKCDQKKKDYEVELLRFLESLPEEEQQRVLGEEKMLNINKKQATSPASKKPAQEGGKGGSEKPKRPVSAMFIFSEEKRRQLQEERPELSESELTRLLARMWNDLSEKKKAKYKAREAALKAQSERKPGGEREERGKLPESPKRAEEIWQQSVIGDYLARFKNDRVKALKAMEMTWNNMEKKEKLMWIKKAAEDQKRYERELSEMRAPPAATNSSKKMKFQGEPKKPPMNGYQKFSQELLSNGELNHLPLKERMVEIGSRWQRISQSQKEHYKKLAEEQQKQYKVHLDLWVKSLSPQDRAAYKEYISNKRKSMTKLRGPNPKSSRTTLQSKSESEEDDEEDEDDEDEDEEEEDDENGDSSEDGGDSSESSSEDESEDGDENEEDDEDEDDDEDDDEDEDNESEGSSSSSSSSGDSSDSDSN

SEQ ID NO: 42119 - protein, 133 aa, Homo sapiens
IFVPVPQLKSFQKIQVRLVRELEKKFSGKHVVFIAQRRILPKPTRKSRTKNKQKCPRSRTLTAVHDAFLEDLVFPSEIVGKRIPVKLDSSRLIKVHLDKAQQNNVEHKVETFSGVYKKLTGKDVNFEFPEFQL

SEQ ID NO: 42120 - skipped

SEQ ID NO: 42121 - protein, 239 aa, Homo sapiens
VRDATAATRLAAFLGATPPGDPTRRASSAAPIPLGLLGAALSSVTLYTRKLAGTMGKKQNKKKVEEVLEEEEEEYVVEKVLDRRVVKGKVEYLLKWKGFSDEDNTWEPEENLDCPDLIAEFLQSQKTAHETDKSEGGKRKADSDSEDKGEESKPKKKKEESEKPRGFARGLEPERIIGATDSSGELMFLMKWKNSDEADLVPAKEANVKCPQVVISFYEERLTWHSYPSEDDDKKDDKN

SEQ ID NO: 42122 - protein, 28 aa, Homo sapiens
MEVRSFLWLALDPPWVSNQGCREGRAVS

SEQ ID NO: 42123 - protein, 191 aa, Homo sapiens
IMAGSRLETVGSIFSRTRDLVRAGVLKEKPLWFDVYDAFPPLREPVFQRPRVRYGKAKAPIQDIWYHEDRIRAKFYSVYGSGQRAFDLFNPNFKSTCQRFVEKYTELQKLGETDEEKLFVETGKALLAEGVILRRVGEARTQHGGSHVSRKSEHLSVRPQTALEENETQKEVPQDQHLEAPADQSKGLLPP

SEQ ID NO: 42124 - protein, 424 aa, Homo sapiens
LVPSLPGRARAAAALPALEPRCRSRPPPEEEVEGAGGARRGGGGGGKMADFLPSRSVLSVCFPGCLLTSGEAEQQRKSKEIDKCLSREKTYVKRLVKILLLGAGESGKSTFLKQMRIIHGQDFDQRAREEFRPTIYSNVIKGMRVLVDAREKLHIPWGDNSNQQHGDKMMSFDTRAPMAAQGMVETRVFLQYLPAIRALWADSGIQNAYDRRREFQLGESVKYFLDNLDKLGEPDYIPSQQDILLARRPTKGIHEYDFEIKNVPFKMVDVGGQRSERKRWFECFDSVTSILFLVSSSEFDQVLMEDRLTNRLTESLNIFETIVNNRVFSNVSIILFLNKTDLLEEKVQIVSIKDYFLEFEGDPHCLRDVQKFLVECFRNKRRDQQQKPLYHHFTTAINTENIRLVFRDVKDTILHDNLKQLMLQ

SEQ ID NO: 42125 - protein, 664 aa, Homo sapiens
LVVAMNPDLRRERDSASFNPELLTHILDGSPEKTRRRREIENMILNDPDFQHEDLNFLTRSQRYEVAVRKSAIMVKKMREFGIADPDEIMWFKNFVHRGRPEPLDLHLGMFLPTLLHQATAEQQERFFMPAWNLEIIGTYAQTEMGHGTHLRGLETTATYDPETQEFILNSPTVTSIKWWPGGLGKTSNHAIVLAQLITKGKCYGLHAFIVPIREIGTHKPLPGITVGDIGPKFGYDEIDNGYLKMDNHRIPRENMLMKYAQVKPDGTYVKPLSNKLTYGTMVFVRSFLVGEAARALSKACTIAIRYSAVRHQSEIKPGEPEPQILDFQTQQYKLFPLLATAYAFQFVGAYMKETYHRINEGIGQGDLSELPELHALTAGLKAFTSWTANTGIEACRMACGGHGYSHCSGLPNIYVNFTPSCTFEGENTVMMLQTARFLMKSYDQVHSGKLVCGMVSYLNDLPSQRIQPQQVAVWPTMVDINSPESLTEAYKLRAARLVEIAAKNLQKEVIHRKSKEVAWNLTSVDLVRASEAHCHYVVVKLFSEKLLKIQDKAIQAVLRSLCLLYSLYGISQNAGDFLQGSIMTEPQITQVNQRVKELLTLIRSDAVALVDAFDFQDVTLGSVLGRYDGNVYENLFEWAKNSPLNKAEVHESYKHLKSLQSKL

SEQ ID NO: 42126 - protein, 422 aa, Homo sapiens
LRRVSQRLPHPNRGLAVGSTQSAAPRGAGRNRAAGRTMPKKLLLLPPPSASSAFRVPRARPVPPPAMNAARTGYRVFSANSTAACTELAKRITERLGAELGKSVVYQETNGETRVEIKESVRGQDIFIIQTIPRDVNTAVMELLIMAYALKTACARNIIGVIPYFPYSKQSKMRKRGSIVCKLLASMLAKAGLTHIITMDLHQKEIQGFFSFPVDNLRASPFLLQYIQEEIPNYRNAVIVAKSPDAAKRAQSYAERLRLGLAVIHGEAQCTELDMDDGRHSPPMVKNATVHPGLELPLMMAKEKPPITVVGDVGGRIAIIVDDIIDDVESFVAAAEILKERGAYKIYVMATHGILSAEAPRLIEESSVDEVVVTNTVPHEVQKLQCPKIKTVDISLILSEAIRRIHNGESMAYLFRNITVDD

SEQ ID NO: 42127 - protein, 587 aa, Homo sapiens
TAMTPPRLFWVWLLVAGTQGVNDGDMRLADGGATNQGRVEIFYRGQWGTVCDNLWDLTDASVVCRALGFENATQALGRAAFGQGSGPIMLDEVQCTGTEASLADCKSLGWLKSNCRHERDAGVVCTNETRSTHTLDLSRELSEALGQIFDSQRGCDLSISVNVQGEDALGFCGHTVILTANLEAQALWKEPGSNVTMSVDAECVPMVRDLLRYFYSRRIDITLSSVKCFHKLASAYGARQLQGYCASLFAILLPQDPSFQMPLDLYAYAVATGDALLEKLCLQFLAWNFEALTQAEAWPSVPTDLLQLLLPRSDLAVPSELALLKAVDTWSWGERASHEEVEGLVEKIRFPMMLPEELFELQFNLSLYWSHEALFQKKTLQALEFHTVPFQLLARYKGLNLTEDTYKPRIYTSPTWSAFVTDSSWSARKSQLVYQSRRGPLVKYSSDYFQAPSDYRYYPYQSFQTPQHPSFLFQDKRVSWSLVYLPTIQSCWNYGFSCSSDELPVLGLTKSGGSDRTIAYENKALMLCEGLFVADVTDFEGWKAAIPSALDTNSSKSTSSFPCPAGHFNGFRTVIRPFYLTNSSGVD

SEQ ID NO: 42128 - protein, 18 aa, Homo sapiens
LRHRHMACDYRFISLAPL

SEQ ID NO: 42129 - protein, 314 aa, Homo sapiens
VEMAAQKINEGLEHLAKAEKYLKTGFLKWKPDYDSAASEYGKAAVAFKNAKQFEQAKDACLREAVAHENNRALFHAAKAYEQAGMMLKEMQKLPEAVQLIEKASMMYLENGTPDTAAMALERAGKLIENVDPEKAVQLYQQTANVFENEERLRQAVELLGKASRLLVRGRRFDEAALSIQKEKNIYKEIENYPTCYKKTIAQVLVHLHRNDYVAAERCVRESYSIPGFNGSEDCAALEQLLEGYDQQDQDQVSDVCNSPLFKYMDNDYAKLGLSLVVPGGGIKKKSPATPQAKPDGVTATAADEEEDEYSGGLC

SEQ ID NO: 42130 - protein, 5 aa, Homo sapiens
VLGFS

SEQ ID NO: 42131 - protein, 284 aa, Homo sapiens
LLPSFLPGPRLVPAGHPTATMFVPCGESAPDLAGFTLLMPAVSVGNVGQLAMDLIISTLNMSKIGYFYTDCLVPMVGNNPYATTEGNSTELSINAEVYSLPSRKLVALQLRSIFIKYKSKPFCEKLLSWVKSSGCARVIVLSSSHSYQRNDLQLRSTPFRYLLTPSMQKSVQNKIKSLNWEEMEKSRCIPEIDDSEFCIRIPGGGITKTLYDESCSKEIQMAVLLKFVSEGDNIPDALGLVEYLNEWLQILKPLSDDPTVSASRWKIPSSWRLLFGSGLPPALF

SEQ ID NO: 42132 - protein, 13 aa, Homo sapiens
VLCWFMKFYHQFK

SEQ ID NO: 42133 - protein, 35 aa, Homo sapiens
TDLFAAFVYVIPIMFLNTWKEEITHTPSQAQNQLY

SEQ ID NO: 42134 - protein, 549 aa, Homo sapiens [sequence omitted]

SEQ ID NO: 42135 - protein, 476 aa, Homo sapiens
KMAALTTLFKYIDENQDRYIKKLAKWVAIQSVSAWPEKRGEIRRMMEVAAADVKQLGGSVELVDIGKQKLPDGSEIPLPPILLGRLGSDPQKKTVCIYGHLDVQPAALEDGWDSEPFTLVERDGKLYGRGSTDDKGPVAGWINALEAYQKTGQEIPVNVRFCLEGMEESGSEGLDELIFARKDTFFKDVDYVCISDNYWLGKKKPCITYGLRGICYFFIEVECSNKDLHSGVYGGSVHEAMTDLILLMGSLVDKRGNILIPGINEAVAAVTEEEHKLYDDIDFDIEEFAKDVGAQILLHSHKKDILMHRWRYPSLSLHGIEGAFSGSGAKTVIPRKVVGKFSIRLVPNMTPEVVGEQVTSYLTKKFAELRSPNEFKVYMGHGGKPWVSDFSHPHYLAGRRAMKTVFGVEPDLTREGGSIPVTLTFQEATGKNVMLLPVGSADDGAHSQNEKLNRYNYIEGTKMLAAYLYEVSQLKD

SEQ ID NO: 42136 - protein, 34 aa, Homo sapiens
ILPIKKKHLFENSRLLQPPKGVLLYEPPQAVVKR

SEQ ID NO: 42137 - protein, 35 aa, Homo sapiens
LKLILKNENVDRHVDLLEVAQETDAFSGRDLNAMC

SEQ ID NO: 42138 - protein, 26 aa, Homo sapiens
ISASLKQALDKLKLSSGNEENKKRRQ

SEQ ID NO: 42139 - protein, 47 aa, Homo sapiens
VEACSLTPEARETTNPPGGMNNSGGADLRAVTLTAKVCSFTFEPARP

SEQ ID NO: 42140 - protein, 1307 aa, Homo sapiens
LKQPGEVEPPPGSPTSRTPPASAALRGHSMTARGLALGLLLLLLCPAQVFSQSCVWYGECGIAYGDKRYNCEYSGPPKPLPKDGYDLVQELCPGFFFGNVSLCCDVRQLQTLKDNLQLPLQFLSRCPSCFYNLLNLFCELTCSPRQSQFLNVTATEDYVDPVTNQTKTNVKELQYYVGQSFANAMYNACRDVEAPSSNDKALGLLCGKDADACNATNWIEYMFNKDNGQAPFTITPVFSDFPVHGMEPMNNATKGCDESVDEVTAPCSCQDCSIVCGPKPQPPPPPAPWTILGLDAMYVIMWITYMAFLLVFFGAFFAVWCYRKRYFVSEYTPIDSNIAFSVNASDKGEASCCDPVSAAFEGCLRRLFTRWGSFCVRNPGCVIFFSLVFITACSSGLVFVRVTTNPVDLWSAPSSQARLEKEYFDQHFGPFFRTEQLIIRAPLTDKHIYQPYPSGADVPFGPPLDIQILHQVLDLQIAIENITASYDNETVTLQDICLAPLSPYNTNCTILSVLNYFQNSHSVLDHKKGDDFFVYADYHTHFLYCVRAPASLNDTSLLHDPCLGTFGGPVFPWLVLGGYDDQNYNNATALVITFPVNNYYNDTEKLQRAQAWEKEFINFVKNYKNPNLTISFTAERSIEDELNRESDSDVFTVVISYAIMFLYISLALGHMKSCRRLLVDSKVSLGIAGILIVLSSVACSLGVFSYIGLPLTLIVIEVIPFLVLAVGVDNIFILVQAYQRDERLQGETLDQQLGRVLGEVAPSMFLSSFSETVAFFLGALSVMPAVHTFSLFAGLAVFIDFLLQITCFVSLLGLDIKRQEKNRLDIFCCVRGAEDGTSVQASESCLFRFFKNSYSPLLLKDWMRPIVIAIFVGVLSFSIAVLNKVDIGLDQSLSMPDDSYMVDYFKSISQYLHAGPPVYFVLEEGHDYTSSKGQNMVCGGMGCNNDSLVQQIFNAAQLDNYTRIGFAPSSWIDDYFDWVKPQSSCCRVDNITDQFCNASVVDPACVRCRPLTPEGKQRPQGGDFMRFLPMFLSDNPNPKCGKGGHAAYSSAVNILLGHGTRVGATYFMTYHTVLQTSADFIDALKKARLIASNVTETMGINGSAYRVFPYSVFYVFYEQYLTIIDDTIFNLGVSLGAIFLVTMVLLGCELWSAVIMCATIAMVLVNMFGVMWLWGISLNAVSLVNLVMSCGISVEFCSHITRAFTVSMKGSRVERAEEALAHMGSSVFSGITLTKFGGIVVLAFAKSQIFQIFYFRMYLAMVLLGATHGLIFLPVLLSYIGPSVNKAKSCATEERYKGTERERLLNF

SEQ ID NO: 42141 - protein, 61 aa, Homo sapiens
KPDTKEKKPEAKKVDAGGKVKKGNLKAKKPKKGKPHCSRNPVLVRGIGRYSRSAMYSRKAM

SEQ ID NO: 42142 - protein, 61 aa, Homo sapiens
VPNWLLLLPVASMAEDWLDCPALGPGWKRREVFRKSGATCGRSDTYYQRYWPHRRQDPKQS

SEQ ID NO: 42143 - protein, 115 aa, Homo sapiens [sequence omitted]

SEQ ID NO: 42144 - protein, 469 aa, Homo sapiens
IPLLHSQLLQLSRASMAAWKSWTALRLCATVVVLDMVVCKGFVEDLDESFKENRNDDIWLVDFYAPWCGHCKKLEPIWNEVGLEMKSIGSPVKVGKMDATSYSSIASEFGVRGYPTIKLLKGDLAYNYRGPRTKDDIIEFAHRVSGALIRPLPSQQMFEHMQKRHRVFFVYVGGESPLKEKYIDAASELIVYTYFFSASEEVVPEYVTLKEMPAVLVFKDETYFVYDEYEDGDLSSWINRERFQNYLAMDGFLLYELGDTGKLVALAVIDEKNTSVEHTRLKSIIQEVARDYRDLFHRDFQFGHMDGNDYINTLLMDELTVPTVVVLNTSNQQYFLLDRQIKNVEDMVQFINNILDGTVEAQGGDSILQRLKRIVFDAKSTIVSIFKSSPLMGCFLFGLPLGVISIMCYGIYTADTDGGYIEERYEVSKSENENQEQIEESKEQQEPSSGGSVVPTVQEPKDVLEKKKD

SEQ ID NO: 42145 - protein, 251 aa, Homo sapiens
LRSRPDPSGGCRLQPALVGETEMSEKENNFPPLPKFIPVKPCFYQNFSDEIPVEHQVLVKRIYRLWMFYCATLGVNLIACLAWWIGGGSGTNFGLAFVWLLLFTPCGYVCWFRPVYKAFRADSSFNFMAFFFIFGAQFVLTVIQAIGFSGWGACGWLSAIGFFQYSPGAAVVMLLPAIMFSVSAAMMAIAIMKVHRIYRGAGGSFQKAQTEWNTGTWRNPPSREAQYNNFSGNSLPEYPTVPSYPGSGQWP

SEQ ID NO: 42146 - protein, 54 aa, Homo sapiens
LAAPGLAGTMCASRDDWRCARSMHEFSAKDIDGHMVNLDKYRGFVCIVTNVASQ

SEQ ID NO: 42147 - protein, 148 aa, Homo sapiens
IDGHMVNLDKYRGFVCIVTNVASQGKTEVNYTQLVDLHARYAECGLRILAFPCNQFGKQEPGSNEEIKEFAAGYNVKFDMFSKICVNGDDAHPLWKWMKIQPKGKGILGNAIKWNFTKFLIDKNGCVVKRYGPMEEPLVIEKDLPHYF

SEQ ID NO: 42148 - protein, 564 aa, Homo sapiens
RMLEEAGEVLENMLKASCLPLGFIVFLPAVLLLVAPPLPAADAAHEFTVYRMQQYDLQGQPYGTRNAVLNTEARTMAAEVLSRRCVLMRLLDFSYEQYQKALRQSAGAVVIILPRAMAAVPQDVVRQFMEIEPEMLAMETAVPVYFAVEDEALLSIYKQTQAASASQGSASAAEVLLRTATANGFQMVTSGVQSKAVSDWLIASVEGRLTGLGGEDLPTIVIVAHYDAFGVAPWLSLGADSNGSGVSVLLELARLFSRLYTYKRTHAAYNLLFFASGGGKFNYQGTKRWLEDNLDHTDSSLLQDNVAFVLCLDTVGRGSSLHLHVSKPPREGTLQHAFLRELETVAAHQFPEVRFSMVHKRINLAEDVLAWEHERFAIRRLPAFTLSHLESHRDGQRSSIMDVRSRVDSKTLTRNTRIIAEALTRVIYNLTEKGTPPDMPVFTEQMQIQQEQLDSVMDWLTNQPRAAQLVDKDSTFLSTLEHHLSRYLKDVKQHHVKADKRDPEFVFYDQLKQVMNAYRVKPAVFDLLLAVGIAAYLGMAYVAVQHFSLLYKTVQRLLVKAKTQ

SEQ ID NO: 42149 - protein, 236 aa, Homo sapiens
LVSDPSGRMVKSSLQRILNSHCFAREKEGDKPSATIHASRTMPLLSLHSRGGSSSESSRVSLHCCSNPGPGPRWCSDAPHPPLKIPGGRGNSQRDHNLSANLFYSDDRLNVTEELTSNDKTRILNVQSRLTDAKRINWRTVLSGGSLYIEIPGGALPEGSKDSFAVLLEFAEEQLRADHVFICFHKNREDRAALLRTFSFLGFEIVRPGHPLVPKRPDACFMAYTFERESSGEEEE

SEQ ID NO: 42150 - protein, 709 aa, Homo sapiens
VAGRVAGGRREGAAGADPPAMKPPAACAGDMADAASPCSVVNDLRWDLSAQQIEERTRELIEQTKRVYDQVGTQEFEDVSYESTLKALADVEVTYTVQRNILDFPQHVSPSKDIRTASTEADKKLSEFDVEMSMREDVYQRIVWLQEKVQKDSLRPEAARYLERLIKLGRRNGLHLPRETQENIKRIKKKLSLLCIDFNKNLNEDTTFLPFTLQELGGLPEDFLNSLEKMEDGKLKVTLKYPHYFPLLKKCHVPETRRKVEEAFNCRCKEENCAILKELVTLRAQKSRLLGFHTHADYVLEMNMAKTSQTVATFLDELAQKLKPLGEQERAVILELKRAECERRGLPFDGRIRAWDMRYYMNQVEETRYCVDQNLLKEYFPVQVVTHGLLGIYQELLGLAFHHEEGASAWHEDVRLYTARDAASGEVVGKFYLDLYPREGKYGHAACFGLQPGCLRQDGSRQIAIAAMVANFTKPTADAPSLLQHDEVETYFHEFGHVMHQLCSQAEFAMFSGTHVERDFVEAPSQMLENWVWEQEPLLRMSRHYRTGSAVPRELLEKLIESRQANTGLFNLRQIVLAKVDQALHTQTDADPAEEYARLCQEILGVPATPGTNMPATFGHLAGGYDAQYYGYLWSEVYSMDMFHTRFKQEGVLNSKVGMDYRSCILRPGGSEDASAMLRRFLGRDPKQDAFLLSKGLQVGGCEPEPQVC

SEQ ID NO: 42151 - protein, 11 aa, Homo sapiens
MAARPCPGMSV

SEQ ID NO: 42152 - protein, 208 aa, Homo sapiens
RAMARGGWRRLRRLLSAGQLLFQGRALLVTNTLGCGALMAAGDGVRQSWEIRARPGQVFDPRRSASMFAVGCSMGPFLHYWYLSLDRLFPASGLRGFPNVLKKVLVDQLVASPLLGVWYFLGLGCLEGQTVGESCQELREKFWEFYKADWCVWPAAQFVNFLFVPPQFRVTYINGLTLGWDTYLSYLKYRSPVPLTPPGCVALDTRAD

SEQ ID NO: 42153 - protein, 65 aa, Homo sapiens
KKKRLVQSPNSYFMDVKCPGCYKVTTVFSHAQMVVLCVGCSTVLCQPTGGKARLTEGCSFRRKQH

SEQ ID NO: 42154 - protein, 295 aa, Homo sapiens
MSGALDVLQMKEEDVLKFLAAGTHLGGTNLDFQMEHYIYKRKSDGIYIINLKRTWEKLLLAARAIVAIENPADVSVISSRNTGQRAVLKFAAATGATPIAGRFTPGTFTNQIQAAFWEPRLLVVTDPRADHQPLTEASYVNLPTIALCNTDSPLRYVDIAIPCNNKGAHSVGLMWWMLAREVLRMRGTISREHPWEVMPDLYFYRDPEEIEKEEQAAAEKAVTKEEFQGEWTAPSPEFTATQPEVADWSEGVQVPSVPIQQFPTEDWSAQPATEDWSAAPTAQATEWVGATTDWS

SEQ ID NO: 42155 - protein, 616 aa, Homo sapiens [sequence omitted]

SEQ ID NO: 42156 - protein, 254 aa, Homo sapiens
LAMAQLCGLRRSRAFLALLGSLLLSGVLAADRERSIHDFCLVSKVVGRCRASMPRWWYNVTDGSCQLFVYGGCDGNSNNYLTKEECLKKCATVTENATGDLATSRNAADSSVPSAPRRQDSEDHSSDMFNYEEYCTANAVTGPCRASFPRWYFDVERNSCNNFIYGGCRGNKNSYRSEEACMLRCFRQQENPPLPLGSKVVVLAGLFVMVLILFLGASMVYLIRVARRNQERALRTVWSSGDDKEQLVKNTYVL

SEQ ID NO: 42157 - protein, 46 aa, Homo sapiens
IAIYELLFKEGVTVAKKDVHMPKHPELADKNVPNLHVMKAMQSLKS

SEQ ID NO: 42158 - protein, 216 aa, Homo sapiens
LPATIFLLFLLSAVYLGPGCQALWMHKVPASLMVSLGEDAHFQCPHNSSNNANVTWWRVLHGNYTWPPEFLGPGEDPNGTLIIQNVNKSHGGIYVCRVQEGNESYQQSCGTYLRVRQPPPRPFLDMGEGTKNRIITAEGIILLFCAVVPGTLLLFRKRWQNEKLGLDAGDEYEDENLYEGLNLDDCSMYEDISRGLQGTYQDVGSLNIGDVQLEKP

SEQ ID NO: 42159 - protein, 36 aa, Homo sapiens
LTFFAALVLVDSPWERVPESLVRLHVEQRHQNMGLQ

SEQ ID NO: 42160 - protein, 210 aa, Homo sapiens
ISSPLATSGTIFSAISCFWDLPAPFLWLAPSCQPTMSSQIRQNYSTDVEAAVNSLVNLYLQASYTYLSLGFYFDRDDVALEGVSHFFRELAEEKREGYERLLKMQNQRGGRALFQDIKKPAEDEWGKTPDAMKAAMALEKKLNQALLDLHALGSARTDPHLCDFLETHFLDEEVKLIKKMGDHLTNLHRLGGPEAGLGEYLFERLTLKHD

SEQ ID NO: 42161 - protein, 361 aa, Homo sapiens
LGASDLHTGQGHSAVPRGHPSHPRHPDIWNFGCQESSLMQAAWLLGALVVPQLLGFGHGARGAEREWEGGWGGAQEEEREREALMLKHLQEALGLPAGRGDENPAGTVEGKEDWEMEEDQGEEEEEEATPTPSSGPSPSPTPEDIVTYILGRLAGLDAGLHQLHVRLHALDTRVVELTQGLRQLRNAAGDTRDAVQALQEAQGRAEREHGRLEGCLKGLRLGHKCFLLSRDFEAQAAAQARCTARGGSLAQPADRQQMEALTRYLRAALAPYNWPVWLGVHDRRAEGLYLFENGQRVSFFAWHRSPRPELGAQPSASPHPLSPDQPNGGTLENCVAQASDDGSWWDHDCQRRLYYVCEFPF

SEQ ID NO: 42162 - protein, 82 aa, Homo sapiens
TPALSAPTFFLQPRPPPPLLAAAMESSTFALVPVFAHLSILQSLVPAAGAASPVAISAQHLCYSHVTPGDPGAGAGQGPAPS

SEQ ID NO: 42163 - protein, 988 aa, Homo sapiens
LALPGVLSARSPLASPRCSVPCPARPGADTTAIMPAVSKGDGMRGLAVFISDIRNCKSKEAEIKRINKELANIRSKFKGDKALDGYSKKKYVCKLLFIFLLGHDIDFGHMEAVNLLSSNKYTEKQIGYLFISVLVNSNSELIRLINNAIKNDLASRNPTFMCLALHCIANVGSREMGEAFAADIPRILVAGDSMDSVKQSAALCLLRLYKASPDLVPMGEWTARVVHLLNDQHMGVVTAAVSLITCLCKKNPDDFKTCVSLAVSRLSRIVSSASTDLQDYTYYFVPAPWLSVKLLRLLQCYPPPEDAAVKGRLVECLETVLNKAQEPPKSKKVQHSNAKNAILFETISLIIHYDSEPNLLVRACNQLGQFLQHRETNLRYLALESMCTLASSEFSHEAVKTHIDTVINALKTERDVSVRQRAADLLYAMCDRSNAKQIVSEMLRYLETADYAIREEIVLKVAILAEKYAVDYSWYVDTILNLIRIAGDYVSEEVWYRVLQIVTNRDDVQGYAAKTVFEALQAPACHENMVKVGGYILGEFGNLIAGDPRSSPPVQFSLLHSKFHLCSVATRALLLSTYIKFINLFPETKATIQGVLRAGSQLRNADVELQQRAVEYLTLSSVASTDVLATVLEEMPPFPERESSILAKLKRKKGPGAGSALDDGRRDPSSNDINGGMEPTPSTVSTPSPSADLLGLRAAPPPAAPPASAGAGNLLVDVFDGPAAQPSLGPTPEEAFLSPGPEDIGPPIPEADELLNKFVCKNNGVLFENQLLQIGVKSEFRQNLGRMYLFYGNKTSVQFQNFSPTVVHPGDLQTQLAVQTKRVAAQVDGGAQVQQVLNIECLRDFLTPPLLSVRFRYGGAPQALTLKLPVTINKFFQPTEMAAQDFFQRWKQLSLPQQEAQKIFKANHPMDAEVTKAKLLGFGSALLDNVDPNPENFVGAGIIQTKALQVGCLLRLEPNAQAQMYRLTLRTSKEPVSRHLCELLAQQF

SEQ ID NO: 42164 - protein, 754 aa, Homo sapiens
VAGTARGMVPGSEGPARAGSVVADVVFVIEGTANLGPYFEGLRKHYLLPAIEYFNGGPPAETDFGGDYGGTQYSLVVFNTVDCAPESYVQCHAPTSSAYEFVTWLDGIKFMGGGGESCSLIAEGLSTALQLFDDFKKMREQIGQTHRVCLLICNSPPYLLPAVESTTYSGCTTENLVQQIGERGIHFSIVSPRKLPALRLLFEKAAPPALLEPLQPPTDVSQDPRHMVLVRGLVLPVGGGSAPGPLQSKQPVPLPPAAPSGATLSAAPQQPLPPVPPQYQVPGNLSAAQVAAQNAVEAAKNQKAGLGPRFSPITPLQQAAPGVGPPFSQAPAPQLPPGPPGAPKPPPASQPSLVSTVAPGSGLAPTAQPGAPSMAGTVAPGGVSGPSPAQLGAPALGGQQSVSNKLLAWSGVLEWQEKPKPASVDANTKLTRSLPCQVYVNHGENLKTEQWPQKLIMQLIPQQLLTTLGPLFRNSRMVQFHFTNKDLESLKGLYRIMGNGFAGCVHFPHTAPCEVRVLMLLYSSKKKIFMGLIPYDQSGFVNGIRQVITNHKQVQQQKLEQQQRGMGGQQAPPGLGPILEDQARPSQNLLQLRPPQPQPQGTVGASGATGQPQPQGTAQPPPGAPQGPPGAASGPPPPGPILRPQNPGANPQLRSLLLNPPPPQTGVPPPQASLHHLQPPGAPALLPPPHQGLGQPQLGPPLLHPPPAQSWPAQLPPRAPLPGQMLLSGGPRGPVPQPGLQPSVMEDDILMDLI

SEQ ID NO: 42165 - protein, 11 aa, Homo sapiens
MDMMVALTPVQ

SEQ ID NO: 42166 - protein, 17 aa, Homo sapiens
LILDWVPYINGKFKKDN

SEQ ID NO: 42167 - protein, 96 aa, Homo sapiens
LAAVVGFLFIVYLVLLANRLWCSKARAEDEEETTFRMESNLYQDQSEDKREKKEAKEKEEKRKKEKKTAKEGESNLGLDLEEKEPGDHERAKSTVM

SEQ ID NO: 42168 - protein, 323 aa, Homo sapiens
VTRAAQAATMVKLLVAKILCMVGVFFFMLLGSLLPVKIIETDFEKAHRSKKILSLCNTFGGGVFLATCFNALLPAVREKLQKVLSLGHISTDYPLAETILLLGFFMTVFLEQLILTFRKEKPSFIDLETFNAGSDVGSDSEYESPFMGGARGHALYVEPHGHGPSLSVQGLSRASPVRLLSLAFALSAHSVFEGLALGLQEEGEKVVSLFVGVAVHETLVAVALGISMARSAMPLRDAAKLAVTVSAMIPLGIGLGLGIESAQGVPGSVASVLLQGLAGGTFLFITFLEILAKELEEKSDRLLKVLFLVLGYTVLAGMVFLKW

SEQ ID NO: 42169 - protein, 4 aa, Homo sapiens
MALT

SEQ ID NO: 42170 - protein, 22 aa, Homo sapiens
KLSPKHPESNTAGMDIFAKFSA

SEQ ID NO: 42171 - protein, 32 aa, Homo sapiens
RRSRSAAMAGSLSARGGGVAYLLEPHAARSQA

SEQ ID NO: 42172 - protein, 16 aa, Homo sapiens
VLVGVLLLVLILLFSL

SEQ ID NO: 42173 - protein, 10 aa, Homo sapiens
IMVLTFLWAG

SEQ ID NO: 42174 - protein, 39 aa, Homo sapiens
LQELRRQDEWRGEPSQQAHAGAGRTGRRALDVPAPSVRG

SEQ ID NO: 42175 - protein, 14 aa, Homo sapiens
IPALPPPAHEIPRI

SEQ ID NO: 42176 - protein, 31 aa, Homo sapiens
ILASQPSVSKTQAARVPASRIQASGICATRT

SEQ ID NO: 42177 - protein, 26 aa, Homo sapiens
VVHYTGMLEDGKKFDSSRDRNKPLNF

SEQ ID NO: 42178 - protein, 248 aa, Homo sapiens
TGAEAGRAVGAERSGAARQAGRVAAAAEEAAAAGPRSGGDAGGGGGPGGRGPGPRGGGSGGGGGRMIKLFSLKQQKKEEESAGGTKGSSKKASAAQLRIQKDINELNLPKTCDISFSDPDDLLNFKLVICPDEGFYKSGKFVFSFKVGQGYPHDPPKVKCETMVYHPNIDLEGNVCLNILREDWKPVLTINSIIYGLQYLFLEPNPEDPLNKEAAEVLQNNRRLFEQNVQRSMRGGYIGSTYFERCLK

SEQ ID NO: 42179 - protein, 16 aa, Homo sapiens
ISVANNRLFVGSIPKS

SEQ ID NO: 42180 - protein, 83 aa, Homo sapiens
VGMSRSSKVVLGLSVLLTAATVAGVHVKQQWDQQRLRDGVIRDIERQIRKKENIRLLGEQIILTEQLEAEREKMLLAKGSQKS

SEQ ID NO: 42181 - protein, 9 aa, Homo sapiens
INRLIRRMN

SEQ ID NO: 42182 - protein, 166 aa, Homo sapiens
KMASGVQVADEVCRIFYDMKVRKCSTPEEIKKRKKAVIFCLSADKKCIIVEEGKEILVGDVGVTITDPFKHFVGMLPEKDCRYALYDASFETKESRKEELMFFLWAPELAPLKSKMIYASSKDAIKKKFQGIKHECQANGPEDLNRACIAEKLGGSLIVAFEGCPV

SEQ ID NO: 42183 - protein, 400 aa, Homo sapiens
LFIKEKGFFWSPTTGPMAAVQMDPELAKRLFFEGATVVILNMPKGTEFGIDYNSWEVGPKFRGVKMIPPGIHFLHYSSVDKANPKEVGPRMGFFLSLHQRGLTVLRWSTLREEVDLSPAPESEVEAMRANLQELDQFLGPYPYATLKKWISLTNFISEATVEKLQPENRQICAFSDVLPVLSMKHTKDRVGQNLPRCGIECKSYQEGLARLPEMKPRAGTEIRFSELPTQMFPEGATPAEITKHSMDLSYALETVLNKQFPSSPQDVLGELQFAFVCFLLGNVYEAFEHWKRLLNLLCRSEAAMMKHHTLYINLISILYHQLGEIPADFFVDIVSQDNFLTSTLQVFFSSACSIAVDATLRKKAEKFQAHLTKKFRWDFAAEPEDCAPVVVELPEGIEMG

SEQ ID NO: 42184 - protein, 59 aa, Homo sapiens
MTDGVQLPSAPYPVQRTLLITAQELDRWGTPAPWNLEDPCFLDRESVCWASVFSARVVT

SEQ ID NO: 42185 - protein, 643 aa, Homo sapiens
KMATAMDWLPWSLLLFSLMCETSAFYVPGVAPINFHQNDPVEIKAVKLTSSRTQLPYEYYSLPFCQPSKITYKAENLGEVLRGDRIVNTPFQVLMNSEKKCEVLCSQSNKPVTLTVEQSRLVAERITEDYYVHLIADNLPVATRLELYSNRDSDDKKKEKDVQFEHGYRLGFTDVNKIYLHNHLSFILYYHREDMEEDQEHTYRVVRFEVIPQSIRLEDLKADEKSSCTLPEGTNSSPQEIDPTKENQLYFTYSVHWEESDIKWASRWDTYLTMSDVQIHWFSIINSVVVVFFLSGILSMIIIRTLRKDIANYNKEDDIEDTMEESGWKLVHGDVFRPPQYPMILSSLLGSGIQLFCMILIVIFVAMLGMLSPSSRGALMTTACFLFMFMGVFGGFSAGRLYRTLKGHRWKKGAFCTATLYPGVVFGICFVLNCFIWGKHSSGAVPFPTMVALLCMWFGISLPLVYLGYYFGFRKQPYDNPVRTNQIPRQIPEQRWYMNRFVGILMAGILPFGAMFIELFFIFSAIWENQFYYLFGFLFLVFIILVVSCSQISIVMVYFQLCAEDYRWWWRNFLVSGGSAFYVLVYAIFYFVNKLDIVEFIPSLLYFGYTALMVLSFWLLTGTIGFYAAYMFVRKIYAAVKID

SEQ ID NO: 42186 - protein, 368 aa, Homo sapiens
LAVCQSVKSPAACQVRPRPRAVALPAALGGPGRSLPGLTAATMSSFSESALEKKLSELSNSQQSVQTLSLWLIHHRKHAGPIVSVWHRELRKAKSNRKLTFLYLANDVIQNSKRKGPEFTREFESVLVDAFSHVAREADEGCKKPLERLLNIWQERSVYGGEFIQQLKLSMEDSKSPPPKATEEKKSLKRTFQQIQEEEDDDYPGSYSPQDPSAGPLLTEELIKALQDLENAASGDATVRQKIASLPQEVQDVSLLEKITDKEAAERLSKTVDEACLLLAEYNGRLAAELEDRRQLARMLVEYTQNQKDVLSEKEKKLEEYKQKLARVTQVRKELKSHIQSLPDLSLLPNVTGGLAPLPSAGDLFSTD

SEQ ID NO: 42187 - protein, 35 aa, Homo sapiens
RKKNCTYTQVQTRSSDEPMTTFVVCNECGNRWKFC

SEQ ID NO: 42188 - protein, 34 aa, Homo sapiens
LDYITYLSISDQLFDIPKERKNAEYKRYLEMLLE

SEQ ID NO: 42189 - protein, 116 aa, Homo sapiens
KILHRYEITFTLPPVHRLSKDVREAPVPSLHLKLLSVVPVPEGYSVKCEYSAHKEGVLKEEILLACEGGTGTCVRVTVQARVMDRHHGTPMLLDGVKCVGAELEYDSEHSDWHGFD

SEQ ID NO: 42190 - protein, 525 aa, Homo sapiens
RLWEVRLAVATTEEEGRDAVEHGDRLSVMEGSGEQPGPQPQHPGDHRIRDGDFVVLKREDVFKAVQVQRRKKVTFEKQWFYLDNVIGHSYGTAFEVTSGGSLQPKKKREEPTAETKEAGTDNRNIVDDGKSQKLTQDDIKALKDKGIKGEEIVQQLIENSTTFRDKTEFAQDKYIKKKKKKYEAIITVVKPSTRILSIMYYAREPGKINHMRYDTLAQMLTLGNIRAGNKMIVMETCAGLVLGAMMERMGGFGSIIQLYPGGGPVRAATACFGFPKSFLSGLYEFPLNKVDSLLHGTFSAKMLSSEPKDSALVEESNGTLEEKQASEQENEDSMAEAPESNHPEDQETMETISQDPEHKGPKERGSKKDYIQEKQRRQEEQRKRHLEAAALLSERNADGLIVASRFHPTPLLLSLLDFVAPSRPFVVYCQYKEPLLECYTKLRERGGVINLRLSETWLRNYQVLPDRSHPKLLMSGGGGYLLSGFTVAMDNLKADTSLKSNASTLESHETEEPAAKKRKCPESDS

SEQ ID NO: 42191 - protein, 376 aa, Homo sapiens
VTFLMLAVSLTVPLLGAMMLLESPIDPQPLSFKEPPLLLGVLHPNTKLRQAERLFENQLVGPESIAHIGDVMFTGTADGRVVKLENGEIETIARFGSGPCKTRDDEPVCGRPLGIRAGPNGTLFVADAYKGLFEVNPWKREVKLLLSSETPIEGKNMSFVNDLTVTQDGRKIYFTDSSSKWQRRDYLLLVMEGTDDGRLLEYDTVTREVKVLLDQLRFPNGVQLSPAEDFVLVAETTMARIRRVYVSGLMKGGADLFVENMPGFPDNIRPSSSGGYWVGMSTIRPNPGFSMLDFLSERPWIKRMIFKLFSQETVMKFVPRYSLVLELSDSGAFRRSLHDPDGLVATYISEVHEHDGHLYLGSFRSPFLCRLSLQAV

SEQ ID NO: 42192 - protein, 5 aa, Homo sapiens
RMRLL

SEQ ID NO: 42193 - protein, 44 aa, Homo sapiens
INYVKKFQSFQDHKLKISKEDSKILKKAQKDGFLHETLLDRGPN

SEQ ID NO: 42194 - protein, 15 aa, Homo sapiens
IGKDCIGGCSDLVTM

SEQ ID NO: 42195 - protein, 550 aa, Homo sapiens
IRGLGSGAAQLSPMAHCVTLVQLSISCDHLIDKDIGSKSDPLCVLLQDVGGGSWAELGRTERVRNCSSPEFSKTLQLEYRFETVQKLRFGIYDIDNKTPELRDDDFLGGAECSLGQIVSSQVLTLPLMLKPGKPAGRGTITVSAQELKDNRVVTMEVEARNLDKKDFLGKSDPFLEFFRQGDGKWHLVYRSEVIKNNLNPTWKRFSVPVQHFCGGNPSTPIQVQCSDYDSDGSHDLIGTFHTSLAQLQAVPAEFECIHPEKQQKKKSYKNSGTIRVKICRVETEYSFLDYVMGGCQINFTVGVDFTGSNGDPSSPDSLHYLSPTGVNEYLMALWSVGSVVQDYDSDKLFPAFGFGAQVPPDWQVSHEFALNFNPSNPYCAGIQGIVDAYRQALPQVRLYGPTNFAPIINHVARFAAQAAHQGTASQYFMLLLLTDGAVTDVEATREAVVRASNLPMSVIIVGVGGADFEAMEQLDADGGPLHTRSGQAAARDIVQFVPYRRFQNAPREALAQTVLAEVPTQLVSYFRAQGWAPLKPLPPSAKDPAQAPQA

SEQ ID NO: 42196 - protein, 229 aa, Homo sapiens
KRLQEWCSVILCFSLIAHNLVHLLLLARWEDTPLVILGVVAGALIADFLSGLVHWGADTWGSVELPIVGKAFIRPFREHHIDPTAITRHDFIETNGDNCLVTLLPLLNMAYKFRTHSPEALEQLYPWECFVFCLIIFGTFTNQIHKWSHTYFGLPRWVTLLQDWHVILPRKHHRIHHVSPHETYFCITTGWLNYPLEKIGFWRRLEDLIQGLTGEKPRADDMKWAQKIK

SEQ ID NO: 42197 - protein, 38 aa, Homo sapiens
MAEIEKFDKSKLKKTETQEKNPLPSKETIEQEKQAGES

SEQ ID NO: 42198 - protein, 82 aa, Homo sapiens
ILCTMLFLGSLGAWGTTSISTGSIFSLKTLRSQHGGQVGLKVSRPRAPRMGAATPTPRAPWVARWLMGSQAFTATPSARPPG

SEQ ID NO: 42199 - protein, 41 aa, Homo sapiens
MQPRQGTTEAAHRSQPQCLLSRLTTLPTRTCSIMTTARTPS

SEQ ID NO: 42200 - protein, 264 aa, Homo sapiens
RALVASRLAAASAFTSLSPGGRTPSQRAALHLSVPRPAARVALVLSGCGVYDGTEIHEASAILVHLSRGGAEVQIFAPDVPQMHVIDHTKGQPSEGESRNVLTESARIARGKITDLANLSAANHDAAIFPGGFGAAKNLSTFAVDGKDCKVNKEVERVLKEFHQAGKPIGLCCIAPVLAAKVLRGVEVTVGHEQEEGGKWPYAGTAEAIKALGAKHCVKEVVEAHVDQKNKVVTTPAFMCETALHYIHDGIGAMVRKVLELTGK

SEQ ID NO: 42201 - protein, 127 aa, Homo sapiens
LSARRGPQAPGTRLPRRHPARAFPAATMPKRKVSSAEGAAKEEPKRRSARLSAKPPAKVEAKPKKAAAKDKSSDKKVQTKGKRGAKGKQAEVANQETKEDLPAENGETKTEESPASDEAGEKEAKSD

SEQ ID NO: 42202 - protein, 26 aa, Homo sapiens
RRGESLIVTRSPELRQFLHVSRGRRS

SEQ ID NO: 42203 - protein, 16 aa, Homo sapiens
LDACMALERFHRAWLT

SEQ ID NO: 42204 - protein, 299 aa, Homo sapiens
ICFAAELRGDPRPLPQPEGWSLLRGALKMPEAPPLLLAAVLLGLVLLVVLLLLLRHWGWGLCLIGWNEFILQPIHNLLMGDTKEQRILNHVLQHAEPGNAQSVLEAIDTYCEQKEWAMNVGDKKGKIVDAVIQEHQPSVLLELGAYCGYSAVRMARLLSPGARLITIEINPDCAAITQRMVDFAGVKDKVTLVVGASQDIIPQLKKKYDVDTLDMVFLDHWKDRYLPDTLLLEECGLLRKGTVLLADNVICPGAPDFLAHVRGSSCFECTHYQSFLEYREVVDGLEKAIYKGPGSEAGP

SEQ ID NO: 42205 - protein, 18 aa, Homo sapiens
MRYFSNIEEKIKLKKIPL

SEQ ID NO: 42206 - protein, 116 aa, Homo sapiens
IMPMFIVNTNVPRASVPDGFLSELTQQLAQATGKPPQYIAVHVVPDQLMAFGGSSEPCALCSLHSIGKIGGAQNRSYSKLLCGLLAERLRISPDRVYINYYDMNAANVGWNNSTFA

SEQ ID NO: 42207 - protein, 32 aa, Homo sapiens
TPEQWRSRRSYSCQVMHEGSTAEKTVAPAECS

SEQ ID NO: 42208 - protein, 20 aa, Homo sapiens
MEELQRTPLPGKNINLAVLF

SEQ ID NO: 42209 - protein, 368 aa, Homo sapiens
TMSSTLAKIAEIEAEMARTQKNKATAHHLGLLKARLAKLRRELITPKGGGGGGPGEGFDVAKTGDARIGFVGFPSVGKSTLLSNLAGVYSEVAAYEFTTLTTVPGVIRYKGAKIQLLDLPGIIEGAKDGKGRGRQVIAVARTCNLILIVLDVLKPLGHKKIIENELEGFGIRLNSKPPNIGFKKKDKGGINLTATCPQSELDAETVKSILAEYKIHNADVTLRSDATADDLIDVVEGNRVYIPCIYVLNKIDQISIEELDIIYKVPHCVPISAHHRWNFDDLLEKIWDYLKLVRIYTKPKGQLPDYTSPVVLPYSRTTVEDFCMKIHKNLIKEFKYALVWGLSVKHNPQKVGKDHTLEDEDVIQIVKK

SEQ ID NO: 42210 - protein, 415 aa, Homo sapiens
INSCSKATLLFLSVFLQPRHSQPPARPGDLGEARTEVQDLPLPRDPRPQRRAPWREENHLTPGDTDLLPQRLMDNQAERESEAGVGLQRDEDDAPLCEDVELQDGDLSPEEKIFLREFPRLKEDLKGNIDKLRALADDIDKTHKKFTKANMVATSTAVISGVMSLLGLALAPATGGGSLLLSTAGQGLATAAGVTSIVSGTLERSKNKEAQARAEDILPTYDQEDREDEEEKADYVTAAGKIIYNLRNTLKYAKKNVRAFWKLRANPRLANATKRLLTTGQVSSRSRVQVQKAFAGTTLAMTKNARVLGGVMSAFSLGYDLATLSKEWKHLKEGARTKFAEELRAKALELERKLTELTQLYKSLQQKVRSRARGVGKDLTGTCETEAYWKELREHVWMWLWLCVCLCVCVYVQFT

SEQ ID NO: 42211 - protein, 191 aa, Homo sapiens
ILSLLLFMVHRLRQRRRERIESLIGANLHHFNLGRRIPGFDYGPDGFGTGLTPLHLSDDGEGGTFHFHDPPPPYTAYKYPDIGQPDDPPPPYEASIHPDSVFYDPADDDAFEPVEVSLPAPGDGGSEGALLRRLEQPLPTAGASLADLEDSADSSSALLVPPDPAQSGSTPAAEALPGGGRHSRSSLNTVV

SEQ ID NO: 42212 - protein, 291 aa, Homo sapiens
REIKILLRFRHENIIGINDIIRAPTIEQMKDVYIVQDLMETDLYKLLKTQHLSNDHICYFLYQILRGLKYIHSANVLHRDLKPSNLLLNTTCDLKICDFGLARVADPDHDHTGFLTEYVATRWYRAPEIMLNSKGYTKSIDIWSVGCILAEMLSNRPIFPGKHYLDQLNHILGILGSPSQEDLNCIINLKARNYLLSLPHKNKVPWNRLFPNADSKALDLLDKMLTFNPHKRIEVEQALAHPYLEQYYDPSDEPIAEAPFKFDMELDDLPKEKLKELIFEETARFQPGYRS

SEQ ID NO: 42213 - protein, 28 aa, Homo sapiens
KKAEAGAGSATEFQFRGKFGRGHRQPPQ

SEQ ID NO: 42214 - protein, 328 aa, Homo sapiens
LESRTRSRHRAPRLPPAMPAPRAPRALAAAAPASGKAKLTHPGKAILAGGLAGGIEICITFPTEYVKTQLQLDERSHPPRYRGIGDCVRQTVRSHGVLGLYRGLSSLLYGSIPKAAVRFGMFEFLSNHMRDAQGRLDSTRGLLCGLGAGVAEAVVVVCPMETIKVKFIHDQTSPNPKYRGFFHGVREIVREQGLKGTYQGLTATVLKQGSNQAIRFFVMTSLRNWYRGDNPNKPMNPLITGVFGAIAGAASVFGNTPLDVIKTRMQGLEAHKYRNTWDCGLQILKKEGLKAFYKGTVPRLGRVCLDVAIVFVIYDEVVKLLNKVWKTD

SEQ ID NO: 42215 - protein, 6 aa, Homo sapiens
IMDTRE

SEQ ID NO: 42216 - protein, 324 aa, Homo sapiens
ILFIVPIYAFDSWLSLLFFTNDQYYVYFGTVRDCYEALVIYNFLSLCYEYLGGESSIMSEIRGKPIESSCMYGTCCLWGKTYSIGFLRFCKQATLQFCVVKPLMAVSTVVLQAFGKYRDGDFDVTSGYLYVTIIYNISVSLALYALFLFYFATRELLSPYSPVLKFFMVKSVIFLSFWQGMLLAILEKCGAIPKIHSARVSVGEGTVAAGYQDFIICVEMFFAALALRHAFTYKVYADKRLDAQGRCAPMKSISSSLKETMNPHDIVQDAIHNFSPAYQQYTQQSTLEPGPTWRGGAHGLSRSHSLSGARDNEKTLLLSSDDEF

SEQ ID NO: 42217 - protein, 391 aa, Homo sapiens
KRIYERKVAPLFTLASITTDIIVTEHANQAKETLYEINIDKYDGIVCVGGDGMFSEVLHGLIGRTQRSAGVDQNHPRAVLVPSSLRIGIIPAGSTDCVCYSTVGTSDAETSALHIVVGDSLAMDVSSVHHNSTLLRYSVSLLGYGFYGDIIKDSEKKRWLGLARYDFSGLKTFLSHHCYEGTVSFLPAQHTVGSPRDRKPCRAGCFVCRQSKQQLEEEQKKALYGLEAAEDVEEWQVVCGKFLAINATNMSCACRRSPRGLSPAAHLGDGSSDLILIRKCSRFNFLRFLIRHTNQQDQFDFTFVEVYRVKKFQFTSKHMEDEDSDLKEGGKKRFGHICSSHPSCCCTVSNSSWNCDGEVLHSPAIEVRVHCQLVRLFARGIEENPKPDSHS

SEQ ID NO: 42218 - protein, 392 aa, Homo sapiens
TPSQRLGLEPGRSPPSFAHHLPTMDPRKVNELRAFVKMCKQDPSVLHTEEMRFLREWVESMGGKVPPATQKAKSEENTKEEKPDSKKVEEDLKADEPSSEESDLEIDKEGVIEPDTDAPQEMGDENAEITEEMMDQANDKKVAAIEALNDGELQKAIDLFTDAIKLNPRLAILYAKRASVFVKLQKPNAAIRDCDRAIEINPDSAQPYKWRGKAHRLLGHWEEAAHDLALACKLDYDEDASAMLKEVQPRAQKIAEHRRKYERKREEREIKERIERVKKAREEHERAQREEEARRQSGAQYGSFPGGFPGGMPGNFPGGMPGMGGGMPGMAGMPGLNEILSDPEVLAAMQDPEVMVAFQDVAQNPANMSKYQSNPKVMNLISKLSAKFGGQA

SEQ ID NO: 42219 - protein, 294 aa, Homo sapiens
LGHMVLFPVWFLYSLLMKLFQRSTPAITLESPDIKYPLRLIDREIISHDTRRFRFALPSPQHILGLPVGQHIYLSARIDGNLVVRPYTPISSDDDKGFVDLVIKVYFKDTHPKFPAGGKMSQYLESMQIGDTIEFRGPSGLLVYQGKGKFAIRPDKKSNPIIRTVKSVGMIAGGTGITPMLQVIRAIMKDPDDHTVCHLLFANQTEKDILLRPELEELRNKHSARFKLWYTLDRAPEAWDYGQGFVNEEMIRDHLPPPEEEPLVLMCGPPPMIQYACLPNLDHVGHPTERCFVF

SEQ ID NO: 42220 - protein, 272 aa, Homo sapiens
LFPAMGLSPSAPAVAVQASNASASPPSGCPMHEGKMKGCPVNTEPSGPTCEKKTYSVPAHQERAYEYVECPIRGTAAENKENLDPSNLMPPPNQTPAPDQPFALSTVREESSIPRADSEKKWVYPSEQMFWNAMLKKGWKWKDEDISQKDMYNIIRIHNQNNEQAWKEILKWEALHAAECPCGPSLIRFGGKAKEYSPRARIRSWMGYELPFDRHDWIINRCGTEVRYVIDYYDGGEVNKDYQFTILDVRPALDSLSAVWDRMKVAWWRWTS

SEQ ID NO: 42221 - protein, 5 aa, Homo sapiens
IRRMN

SEQ ID NO: 42222 - protein, 37 aa, Homo sapiens
LPRTPQMLPMCSSELAPLLLSLACLDALLHVVVAHGC

SEQ ID NO: 42223 - protein, 118 aa, Homo sapiens
VITMALAAVVTEVALANLNVVETVAGVTNQMKMIGQNHSHQVNAWNRNSFLEATLGLILRNTMTFQLRQQATTVLHILKVSVMLRWEKLSWETLSLLVILAQLQCKSMLFLLSKRKET

SEQ ID NO: 42224 - protein, 333 aa, Homo sapiens
LVCEMGRTSKDKRDVYYRLAKENGWRARSAFKLLQLDKEFQLFQGVTRAVDLCAAPGSWSQVLSQKIGGQGSGHVVAVDLQAMAPLPGVVQIQGDITQLSTAKEIIQHFKGCPADLVVCDGAPDVTGLHDVDEYMQAQLLLAALNIATHVLKPGGCFVAKIFRGRDVTLLYSQLQVFFSSVLCAKPRSSRNSSIEAFAVCQGYDPPEGFIPDLSKPLLDHSYDPDFNQLDGPTRIIVPFVTCGDLSSYDSDRSYPLDLEGGSEYKYTPPTQPPISPPYQEACTLKRKGQLAKEIRPQDCPISRVDTFPQPLAAPQCHTLLAPEMEDNEMSCSP

SEQ ID NO: 42225 - protein, 16 aa, Homo sapiens
MFTNQGTVIHFNNPKV

SEQ ID NO: 42226 - protein, 585 aa, Homo sapiens
LVIMMKLRHKNKKPGEGSKGHKKISWPYPQPAKQNGKKATSKVPSAPHFVHPNDHANREAELKKKWVEEMREKQQAAREQERQKRRTIESYCQDVLRRQEEFEHKEEVLQELNMFPQLDDEATRKAYYKEFRKVVEYSDVILEVLDARDPLGCRCFQMEEAVLRAQGNKKLVLVLNKIDLVPKEVVEKWLDYLRNELPTVAFKASTQHQVKNLNRCSVPVDQASESLLKSKACFGAENLMRVLGNYCRLGEVRTHIRVGVVGLPNVGKSSLINSLKRSRACSVGAVPGITKFMQEVYLDKFIRLLDAPGIVPGPNSEVGTILRNCVHVQKLADPVTPVETILQRCNLEEISNYYGVSGFQTTEHFLTAVAHRLGKKKKGGLYSQEQAAKAVLADWVSGKISFYIPPPATHTLPTHLSAEIVKEMTEVFDIEDTEQANEDTMECLATGESDELLGDTDPLEMEIKLLHSPMTKIADAIENKTTVYKIGDLTGYCTNPNRHQMGWAKRNVDHRPKSNSMVDVCSVDRRSVLQRIMETDPLQQGQALASALKNKKKMQKRADKIASKLSDSMMSALDLSGNADDGVGD

SEQ ID NO: 42227 - protein, 127 aa, Homo sapiens [sequence omitted]

SEQ ID NO: 42228 - protein, 633 aa, Homo sapiens
LPACVTAAAMAENGESSGPPRPSRGPAAAQGSAAAPAEPKIIKVTVKTPKEKEEFAVPENSSVQQFKEAISKRFKSQTDQLVLIFAGKILKDQDTLIQHGIHDGLTVHLVIKSQNRPQGQSTQPSNAAGTNTTSASTPRSNSTPISTNSNPFGLGSLGGLAGLSSLGLSSTNFSELQSQMQQQLMASPEMMIQIMENPFVQSMLSNPDLMRQLIMANPQMQQLIQRNPEISHLLNNPDIMRQTLEIARNPAMMQEMMRNQDLALSNLESIPGGYNALRRMYTDIQEPMLNAAQEQFGGNPFASVGSSSSSGEGTQPSRTENRDPLPNPWAPPPATQSSATTSTTTSTGSGSGNSSSNATGNTVAAANYVASIFSTPGMQSLLQQITENPQLIQNMLSAPYMRSMMQSLSQNPDLAAQMMLNSPLFTANPQLQEQMRPQLPAFLQQMQNPDTLSAMSNPRAMQALMQIQQGLQTLATEAPGLIPSFTPGVGVGVLGTAIGPVGPVTPIGPIGPIVPFTPIGPIGPIGPTGPAAPPGSTGSGGPTGPTVSSAAPSETTSPTSESGPNQQFIQQMVQALAGANAPQLPNPEVRFQQQLEQLNAMGFLNREANLQALIATGGDINAAIERLLGSQPS

SEQ ID NO: 42229 - protein, 1135 aa, Homo sapiens [sequence omitted]

SEQ ID NO: 42230 - protein, 81 aa, Homo sapiens
TMFPLVKSALNRLQVRSIQQTMARQSHQKRTPDFHDKYGNAVLASGATFCIVTWTYVATQVGIEWNLSPVGRVTPKEWRNQ

SEQ ID NO: 42231 - protein, 23 aa, Homo sapiens
LSDYSIPWSLLLSGTIAWATPGK

SEQ ID NO: 42232 - protein, 389 aa, Homo sapiens
LVPAIVGDDCMGYARKVGWVTAGLVIGAGACYCIYRLTRGRKQNKEKMAEGGSGDVDDAGDCSGARYNDWSDDDDDSNESKSIVWYPPWARIGTEAGTRARARARARATRARRAVQKRASPNSDDTVLSPQELQKVLCLVEMSEKPYILEAALIALGNNAAYAFNRDIIRDLGGLPIVAKILNTRDPIVKEKALIVLNNLSVNAENQRRLKVYMNQVCDDTITSRLNSSVQLAGLRLLTNMTVTNEYQHMLANSISDFFRLFSAGNEETKLQVLKLLLNLAENPAMTRELLRAQVPSSLGSLFNKKENKEVILKLLVIFENINDNFKWEENEPTQNQFGEGSLFFFLKEFQVCADKVLGIESHHDFLVKVKVGKFMAKLAEHMFPKSQE

SEQ ID NO: 42233 - protein, 23 aa, Homo sapiens
ISLSSTAMFLLLSCCKATHLRFP

SEQ ID NO: 42234 - protein, 151 aa, Homo sapiens
MAASSQGNFEGNFESLDLAEFAKKQPWWRKLFGQESGPSAEKYSVATQLFIGGVTGWCTGFIFQKVGKLAATAVGGGFFLLQLANHTGYIKVDWQRVEKDMKKAKEQLKIRKSNQIPTEVRSKAEEVVSFVKKNVLVTGGFFGGFLLGMAS

SEQ ID NO: 42235 - protein, 463 aa, Homo sapiens
VKEEEEPSGRWHRGLTMDEEYDVIVLGTGLTECILSGIMSVNGKKVLHMDRNPYYGGESSSITPLEELYKRFQLLEGPPESMGRGRDWNVDLIPKFLMANGQLVKMLLYTEVTRYLDFKVVEGSFVYKGGKIYKVPSTETEALASNLMGMFEKRRFRKFLVFVANFDENDPKTFEGVDPQTTSMRDVYRKFDLGQDVIDFTGHALALYRTDDYLDQPCLETVNRIKLYSESLARYGKSPYLYPLYGLGELPQGFARLSAIYGGTYMLNKPVDDIIMENGKVVGVKSEGEVARCKQLICDPSYIPDRVRKAGQVIRIICILSHPIKNTNDANSCQIIIPQNQVNRKSDIYVCMISYAHNVAAQGKYIAIASTTVETTDPEKEVEPALELLEPIDQKFVAISDLYEPIDDGCESQVFCSCSYDATTHFETTCNDIKDIYKRMAGTAFDFENMKRKQNDVFGEAEQ

SEQ ID NO: 42236 - protein, 115 aa, Homo sapiens
MTKKRRNNGRAKKGRGHVQPIRCTKCARCVPKDKAIKKFVIRNIVEAAAIRDISEASVFDAYVLPKLYVKLHYCVSCAIHSKVVRNRSREARKDRTPPPRFRPAGAAPRPPPKPM

SEQ ID NO: 42237 - protein, 34 aa, Homo sapiens
KKISRLDAELVKYKDQIKKMREGPAKSMVKQKAS

SEQ ID NO: 42238 - protein, 86 aa, Homo sapiens
VNKKLETAVNLAWTAGNSNTRFGIAAKYQIDPDACFSAKVNNSSLIGLGYTQTLKPGIKLTLSALLDGKNVNAGGHKLGLGLEFQA

SEQ ID NO: 42239 - protein, 179 aa, Homo sapiens
RMSEVRLPPLRALDDFVLGSARLAAPDPCDPQRWCHRVINNLLYYQTNYLLCFGIGLALAGYVRPLHTLLSALVVAVALGVLVWAAETRAAVRRCRRSHPAACLAAVLAVGLLVLWVAGGACTFLFSIAGPVLLILVHASLRLRNLKNKIENKIESIGLKRTPMGLLLEALGQEQEAGS

SEQ ID NO: 42240 - protein, 637 aa, Homo sapiens
LTLKPSIFHLFINMENSDSNDKGSGDQSAAQRRSQMDRLDREEAFYQFVNNLSEEDYRLMRDNNLLGTPGESTEEELLRRLQQIKEGPPPQNSDENRGGDSSDDVSNGDSIIDWLNSVRQTGNTTRSGQRGNQSWRAVSRTNPNSGDFRFSLEINVNRNNGSQNSENENEPSARRSSGENVENNSQRQVENPRSESTSARPSRSERNSTEALTEVPPTRGQRRARSRSPDHRRTRARAERSRSPLHPMSEIPRRSHHSISSQTFEHPLVNETEGSSRTRHHVTLRQQISGPELLSRGLFAASGTRNASQGAGSSDTAASGESTGSGQRPPTIVLDLQVRRVRPGEYRQRDSIASRTRSRSQTPNNTVTYESERGGFRRTFSRSERAGVRTYVSTIRIPIRRILNTGLSETTSVAIQTMLRQIMTGFGELSYFMYSDSDSEPTGSVSNRNMERAESRSGRGGSGGGSSSGSSSSSSSSSSSSSSSSSSSSPSSSSGGESSETSSDLFEGSNEGSSSSGSSGARREGRHRAPVTFDESGSLPFLSLAQFFLLNEDDDDQPRGLTKEQIDNLAMRSFGENDALKTCSVCITEYTEGNKLRKLPCSHEYHVHCIDRWLSENSTCPICRRAVLASGNRESVV

SEQ ID NO: 42241 - protein, 249 aa, Homo sapiens
LSPPPSCGVGTLLSTPAAATSSSPSSSSAASSSSPGSRKMVVSAEMCCFCFDVLYCHLYGYQQPRTPRFTNEPYPLFVTWKIGRDKRLRGCIGTFSAMNLHSGLREYTLTSALKDSRFPPMTRDELPRLFCSVSLLTNFEDVCDYLDWEVGVHGIRIEFINEKGSKRTATYLPEVAKEQGWDHIQTIDSLLRKGGYKAPITNEFRKTIKLTRYRSEKMTLSYAEYLAHRQHHHFQNGIGHPLPPYNHYS

SEQ ID NO: 42242 - protein, 30 aa, Homo sapiens
IGLLMMFDPAAGIAGNVISKLGSASVSSLV

SEQ ID NO: 42243 - protein, 440 aa, Homo sapiens
LADAGAMAATDIARQVGEGCRTVPLAGHVGFDSLPDQLVNKSVSQGFCFNILCVGETGLGKSTLMDTLFNTKFEGEPATHTQPGVQLQSNTYDLQESNVRLKLTIVSTVGFGDQINKEDSYKPIVEFIDAQFEAYLQEELKIRRVLHTYHDSRIHVCLYFIAPTGHSLKSLDLVTMKKLDSKVNIIPIIAKADAISKSELTKFKIKITSELVSNGVQIYQFPTDDESVAEINGTMNAHLPFAVIGSTEELKIGNKMMRARQYPWGTVQVENEAHCDFVKLREMLIRVNMEDLREQTHTRHYELYRRCKLEEMGFKDTDPDSKPFSLQETYEAKRNEFLGELQKKEEEMRQMFVQRVKEKEAELKEAEKELHEKFDRLKKLHQDEKKKLEDKKKSLDDEVNAFKQRKTAAELLQSQGSQAGGSQTLKRDKEKKNNPWLCTE

SEQ ID NO: 42244 - protein, 13 aa, Homo sapiens
IAIHRISPTDCGS

SEQ ID NO: 42245 - protein, 618 aa, Homo sapiens
IAVAEMFRCGGLAAGALKQKLVPLVRTVCVRSPRQRNRLPGNLFQRWHVPLELQMTRQMASSGASGGKIDNSVLVLIVGLSTVGAGAYAYKTMKEDEKRYNERISGLGLTPEQKQKKAALSASEGEEVPQDKAPSHVPFLLIGGGTAAFAAARSIRARDPGARVLIVSEDPELPYMRPPLSKELWFSDDPNVTKTLRFKQWNGKERSIYFQPPSFYVSAQDLPHIENGGVAVLTGKKVVQLDVRDNMVKLNDGSQITYEKCLIATGGTPRSLSAIDRAGAEVKSRTTLFRKIGDFRSLEKISREVKSITIIGGGFLGSELACALGRKARALGTEVIQLFPEKGNMGKILPEYLSNWTMEKVRREGVKVMPNAIVQSVGVSSGKLLIKLKDGRKVETDHIVAAVGLEPNVELAKTGGLEIDSDFGGFRVNAELQARSNIWVAGDAACFYDIKLGRRRVEHHDHAVVSGRLAGENMTGAAKPYWHQSMFWSDLGPDVGYEAIGLVDSSLPTVGVFAKATAQDNPKSATEQSGTGIRSESETESEASEITIPPSTPAVPQAPVQGEDYGKGVIFYLRDKVVVGIVLWNIFNRMPIARKIIKDGEQHEDLNEVAKLFNIHED

SEQ ID NO: 42246 - skipped

SEQ ID NO: 42247 - protein, 47 aa, Homo sapiens
VMHSPILQLERKHKVSSDSNQTETTAEKLPEDSFLKNKQKQSLDTWP

SEQ ID NO: 42248 - protein, 609 aa, Homo sapiens
VGAGRQATSRPAPGMRVLLAALGLLFLGALRAFPQDRPFEDTCHGNPSHYYDKAVRRCCYRCPMGLFPTQQCPQRPTDCRKQCEPDYYLDEADRCTACVTCSRDDLVEKTPCAWNSSRVCECRPGMFCSTSAVNSCARCFFHSVCPAGMIVKFPGTAQKNTVCEPASPGVSPACASPENCKEPSSGTIPQAKPTPVSPATSSASTMPVRGGTRLAQEAASKLTRAPDSPSSVGRPSSDPGLSPTQPCPEGSGDCRKQCEPDYYLDEAGRCTACVSCSRDDLVEKTPCAWNSSRTCECRPGMICATSATNSCARCVPYPICAAETVTKPQDMAEKDTTFEAPPLGTQPDCNPTPENGEAPASTSPTQSLLVDSQASKTLPIPTSAPVALSSTGKPVLDAGPVLFWVILVLVVVVGSSAFLLCHRRACRKRIRQKLHLCYPVQTSQPKLELVDSRPRRSSTQLRSGASVTEPVAEERGLMSQPLMETCHSVGAAYLESLPLQDASPAGGPSSPRDLPEPRVSTEHTNNKIEKIYIMKADTVIVGTVKAELPEGRGLAGPAEPELEEELEADHTPHYPEQETEPPLGSCSDVMLSVEEEGKEDPLPTAASGK

SEQ ID NO: 42249 - protein, 52 aa, Homo sapiens
LTIQNRQAQIEVVPSASALIIKALREPLRDRKKQKNIKHSGNITFDEIVNIA

SEQ ID NO: 42250 - protein, 37 aa, Homo sapiens
IRIWKLFFRKKPISLELENSFASDTKMKEPLLGGVLS

SEQ ID NO: 42251 - protein, 85 aa, Homo sapiens
VWPPCVQLSCRWQVQRKVICIPKSITPSRILQNIKVFDFTFSPEEMKQLNALNKNWRYIVPMLTVDGKRVPRDAGHPLYPFNDPY

SEQ ID NO: 42252 - protein, 110 aa, Homo sapiens
MLGCALEDYGVYWPLFVLIFHAISPIPHFIAKRVTYDSDATSSACRELAYFFTTGIVVSAFGFPVILARVAVIKWGACGLVLAGNAVIFLTIQGFFLIFGRGDDFSWEQW

SEQ ID NO: 42253 - protein, 226 aa, Homo sapiens
VQFLNMRDQFFTTSSCAGRILLLDRGINGFEVQKQNCCWLLVTHKLCVKDDVIVALKKANGDATLKFEPFVLHVQCRQLQDAQILHSMAIDSGFRNSGITVGKRGKTMLAVRSTHGLEVPLSHKGKLMVTEEYIDFLLNVANQKMEENKKRIERFYNCLQHALERETMTNLHPKIKEKNNSSYIHKKKRNPEKTRAQCITKESDEELENDDDDDLGINVTIFPEDY

SEQ ID NO: 42254 - protein, 26 aa, Homo sapiens
TAERREEEEEEVEEVEEVEEAPDRGG

SEQ ID NO: 42255 - protein, 4 aa, Homo sapiens
MCPP

SEQ ID NO: 42256 - protein, 57 aa, Homo sapiens
VILLVATILLCEKYTQKKKKHSDEGKEFEQIEQLKSDDSNGIENNVPRHRKNESLGQ

SEQ ID NO: 42257 - protein, 59 aa, Homo sapiens
LFIGGLSFETTDDSLREHFEKWGTLTDCVVMRDPQTKRSRGFGFVTYSCVEEVDAAMCA

SEQ ID NO: 42258 - protein, 78 aa, Homo sapiens
ILEDWEDSVNIGRKREWFKVEDAIKVLQCHKPVHAEYLEKLKLGCSPANGNSTVPSLPDNNALFVTAAQTSGLPSSVR

SEQ ID NO: 42259 - protein, 78 aa, Homo sapiens; identical to SEQ ID NO: 42258

SEQ ID NO: 42260 - protein, 110 aa, Homo sapiens
VSRPYSFIEFDTFIQKTKKLYIDSCARRNLGSINTELQDVQRIMVANIEEVLQRGEALSALDSKANNLSSLSKKYRQDAKYLNMHSTYAKLAAVAVFFIMLIVYVRFWWL

SEQ ID NO: 42261 - protein, 154 aa, Homo sapiens
TGLREAAGSGPREAPRRSGCKSPGLGTVGMLRPKALTQVLSQANTGGVQSTLLLNNEGSLLAYSGYGDTDARVTAAIASNIWAAYDRNGNQAFNEDNLKFILMDCMEGRVAITRVANLLLCMYAKETVGFGMLKAKAQALVQYLEEPLTQVAAS

SEQ ID NO: 42262 - protein, 16 aa, Homo sapiens
IHKILVCIFLNTVHVP

SEQ ID NO: 42263 - protein, 17 aa, Homo sapiens
IMKDILEKKVEKVVVPN

SEQ ID NO: 42264 - protein, 11 aa, Homo sapiens
ILKSPEIQRAL

SEQ ID NO: 42265 - protein, 524 aa, Homo sapiens
LRQYNIQKKEIVVKGDEVIFGEFSWPKNVKTNYVVWGTGKEGQPREYYTLDSILFLLNNVHLSHPVYVRRAATENIPVVRRPDRKDLLGYLNGEASTSASIDRSAPLEIGLQRSTQVKRAADEVLAEAKKPRIEDEECVRLDKERLAARLEGHKEGIVQTEQIRSLSEAMSVEKIAAIKAKIMAKKRSTIKTDLDDDITALKQRSFVDAEVDVTRDIVSRERVWRTRTTILQSTGKNFSKNIFAILQSVKAREEGRAPEQRPAPNAAPVDPTLRTKQPIPAAYNRYDQERFKGKEETEGFKIDTMGTYHGMTLKSVTEGASARKTQTPAAQPVPRPVSQARPPPNQKKGSRTPIIIIPAATTSLITMLNAKDLLQDLKFVPSDEKKKQGCQRENETLIQRRKDQMQPGGTAISVTVPYRVVDQPLKLMPQDWDRVVAVFVQGPAWQFKGWPWLLPDGSPVDIFAKIKAFHLKYDEVRLDPNVQKWDVTVLELSYHKRHLDRPVFLRFWETLDRYMVKHKSHLRF

SEQ ID NO: 42266 - protein, 4 aa, Homo sapiens
MCPP

SEQ ID NO: 42267 - protein, 68 aa, Homo sapiens
VTPQGSGGSGGSGGSRRRSGGRSSSSKTDSWRRAAAAAAGPGRVSRAEAGGESSPPPPPLPPPPPPPR

SEQ ID NO: 42268 - protein, 214 aa, Homo sapiens
VLCRTCSPWPSATMEYLIGIQGPDYVLVASDRVAASNIVQMKDDHDKMFKMSEKILLLCVGEAGDTVQFAEYIQKNVQLYKMRNGYELSPTAAANFTRRNLADCLRSRTPYHVNLLLAGYDEHEGPALYYMDYLAALAKAPFAAHGYGAFLTLSILDRYYTPTISRERAVELLRKCLEELQKRFILNLPTFSVRIIDKNGIHDLDNISFPKQGS

SEQ ID NO: 42269 - protein, 77 aa, Homo sapiens
MEIMQNLSSIQALEGSRELENLIGISCASHFLKREMQKTKELMTKVNKQKLFEKSTGLPHKASRHLDSYEFLKAILN

SEQ ID NO: 42270 - protein, 14 aa, Homo sapiens
KYKLCFLFGSIGVL

SEQ ID NO: 42271 - protein, 217 aa, Homo sapiens
VKMVLLTMIARVADGLPLAASMQEDEQSGRDLQQYQSQAKQLFRKLNEQSPTRCTLEAGAMTFHYIIEQGVCYLVLCEAAFPKKLAFAYLEDLHSEFDEQHGKKVPTVSRPYSFIEFDTFIQKTKKLYIDSRARRNLGSINTELQDVQRIMVANIEEVLQRGEALSALDSKANNLSSLSKKYRQDAKYLNMRSTYAKLAAVAVFFIMLIVYVRFWWL

SEQ ID NO: 42272 - protein, 4 aa, Homo sapiens
MCPP

SEQ ID NO: 42273 - protein, 149 aa, Homo sapiens
LARGAGWTHGRGMMVVGTGTSLALSSLLSLLLFAGMQMYSRQLASTEWLTIQGGLLGSGLFVFSLTAFNNLENLVFGKGFQAKIFPEILLCLLLALFASGLIHRVCVTTCFIFSMVGLYYINKISSTLYQAAAPVLTPAKVTGKSKKRN

SEQ ID NO: 42274 - protein, 5 aa, Homo sapiens
MRPWT

SEQ ID NO: 42275 - protein, 110 aa, Homo sapiens; identical to SEQ ID NO: 42260

SEQ ID NO: 42276 - protein, 49 aa, Homo sapiens
VAGKVTSSPSLSARDENTATLPPGCQRSLGGDVGRRCPRPAGHLPPAPR

SEQ ID NO: 42277 - protein, 10 aa, Homo sapiens
RMRLDTWTLK

SEQ ID NO: 42278 - protein, 16 aa, Homo sapiens
LSLLSLAVTLLSVLSF

SEQ ID NO: 42279 - protein, 21 aa, Homo sapiens
VVGSELIQKYLGDGPKLVFIW

SEQ ID NO: 42280 - protein, 666 aa, Homo sapiens
LAPAGVPCAFSPHSQAYFALASTDGHLRVWETANNRLHQEYVPSAHLSGTCTCLAWAPARLQAKESPQRKKRKSEAVGMSNQTDLLALGTAVGSILLYSTVKGELHSKLISGGHDNRVNCIQWHQDSGCLYSCSDDKHIVEWNVQTCKVKCKWKGDNSSVSSLCISPDGKMLLSAGRTIKLWVLETKEVYRHFTGHATPVSSLMFTTIRPPNESQPFDGITGLYFLSGAVHDRLLNVWQVRSENKEKSAVMSFTVTDEPVYIDLTLSENKEEPVKLAVVCRDGQVHLFEHILNGYCKKPLTSNCTIQIATPGKGKKSTPKPIPILAAGFCSDKMSLLLVYGSWFQPTIERVALNSREPHMCLVRDISNCWAPKVETAITKVRTPVMNSEAKVLVPGIPGHHAAIKPAPPQTEQVESKRKSGGNEVSIEERLGAMDIDTHKKGKEDLQTNSFPVLLTQGLESNDFEMLNKVLQTRNVNLIKKTVLRMPLHTIIPLLQELTKRLQGHPNSAVLMVQWLKCVLTVHASYLSTLPDLVPQLGTLYQLMESRVKTFQKLSHLHGKLILLITQVTASEKTKGATSPGQKAKLVYEEESSEEESDDEIADKDSEDNWDEDEEESESEKDEDVEEEDEDAEGKDEENGEDRDTASEKELNGDSDLDPENESEEE

SEQ ID NO: 42281 - protein, 7 aa, Homo sapiens
VVIYKSS

SEQ ID NO: 42282 - protein, 157 aa, Homo sapiens
LLRSQLYPEVPPEEFRPFLAKMRGILKSIASADMDFNQLEAFLTAQTKKQGGITSDQAAVISKFWKSHKTKIRESLMNQSRWNSGLRGLSWRVDGKSQSRHSAQIHTPVAIIELELGKYGQESEFLCLEFDEVKVNQILKTLSEVEESISTLISQPN

SEQ ID NO: 42283 - protein, 68 aa, Homo sapiens
VASDVPEELDFLVPKAGFFCPICSLFYSGEKAMTNHCKSTRHKQNTEKFMAKQRKEKEQNEAEERSSR

SEQ ID NO: 42284 - protein, 377 aa, Homo sapiens
LHKFSGYGQLCERGLEELIDYTGGLKHEILQSHGQDAELSGTLSLVLTQCCKRIKDTVQKLASDHKDIHSSVSRVGKAIDKNFDSDISSVGIDGCWQADSQRLLNEVMVEHFFRQGMLDVAEELCQESGLSVDPSQKEPFVELNRILEALKVRVLRPALEWAVSNREMLIAQNSSLEFKLHRLYFISLLMGGTTNQREALQYAKNFQPFALNHQKDIQVLMGSLVYLRQGIENSPYVHLLDANQWADICDIFTRDACALLGLSVESPLSVSFSAGCVALPALINIKAVIEQRQCTGVWNQKDELPIEVDLGKKCWYHSIFACPILRQQTTDNNPPMKLVCGHIISRDALNKMFNGSKLKCPYCPMEQSPGDAKQIFF

SEQ ID NO: 42285 - protein, 41 aa, Homo sapiens
VFSVMVSASEDATIKVWDYETGDFERTLKGRTHRLCTGHFI

SEQ ID NO: 42286 - protein, 88 aa, Homo sapiens
RMSQAEFEKAAEEVRHLKTKPSDEEMLFIYGHYKQATVGDINTERPGMLDFTGKAKWDAWNELKGTSKEDAMKAYINKVEELKKKYGI

SEQ ID NO: 42287 - protein, 243 aa, Homo sapiens
LAALATLADCCAAGAMSVSEIFVELQGFLAAEQDIREEIRKVVQSLEQTAREILTLLQGVHQGAGFQDIPKRCLKAREHFGTVKTHLTSLKTKFPAEQYYRFHEHWRFVLQRLVFLAAFVVYLETETLVTREAVTEILGIEPDREKGFHLDVEDYLSGVLILASELSRLSVNSVTAGDYSRPLHISTFINELDSGFRLLNLKNDSLRKRYDGLKYDVKKVEEVVYDLSIRGFNKETAAACVEK

SEQ ID NO: 42288 - protein, 42 aa, Homo sapiens
LNRAALEISERQSFTMLPSPVLNSWTQAIFPPLPTRVLGLQV

SEQ ID NO: 42289 - protein, 92 aa, Homo sapiens
IHQCISINMLADKLNMTPEEAERWIVNLIRNARLDAKIDSKLGHVVMGNNAVSPYQQVIEKTKSLSFRSQMLAMNIEKKILNIDCCSNKYVA

SEQ ID NO: 42290 - protein, 52 aa, Homo sapiens
IGKIPENTRKKRKSERKARRVHLVRVKLKILKHNPSLLSVQKRSLLYLKIDS

SEQ ID NO: 42291 - protein, 11 aa, Homo sapiens
MRNFPEKISSL

SEQ ID NO: 42292 - protein, 57 aa, Homo sapiens
MKMETDIKRNKKTLLDQHGQYPIWMNQRQRKRLKAKREKRKEKNKAKAVKVAKGLAW

SEQ ID NO: 42293 - protein, 4 aa, Homo sapiens
MDFT

SEQ ID NO: 42294 - protein, 306 aa, Homo sapiens
LGAAAAMILLEVNNRIIEETLALKFENAAAGNKPEAVEVTFADFDGVLYHISNPNGDKTKVMVSISLKFYKELQAHGADELLKRVYGSFLVNPESGYNVSLLYDLENLPASKDSIVHQAGMLKRNCFASVFEKYFQFQEEGKEGENRAVIHYRDDETMYVESKKDRVTVVFSTVFKDDDDVVIGKVFMQEFKEGRRASHTAPQVLFSHREPPLELKDTDAAVGDNIGYITFVLFPRHTNASARDNTINLIHTFRDYLHYHIKCSKAYIHTRMRAKTSDFLKVLNRARPDAEKKEMKTITGKTFSSR

SEQ ID NO: 42295 - protein, 52 aa, Homo sapiens
LILYRLGYFDDALEDFKKVLDLNPGFQDATLSLKQTILDKEEKQRRNVAKNY

SEQ ID NO: 42296 - protein, 478 aa, Homo sapiens
ILNKEKKAVSPLLLTTTNSSEGLSMGNYIGLINRIAQKKRLTVNYEQCASGVHGPEGFHYKCKMGQKEYSIGTGSTKQEAKQLAAKLAYLQILSEETSVKSDYLSSGSFATTCESQSNSLVTSTLASESSSEGDFSADTSEINSNSDSLNSSSLLMNGLRNNQRKAKRSLAPRFDLPDMKETKYTVDKRFGMDFKEIELIGSGGFGQVFKAKHRIDGKTYVIKRVKYNNEKAEREVKALAKLDHVNIVHYNGCWDGFDYDPETSDDSLESSDYDPENSKNSSRSKTKCLFIQMEFCDKGTLEQWIEKRRGEKLDKVLALELFEQITKGVDYIHSKKLIHRDLKPSNIFLVDTKQVKIGDFGLVTSLKNDGKRTRSKGTLRYMSPEQISSQDYGKEVDLYALGLILAELLHVCDTAFETSKFFTDLRDGIISDIFDKKEKTLLQKLLSKKPEDRPNTSEILRTLTVWKKSPEKNERHTC

SEQ ID NO: 42297 - protein, 4 aa, Homo sapiens
MLAR

SEQ ID NO: 42298 - protein, 22 aa, Homo sapiens
TELPAADPFALAPFPSKSGKKP

SEQ ID NO: 42299 - protein, 355 aa, Homo sapiens
KQRSEDSMYTAIPQSGSPFPGSVQDPGLHVWRVEKLKPVPVAQENQGVFFSGDSYLVLHNGPEEVSHLHLWIGQQSSRDEQGACAVLAVHLNTLLGERPVQHREVQGNESDLFMSYFPRGLKYQEGGVESAFHKTSTGAPAAIKKLYQVKGKKNIRATERALNWDSFNTGDCFILDLGQNIFAWCGGKSNILERNKARDLALAIRDSERQGKAQVEIVTDGEEPAEMIQVLGPKPALKEGNPEEDLTADKANAQAAALYKVSDATGQMNLTKVADSSPFALELLISDDCFVLDNGLCGKIYIWKGRKANEKERQAALQVAEGFISRMQYAPNTQVEILPQGHESPIFKQFFKDWK

SEQ ID NO: 42300 - protein, 4 aa, Homo sapiens
MLKN

SEQ ID NO: 42301 - protein, 26 aa, Homo sapiens
LLLTLGYVLYASAMTLLTERGKLHQP

SEQ ID NO: 42302 - protein, 287 aa, Homo sapiens
ITAKPGKTPIQVLHEYGMKTKNIPVYECERSDVQIHVPTFTFRVTVGDITCTGEGTSKKLAKHRAAEAAINILKANASICFAVPDPLMPDPSKQPKNQLNPIGSLQELAIHHGWRLPEYTLSQEGGPAHKREYTTICRLESFMETGKGASKKQAKRNAAEKFLAKFSNISPENHISLTNVVGHSLGCTWHSLRNSPGEKINLLKRSLLSIPNTDYIQLLSEIAKEQGFNITYLDIDELSANGQYQCLAELSTSPITVCHGSGISCGNAQSDAAHNALQYLKIIAERK

SEQ ID NO: 42303 - protein, 20 aa, Homo sapiens
VFIVDVKANKHQIKEATKNL

SEQ ID NO: 42304 - protein, 18 aa, Homo sapiens
IKLMAHQLESILAMRKRM

SEQ ID NO: 42305 - protein, 47 aa, Homo sapiens
RLLLLLLVAASAMVRSEASANLGGVPSKRLKMQYATGPLLKFQICVS

SEQ ID NO: 42306 - protein, 23 aa, Homo sapiens
MSFDHPEKNGPWPADPINLPSHG

SEQ ID NO: 42307 - protein, 11 aa, Homo sapiens
RRHWRRTKLGL

SEQ ID NO: 42308 - protein, 194 aa, Homo sapiens
IIPDGTPNGDVSHEPVAGAITVVSQEAAQVLESAGEGPLDVRLRKLAGEKEELLSQIRKLKLQLEEERQKCSRNDGTVGDLAGLQNGSDLQFIEMQRDANRQISEYKFKLSKAEQDITTLEQSISRLEGQVLRYKTAAENAEKVEDELKAEKRKLQRELRTALDKIEEMEMTNSHLAKRLEKMKANRTALLAQQ

SEQ ID NO: 42309 - protein, 478 aa, Homo sapiens
VGSMSATAAARKRGKPASGAGAGAGAGKRRRKADSAGDRGKSKGGGKMNEEISSDSESESLAPRKPEEEEEEELEETAQEKKLRLAKLYLEQLRQQEEEKAEARAFEEDQVAGRLKEDVLEQRGRLQKLVAKEIQAPASADIRVLRGHQLSITCLVVTPDDSAIFSAAKDCSIIKWSVESGRKLHVIPRAKKGAEGKPPGHSSHVLCMAISSDGKYLASGDRSKLILIWEAQSCQHLYTFTGHRDAVSGLAFRRGTHQLYSTSHDRSVKVWNVAENSYVETLFGHQDAVAALDALSRECCVTAGGRDGTVRVWKIPEESQLVFYGHQGSIDCIHLINEEHMVSGADDGSVALWGLSKKRPLALQREAHGLRGEPGLEQPFWISSVAALLNTDLVATGSHSSCVRLWQCGEGFRQLDLLCDIPLVGFINSLKFSSSGDFLVAGVGQEHRLGRWWRIKEARNSVCIIPLRRVPVPPAAGS

SEQ ID NO: 42310 - protein, 398 aa, Homo sapiens
VTAGSGPSRAAWGARIAHPVFARCACRPAPSSRPSRRVASRPLGCCQPGADASRWQRGHFLTPWPLTRLHFPSRRGAGRYSGPRMQNVINTVKGKALEVAEYLTPVLKESKFKETGVITPEEFVAAGDHLVHHCPTWQWATGEELKVKAYLPTGKQFLVTKNVPCYKRCKQMEYSDELEAIIEEDDGDGGWVDTYHNTGITGITEAVKEITLENKDNIRLQDCSALCEEEEDEDEGEAADMEEYEESGLLETDEATLDTRKIVEACKAKTDAGGEDAILQTRTYDLYITYDKYYQTPRLWLFGYDEQRQPLTVEHMYEDISQDHVKKTVTIENHPHLPPPPMCSVHPCRHAEVMKKIIETVAEGGGELGVHMYLLIFLKFVQAVIPTIEYDYTRHFTM

SEQ ID NO: 42311 - protein, 428 aa, Homo sapiens
LGACKLLLRLLDCCCKTFLLTVKHLGLQEFIILNLVMVGLVSRLWVLYKGVLKRLILLYEPLFGLLQEVARIQPMPYFKDFTFPSDITEFLGQPYFEAFKKKMPIAFAAKGINKLLNKLFLINEQSPRASEETLLGISKKAKQMKINVQNNVDLGQPVKNKRVFKEESSEFDVRAFCNQLKHKATQETSFDFKCSQSRLKTTKYSSQKVIGTPHAKSFVQRFREAESFTQLSEEIQMAVVWCRSKKLKAQAIFLGNKLLKSNRLKHLEAQGTSLPKKLECIKTSICNHLLRGSGIKTSKHHLRQRRSQNKFLRRQRKPQRKLQSTLLREIQQFSQGTRKSATDTSAKWRLSHCTVHRTDLYPNSKQLLNSGVSMPVIQTKEKMIHENLRGIHENETDSWTVMQINKNSTSGTIKETDDIDDIFALMGV

SEQ ID NO: 42312 - protein, 4 aa, Homo sapiens
MTVS

SEQ ID NO: 42313 - protein, 439 aa, Homo sapiens
KMAAGLRKRGRSGSAAQAEGLCKQWLQRAWQERRLLLREPRYTLLVAACLCLAEVGITFWVIHRVAYTEIDWKAYMAEVEGVINGTYDYTQLQGDTGPLVYPAGFVYIFMGLYYATSRGTDIRMAQNIFAVLYLATLLLVFLIYHQTCKVPPFVFFFMCCASYRVHSIFVLRLFNDPVAMVLLFLSINLLLAQRWGWGCCFFSLAVSVKMNVLLFAPGLLFLLLTQFGFRGALPKLGICAGLQVVLGLPFLLENPSGYLSRSFDLGRQFLFHWTVNWRFLPEALFLHRAFHLALLTAHLTLLLLFALCRWHRTGESILSLLRDPSKRKVPPQPLTPNQIVSTLFTSNFIGICFSRSLHYQFYVWYFHTLPYLLWAMPARWLTHLLRLLVLGLIELSWNTYPSTSCSSAALHICHAVILLQLWLGPQPFPKSTQHSKKAH

SEQ ID NO: 42314 - protein, 120 aa, Homo sapiens
KIHRRVLKKNPLKNLRIMLKLNPYAKTMRRNTILRQARNHKLRVDKAAAAAAALPAKSDEKAAVAGKKPVVGKKGKKAAVGVKKQKKPLVGKKAAATKKPAPEKKPAEKKPTTEEKKPAA

SEQ ID NO: 42315 - protein, 40 aa, Homo sapiens
LLAIAMVALIPGTLIKKFSQKHLQLNETSTANHIHSRKDT

SEQ ID NO: 42316 - protein, 13 aa, Homo sapiens
MMAMIGVVLIFSQ

SEQ ID NO: 42317 - protein, 38 aa, Homo sapiens
ITMDDGNIRLSRNPSGNGRSLFSIRQWTYRSWGNGCSE

SEQ ID NO: 42318 - protein, 399 aa, Homo sapiens
MDYRVNIFLRQKWNDPRLKLPSDFRGSDALTVDPTMYKCLWKPDLFFANEKSANFHDVTQENILLFIFRDGDVLVSMRLSITLSCPLDLTLFPMDTQRCKMQLESFGYTTDDLRFIWQSGDPVQLEKIALPQFDIKKEDIEYGNCTKYYKGTGYYTCVEVIFTLRRQVGFYMMGVYAPTLLIVVLSWLSFWINPDASAARVPLGIFSVLSLASECTTLAAELPKVSYVKALDVWLIACLLFGFASLVEYAVVQVMLNNPKRVEAEKARIAKAEQADGKGGNVAKKNTVNGTGTPVHISTLQVGETRCKKVCTSKSDLRSNDFSIVGSLPRDFELSNYDCYGKPIEVNNGLGKSQAKNNKKPPPAKPVIPTAAKRIDLYARALFPFCFLFFNVIYWSIYL

SEQ ID NO: 42319 - protein, 275 aa, Homo sapiens
IGSAGLNLFWKLCVTVMRLVILDNYDLASEWAAKYICNRIIQFKPGQDRYFTLGLPTGSTPLGCYKKLIEYHKNGHLSFKYVKTFNMDEYVGLPRNHPESYHSYMWNNFFKHIDIDPNNAHILDGNAADLQAECDAFENKIKEAGGIDLFVGGIGPDGHIAFNEPGSSLVSRTRLKTLAMDTILANAKYFDGDLSKVPTMALTVGVGTVMDAREVMILITGAHKAFALYKAIEEGVNHMWTVSAFQQHPRTIFVCDEDATLELRVKTVKYFKGEH

SEQ ID NO: 42320 - protein, 258 aa, Homo sapiens
IGSAGLNLFWKLCVTVMRLVILDNYDLASEWAAKYICNRIIQFKPGQDRYFTLGLPTGLPRNHPESYHSYMWNNFFKHIDIDPNNAHILDGNAADLQAECDAFENKIKEAGGIDLFVGGIGPDGHIAFNEPGSSLVSRTRLKTLAMDTILANAKYFDGDLSKVPTMALTVGVGTVMDAREVMILITGAHKAFALYKAIEEGVNHMWTVSAFQQHPRTIFVCDEDATLELRVKTVKYFKGLMHVHNKLVDPLFSMKDGN

SEQ ID NO: 42321 - protein, 34 aa, Homo sapiens
LGVFFGLVFTWLACKGQGSMDEGTADERAPLIRT

SEQ ID NO: 42322 - protein, 111 aa, Homo sapiens
LEPLWLLSAEWKRVLLFVSLAMALQLSREQGITLRGSAEIVAEFFSFGINSILYQRGIYPSETFTRVQKYGLTLLVTTDLELIKYLNNVVEQLKVHPEKSLRKLSRMKSVQ

SEQ ID NO: 42323 - protein, 226 aa, Homo sapiens
LEPLWLLSAEWKRVLLFVSLAMALQLSREQGITLRGSAEIVAEFFSFGINSILYQRGIYPSETFTRVQKYGLTLLVTTDLELIKYLNNVVEQLKDWLYKCSVQKLVVVISNIESGEVLERWQFDIECDKTAKDDSAPREKSQKAIQDEIRSVIRQITATVTFLPLLEVSCSFDLLIYTDKDLVVPEKWEESGPQFITNSEEVRLRSFTTTIHKVNSMVAYKIPVND

SEQ ID NO: 42324 - protein, 10 aa, Homo sapiens
IIFMNVFSLL

SEQ ID NO: 42325 - protein, 38 aa, Homo sapiens
IVEKQGDTIEYLKRHNALLSKRLLALTSSDLGCQPSRT

SEQ ID NO: 42326 - protein, 25 aa, Homo sapiens
MVAKKDVHMPKHPELADKNVPNVHS

SEQ ID NO: 42327 - protein, 428 aa, Homo sapiens
LFLLWVLIMETKRVEIPGSVLDDLCSRFILHIPSEERDNAIRVCFQIELAHWFYLDFYMQNTPGLPQCGIRDFAKAVFSHCPFLLPQGEDVEKVLDEWKEYKMGVPTYGAIILDETLENVLLVQGYLAKSGWGFPKGKVNKEEAPHDCAAREVFEETGFDIKDYICKDDYIELRINDQLARLYIIPGIPKDTKFNPKTRREIRNIEWFSIEKLPCHRNDMTPKSKLGLAPNKFFMAIPFIRPLRDWLSRRFGDSSDSDNGFSSTGSTPAKPTVEKLSRTKFRHSQQLFPDGSPGDQWVKHRQPLQQKPYNNHSEMSDLLKGKNQSMRGNGRKQYQDSPNQKKRTNGLQPAKQQNSLMKCEKKLHPRKLQDNFETDAVYDLPSSSEDQLLEHAEGQPVACNGHCKFPFSSRAFLSFKFDHNAIMKILDL

SEQ ID NO: 42328 - protein, 36 aa, Homo sapiens
MDTYSKMGEVFTDLCVYFFTFIFCHELLDYWGSEVP

SEQ ID NO: 42329 - protein, 27 aa, Homo sapiens
LVLSLKKILQSLLILFLGVTIFEAKLT

SEQ ID NO: 42330 - protein, 97 aa, Homo sapiens
KKRRNNGRAKKGRGHVQPIRCTNCARCVPKDKAIKKFVIRNIVEAAAVRDMSEASVFDAYVLPKLYVKLHYCLSCAVLSKVVRNRSREARKDRTPPP

SEQ ID NO: 42331 - protein, 550 aa, Homo sapiens
MATAEKQKHDGRVKIGHYILGDTLGVGTFGKVKVGKHELTGHKVAVKILNRQKIRSLDVVGKIRREIQNLKLFRHPHIIKLYQVISTPSDIFMVMEYVSGGELFDYICKNGRLDEKESRRLFQQILSGVDYCHRHMVVHRDLKPENVLLDAHMNAKIADFGLSNMMSDGEFLRTSCGSPNYAAPEVISGRLYAGPEVDIWSSGVILYALLCGTLPFDDDHVPTLFKKICDGIFYTPQYLNPSVISLLKHMLQVDPMKRATIKDIREHEWFKQDLPKYLFPEDPSYSSTMIDDEALKEVCEKFECSEEEVLSCLYNRNHQDPLAVAYHLIIDNRRIMNEAKDFYLATSPPDSFLDDHHLTRPHPERVPFLVAETPRARHTLDELNPQKSKHQGVRKAKWHLGIRSQSRPNDIMAEVCRAIKQLDYEWKVVNPYYLRVRRKNPVTSTYSKMSLQLYQVDSRTYLLDFRSIDDEITEAKSGTATPQRSGSVSNYRSCQRSDSDAEAQGKSSEVSLTSSVTSLDSSPVDLTPRPGSHTIEFFEMCANLIKILAQ

SEQ ID NO: 42332 - protein, 97 aa, Homo sapiens
IRKDDEVQVVRGHYKGQQIGKVVQVYRKKYVIYIERVQREKANGTTVHVGIHPSKVVITRLKLDKDCEKILERKAKSCQVGKEKGKYKEETIEKMQE

SEQ ID NO: 42333 - protein, 19 aa, Homo sapiens
IQLSSLATCLVFLNLVFRL

SEQ ID NO: 42334 - protein, 141 aa, Homo sapiens
KMAEEPQSVLQLPTSIAAGGEGLTDVSPETTTPEPPSSAAVSPGTEEPAGDTKKKIDILLKAVGDTPIMKTKKWAVERTRTIQGLIDFIKKFLKLVASEQLFIYVNQSFAPSPDQEVGTLYECFGSDGKLVLHYCKSQAWG

SEQ ID NO: 42335 - protein, 22 aa, Homo sapiens
VLCAVKKRLPGTGGILCWLELE

SEQ ID NO: 42336 - protein, 27 aa, Homo sapiens
IFGRAAHSLLSSVFCAWTLWAHPGHGG

SEQ ID NO: 42337 - protein, 11 aa, Homo sapiens
IDYAEFAKSLQ

SEQ ID NO: 42338 - protein, 28 aa, Homo sapiens
MSFQRNVRSLGADCQGKGWKEVFLAQPV

SEQ ID NO: 42339 - protein, 111 aa, Homo sapiens
IELEEPPLVLAAANVVRNISYKYREDLSAHLMVAGWDQREGGQVYGTLGGMLTRQPFAIGGSGSTFIYGYVDAAYKPGMSPEECRRFTTDGNQPSGRVPGEGFETWEGSRL

SEQ ID NO: 42340 - protein, 420 aa, Homo sapiens
RMNVHRGSDSDRLLRQEASCLVDDTLAVAQEKEANSLASSGPHNLTYPLGPRNEDLSLDYASQPANLQFPHIMPLAEDIKGSCFQSGNKRNHEPFIAPERFGNSSVGFGSNSHSQAPEKVTLLVDGTRFVVNPQIFTAHPDTMLGRMFGPGREYNFTRPNEKGEYEIAEGISATVFRTVLDYYKTGIINCPDGISIPDLRDTCDYLCINFDFNTIRCQDLSALLHELSNDGAHKQFDHYLEELILPIMVGCAKKGERECHIVVLTDEDSVDWDEDHPPPMGEEYSQILYSSKLYRFFKYIENRDVAKTVLKERGLKNIRIGIEGYPTCKEKIKRRPGGRSEVIYNYVQRPFIQMSWEKEEGKSRHVDFQCVRSKSLTNLVAAGDDVLEDQEILMHHPPQVDELDRLNAPLSQMASNDFQD

SEQ ID NO: 42341 - protein, 447 aa, Homo sapiens
ILTMREIVHIQAGQCGNQIGAKFWEVISDEHGIDPTGTYHGDSDLQLDRISVYYNEATGGKYVPRAILVDLEPGTMDSVRSGPFGQIFRPDNFVFGQSGAGNNWAKGHYTEGAELVDSVLDVVRKEAESCDCLQGFQLTHSLGGGTGSGMGTLLISKIREEYPDRIMNTFSVVPSPKVSDTVVEPYNATLSVHQLVENTDETYCIDNEALYDICFRTLKLTTPTYGDLNHLVSATMSGVTTCLRFPGQLNADLRKLAVNMVPFPRLHFFMPGFAPLTSRGSQQYRALTVPELTQQVFDAKNMMAACDPRHGRYLTVAAVFRGRMSMKEVDEQMLNVQNKNSSYFVEWIPNNVKTAVCDIPPRGLKMAVTFIGNSTAIQELFKRISEQFTAMFRRKAFLHWYTGEGMDEMEFTEAESNMNDLVSEYQQYQDATAEEEEDFGEEAEEEA

SEQ ID NO: 42342 - protein, 5 aa, Homo sapiens
MPRAG

SEQ ID NO: 42343 - protein, 442 aa, Homo sapiens
VMAVVPASLSGQDVGSFAYLTIKDRIPQILTKVIDTLHRHKSEFFEKHGEEGVEAEKKAISLLSKLRNELQTDKPFIPLVEKFVDTDIWNQYLEYQQSLLNESDGKSRWFYSPWLLVECYMYRRIHEAIIQSPPIDYFDVFKESKEQNFYGSQESIIALCTHLQQLIRTIEDLDENQLKDEFFKLLQISLWGNKCDLSLSGGESSSQNTNVLNSLEDLKPFILLNDMEHLWSLLSNCKKTREKASATRVYIVLDNSGFELVTDLILADFLLSSELATEVHFYGKTIPWFVSDTTIHDFNWLIEQVKHSNHKWMSKCGADWEEYIKMGKWVYHNHIFWTLPHEYCAMPQVAPDLYAELQKAHLILFKGDLNYRKLTGDRKWEFSVPFHQALNGFHPAPLCTIRTLKAEIQVGLQPGQGEQLLASEPSWWTTGKYGIFQYDGPL

SEQ ID NO: 42344 - protein, 208 aa, Homo sapiens
LTLYGCSWRATESSVRKKRRGFSEIVSAMALRSRFWGLFSVCRNPGCRFAALSTSSEPAAKPEVDPVENEAVAPEFTNRNPRNLELLSVARKERGWRTVFPSREFWHRLRVIRTQHHVEALVEHQNGKVVVSASTREWAIKKHLYSTRNVVACESIGRVLAQRCLEAGINFMVYQPTPWEAASDSMKRLQSAMTEGGVVLREPQRIYE

SEQ ID NO: 42345 - protein, 10 aa, Homo sapiens
MVAFLILFAM

SEQ ID NO: 42346 - protein, 17 aa, Homo sapiens
MPPFTPELKRKQTTCHT

SEQ ID NO: 42347 - protein, 32 aa, Homo sapiens
MRGSENCGEGRLERRFLSRNSEIPTTSSLRGI

SEQ ID NO: 42348 - protein, 224 aa, Homo sapiens
LPLVPEFLILNMSETAPAAPAAAPPAEKAPVKKKAAKKAGGTPRKASGPPVSELITKAVAASKERSGVSLAALKKALAAAGYDVEKNNSRIKLGLKSLVSKGTLVQTKGTGASGSFKLNKKAASGEAKPKVKKAGGTKPKKPVGAAKKPKKAAGGATPKKSAKKTPKKAKKPAAATVTKKVAKSPKKAKVAKPKKAAKSAAKAVKPKAAKPKVVKPKKAAPKKK

SEQ ID NO: 42349 - protein, 46 aa, Homo sapiens
LLLTLLLQLPTPAARRGPVPTGGLAEGAVVPRGPGTAVVCALGAWR

SEQ ID NO: 42350 - protein, 329 aa, Homo sapiens [sequence omitted]

SEQ ID NO: 42351 - protein, 127 aa, Homo sapiens
LGSGSRGRDHSGSGVGTAMAGALVRKAADYVRSKDFRDYLMSTHFWGPVANWGLPIAAINDMKKSPEIISGRMTFALCCYSLTFMRFAYKVQPRNWLLFACHATNEVAQLIQGGRLIKHEMTKTASA

SEQ ID NO: 42352 - protein, 402 aa, Homo sapiens
LGSVFMILLIIVYWDSAGAAHFYLHTSFSRPHTGPPLPTPGPDRDRELTADSDVDEFLDKFLSAGVKQSDLPRKETEQPPAPGSMEESVRGYDWSPRDARRSPDQGRQQAERRSVLRGFCANSSLAFPTKERAFDDIPNSELSHLIVDDRHGAIYCYVPKVACTNWKRVMIVLSGSLLHRGAPYRDPLRIPREHVHNASAHLTFNKFWRRYGKLSRHLMKVKLKKYTKFLFVRDPFVRLISAFRSKFELENEEFYRKFAVPMLRLYANHTSLPASAREAFRAGLKVSFANFIQYLLDPHTEKLAPFNEHWRQVYRLCHPCQIDYDFVGKLETLDEDAAQLLQLLQVDRQLRFPPSYRNRTASSWEEDWFAKIPLAWRQQLYKLYEADFVLFGYPKPENLLRD

SEQ ID NO: 42353 - protein, 113 aa, Homo sapiens
VMASVFVCLLLSGLAVFFLFPRSIDVKYIGVKSAYVSYDVQKRTIYLNITNTLNITNNNYYSVEVENITAQVQFSKTVIGKARLNNITIIGPLDMKQIDYTVPTVIAEEMSYM

SEQ ID NO: 42354 - protein, 418 aa, Homo sapiens
MGQQQKNLEGYVGFANLPNQVYRKSVKRGFEFTLMVVGESGLGKSTLINSLFLTDLYSPEYPGPSHRIKKTVQVEQSKVLIKEGGVQLLLTIVDTPGFGDAVDNSNCWQPVIDYIDSKFEDYLNAESRVNRRQMPDNRVQCCLYFIAPSGHGLKPLDIEFMKRLHEKVNIIPLIAKADTLTPEECQQFKKQIMKEIQEHKIKIYEFPETDDEEENKLVKKIKDRLPLAVVGSNTIIEVNGKRVRGRQYPWGVAEVENGEHCDFTILRNMLIRTHMQDLKDVTNNVHYENYRSRKLAAVTYNGVDNNKNKGQLTKSPLAQMEEERREHVAKMKKMEMEMEQVFEMKVKEKVQKLKDSEAELQRRHEQMKKNLEAQHKELEEKRRQFEDEKANWEAQQRILEQQNSSRTLEKNKKKGKIF

SEQ ID NO: 42355 - protein, 236 aa, Homo sapiens
LGLPSGRGRLTAMPGRAPLRTVPGALGAWLLGGLWAWTLCGLCSLGAVGAPRPCQAPQQWEGRQVMYQQSSGRNSRALLSYDGLNQRVRVLDERKALIPCKRLFEYILLYKDGVMFQIDQATKQCSKMTLTQPWDPLDIPQNSTFEDQYSIGGPQEQITVQEWSDRKSARSYETWIGIYTVKDCYPVQETFTINYSVILSTRFFDIQLGIKDPSVFTPPSTCQMAQLEKMSEDCSW

SEQ ID NO: 42356 - protein, 66 aa, Homo sapiens
VAASSILVFFGASILVLPKCPDPKQESVAEIGTWERNNLGNMKVMLVAKGRQLDSVGRAVADPSVV

SEQ ID NO: 42357 - protein, 7 aa, Homo sapiens
VMWTFVL

SEQ ID NO: 42358 - protein, 279 aa, Homo sapiens
LPRTVELFYDVLSPYSWLGFEILCRYQNIWNINLQLRPSLITGIMKDSGNKPPGLLPRKGLYMANDLKLLRHHLQIPIHFPKDFLSVMLEKGSLSAMRFLTAVNLEHPEMLEKASRELWMRVWSRVSVGLWESSGRTLDDFLTFPRHVFRVMILPPPGGSTVLPVTPLSPHRLPAVFSSSQNEDITEPQSILAAAEKAGMSAEQAQGLLEKIATPKVKNQLKETTEAACRYGAFGLPITVAHVDGQTHMLFGSDRMELLAHLLGEKWMGPIPPAVNARL

SEQ ID NO: 42359 - protein, 19 aa, Homo sapiens
KMPRPGIVAEHPRPAEVPP

SEQ ID NO: 42360 - protein, 144 aa, Homo sapiens
KSKSNSSAAREPNGFPSDASANSSLLLEFQDENSNQSSVSDVYQLKVDSSTNSSPSPQQSESLSPAHTSDFRTDDSQPPTLGQEILEEPSLPSSEVADEPPTLTKEEPVPLETQVVEEEEDSGAPPLKRFCVDQPTVPQTASES

SEQ ID NO: 42361 - protein, 82 aa, Homo sapiens
LSPAHTSDFRTDDSQPPTLGQEILEEPSLPSSEVADEPPTLTKEEPVPLETQVVEEEEDSGAPPLKRFCVDQPTVPQTASES

SEQ ID NO: 42362 - protein, 20 aa, Homo sapiens
MIFSMLRKLPKVTCSTEKSA

SEQ ID NO: 42363 - protein, 99 aa, Homo sapiens
ITINKDTKVPNACLFTINKEDHTLGNIIKSQLLKDPQVLFAGYKVPHPLEHKIIIRVQTTPDYSPQEAFTNAITDLISELSLLEERFRVAIKDKQEGIE

SEQ ID NO: 42364 - protein, 65 aa, Homo sapiens
KKKRLVQSPNSYFMDVKCPRCYKITTVFSHAQTVVLCVGCSTVLCQPIGGKARLTEGCSFRRKQH

SEQ ID NO: 42365 - protein, 85 aa, Homo sapiens
LLRMMTSWAIVCSVWYLPPMTREADEDAVQFANRVKSAIARQGGLVDLLWDGGLKREKVKDTFKEEQQKLYSKMIVGNHKDRSRS

SEQ ID NO: 42366 - protein, 27 aa, Homo sapiens
RRTGERKRKSVRGCIVDANRSALTWLL

SEQ ID NO: 42367 - protein, 100 aa, Homo sapiens
KWLDGIRKWYYNAAGFNKLGLMRDDTIYEDEDVKEAIRRLPENLYNDRMFRIKRALDLNLKHQILPKEQWTKYEEENFYLEPYLKEVIRERKEREEWAKK

SEQ ID NO: 42368 - protein, 25 aa, Homo sapiens
LTGSLMEEPISLHTWFHLIIYRHQL

SEQ ID NO: 42369 - protein, 28 aa, Homo sapiens
RIVDILYATDEGFVTSDEGGPQEEQEEY

SEQ ID NO: 42370 - protein, 86 aa, Homo sapiens
RLVPKMFTMGFLKTVLLGTSACVSPPTMPAFFSLPAERRLQAWPQSEAPLSVSSCFQNRPPEPASFQNLRPEPASLQNLRTEPTSF

SEQ ID NO: 42371 - protein, 149 aa, Homo sapiens
MITLGDAVHNFADGLAVGAAFASSWKTGLATSLAVFCHELPHELGDFAALLHAGLSVRQALLLNLASALTAFAGLYVALAVGVSEESEAWILAVATGLFLYVALCDMLPAMLKVRDPRPWLLFLLHNVGLLGGWTVLLLLSLYEDDITF

SEQ ID NO: 42372 - protein, 356 aa, Homo sapiens
LPAQLRGGAERGAACESPAAPDPSLGAACRPRPQAQSAVPRRVMPNTAMKKKVLLMGKSGSGKTSMRSIIFANYIARDTRRLGATIDVEHSHVRFLGNLVLNLWDCGGQDTFMENYFTSQRDNIFRNVEVLIYVFDVESRELEKDMHYYQSCLEAILQNSPDAKIFCLVHKMDLVQEDQRDLIFKEREEDLRRLSRPLECACFRTSIWDETLYKAWSSIVYQLIPNVQQLEMNLRNFAQIIEADEVLLFERATFLVISHYQCKEQRDVHRFEKISNIIKQFKLSCSKLAASFQSMEVRNSNFAAFIDIFTSNTYVMVVMSDPSIPSAATLINIRNARKHFEKLERVDGPKHSLLMR

SEQ ID NO: 42373 - protein, 602 aa, Homo sapiens [sequence omitted]

SEQ ID NO: 42374 - protein, 379 aa, Homo sapiens
LTHRPGRRTMDAPRQVVNFGPGPAKLPHSVLLEIQKELLDYKGVGISVLEMSHRSSDFAKIINNTENLVRELLAVPDNYKVIFLQGGGCGQFSAVPLNLIGLKAGRCADYVVTGAWSAKAAEEAKKFGTINIVHPKLGSYTKIPDPSTWNLNPDASYVYYCANETVHGVEFDFIPDVKGAVLVCDMSSNFLSKPVDVSKFGVIFAGAQKNVGSAGVTVVIVRDDLLGFALRECPSVLEYKVQAGNSSLYNTPPCFSIYVMGLVLEWIKNNGGAAAMEKLSSIKSQTIYEIIDNSQGFYVCPVEPQNRSKMNIPFRIGNAKGDDALEKRFLDKALELNMLSLKGHRSVGGIRASLYNAVTIEDVQKLAAFMKKFLEMHQL

SEQ ID NO: 42375 - protein, 13 aa, Homo sapiens
VAGVVAAMVKFAL

SEQ ID NO: 42376 - protein, 35 aa, Homo sapiens
LRQRWWYFCFVQNWFVACLIPVRGLLTQDSIENAY

SEQ ID NO: 42377 - protein, 637 aa, Homo sapiens
KSTKTAQEKNRFHKNSDSGSSKTFPTRKVAKEGGPKVTSRNFEKSITKLGKKGVKQFKNKQQGDKSPKNKFQPANKFNKKRKFQPDGRSDESAAKKPKWDDFKKKKKELKQSRQLSDKTNYDIVVRAKQMWEILRRKDCDKEKRVKLMSDLQKLIQGKIKTIAFAHDSTRVIQCYIQYGNEEQRKQAFEELRDDLVELSKAKYSRNIVKKFLMYGSKPQIAEIIRSFKGHVRKMLRHAEASAIVEYAYNDKAILEQRNMLTEELYGNTFQLYKSADHRTLDKVLEVQPEKLELIMDEMKQILTPMAQKEAVIKHSLVHKVFLDFFTYAPPKLRSEMIEAIREAVVYLAHTHDGARVAMHCLWHGTPKDRKVIVKTMKTYVEKVANGQYSHLVLLAAFDCIDDTKLVKQIIISEIISSLPSIVNDKYGRKVLLYLLSPRDPAHTVREIIEVLQKGDGNAHSKKDTEVRRRELLESISPALLSYLQEHAQEVVLDKSACVLVSDILGSATGDVQPTMNAIASLAATGLHPGGKDGELHIAEHPAGHLVLKWLIEQDKKMKENGREGCFAKTLVEHVGMKNLKSWASVNRGAIILSSLLQSCDLEVANKVKAALKSLIPTLEKTKSTSKGIEILLEKLST

SEQ ID NO: 42378 - protein, 145 aa, Homo sapiens
TLLFLISLAAHLSQWTRGRSRSHPGQGRSGESVEEVPLYGNLHYLQTGRLSQDPEPDQQDPTLGGPARAAEEVMCYTSLQLRPPQGRIPGPGTPVKYSEVVLDSEPKSQASGPEPELYASVCAQTRRARASFPDQAYANSQPAAS

SEQ ID NO: 42379 - protein, 211 aa, Homo sapiens
IRSGLWSASSGHWCAPAAGRAHAPVPRLVRGLGAASTAAPQDAQTGPQPIPRADCIMRHLPYFCRGQVVRGFGRGSKQLGIPTANFPEQVVDNLPADISTGIYYGWASVGSGDVHKMVVSIGWNPYYKNTKKSMETHIMHTFKEDFYGEILNVAIVGYLRPEKNFDSLESLISAIQGDIEEAKKRLELPEHLKIKEDNFFQVSKSKIMNGH

SEQ ID NO: 42380 - protein, 27 aa, Homo sapiens
VFIIVVVNIFITAFGVQKPLMDMAPQQ

SEQ ID NO: 42381 - protein, 33 aa, Homo sapiens
VSSVGLLLGIALVMRVDGAVSSWFRQLFLAQQR

SEQ ID NO: 42382 - protein, 23 aa, Homo sapiens
MWILRDRAVHELQAVLLALVLGR

SEQ ID NO: 42383 - protein, 861 aa, Homo sapiens
RMCTPIRGLLMALAVMFGTAMAFAPIPRITWEHREVHLVQFHEPDIYNYSALLLSEDKDTLYIGAREAVFAVNALNISEKQHEVYWKVSEDKKAKCAEKGKSKQTECLNYIRVLQPLSATSLYVCGTNAFQPACDHLNLTSFKFLGKNEDGKGRCPFDPAHSYTSVMVDGELYSGTSYNFLGSEPIISRNSSHSPLRTEYAIPWLNEPSFVFADVIRKSPDSPDGEDDRVYFFFTEVSVEYEFVFRVLIPRIARVCKGDQGGLRTLQKKWTSFLKARLICSRPDSGLVFNVLRDVFVLRSPGLKVPVFYALFTPQLNNVGLSAVCAYNLSTAEEVFSHGKYMQSTTVEQSHTKWVRYNGPVPKPRPGACIDSEARAANYTSSLNLPDKTLQFVKDHPLMDDSVTPIDNRPRLIKKDVNYTQIVVDRTQALDGTVYDVMFVSTDRGALHKAISLEHAVHIIEETQLFQDFEPVQTLLLSSKKGNRFVYAGSNSGVVQAPLAFCGKHGTCEDCVLARDPYCAWSPPTATCVALHQTESPSRGLIQEMSGDASVCPDKSKGSYRQHFFKHGGTAELKCSQKSNLARVFWKFQNGVLKAESPKYGLMGRKNLLIFNLSEGDSGVYQCLSEERVKNKTVFQVVAKHVLEVKVVPKPVVAPTLSVVQTEGSRIATKVLVASTQGSSPPTPAVQATSSGAITLPPKPAPTGTSCEPKIVINTVPQLHSEKTMYLKSSDNRLLMSLFLFFFVLFLCLFFYNCYKGYLPRQCLKFRSALLIGKKKPKSDFCDREQSLKETLVEPGSFSQQNGEHPKPALDTGYETEQDTITSKVPTDREDSQRIDDLSARDKPFDVKCELKFADSDADGD

SEQ ID NO: 42384 - protein, 28 aa, Homo sapiens
LHLGTLFFLFYLALTQNEENICDGKVTL

SEQ ID NO: 42385 - protein, 43 aa, Homo sapiens
VPILVAQEGESSQQLNDSSVIISALKTYLVSGPWKRSSPTTQP

SEQ ID NO: 42386 - protein, 54 aa, Homo sapiens
KKMIDKLYKYSSDRKQFNLIPAKTMSVSVDALTIHNHLWQPKRPAVPKKAQTRK

SEQ ID NO: 42387 - protein, 10 aa, Homo sapiens
VAPMKNLQNL

SEQ ID NO: 42388 - protein, 26 aa, Homo sapiens
LMFPGIMLRTAFRVAALFSSLHLGNT

SEQ ID NO: 42389 - protein, 15 aa, Homo sapiens
IMDFIYQIALFWISW

SEQ ID NO: 42390 - protein, 14 aa, Homo sapiens
KGATYGKPVHHGVN

SEQ ID NO: 42391 - protein, 98 aa, Homo sapiens
KMMEIMTREVQTNDLKEVVNKLIPDSIGKDVEKACQSIYPLHDVFVRKVKMLKKPKFELGKLMELHGEGCSSGKATGDETGVKVERADGYELPVQESV

SEQ ID NO: 42392 - protein, 15 aa, Homo sapiens
KHYHKEYRQMYRTEI

SEQ ID NO: 42393 - protein, 24 aa, Homo sapiens
KPNAAIRDCDRAIEINPDSAQPYK

SEQ ID NO: 42394 - protein, 51 aa, Homo sapiens
RKKTLEEEFARKLQEQEVFFKMTGESECLNPSTQSRISKFYPIPSLHSTGS

SEQ ID NO: 42395 - protein, 240 aa, Homo sapiens
LISVLEQIRHFVMMPEINTNHLDKQQVQLLAEMCILIDENDNKIGAETKKNCHLNENIEKGLLHRAFSVFLFNTENKLLLQQRSDAKITFPGCFTNTCCSHPLSNPAELEESDALGVRRAAQRRLKAELGIPLEEVPPEEINYLTRIHYKAQSDGIWGEHEIDYILLVRKNVTLNPDPNEIKSYCYVSKEELKELLKKAASGEIKITPWFKIIAATFLFKWWDNLNHLNQFVDHEKIYRM

SEQ ID NO: 42396 - protein, 85 aa, Homo sapiens
LRAVGWNELEGRDAIFKQFHFKDFNRAFGFMTRVALQAEKLDHHPEWFNVYNKVHITLSTHECAGLSERDINLASFIEQVAVSMT

SEQ ID NO: 42397 - protein, 468 aa, Homo sapiens
LTGTGVGIVSHLVTQAGVQWRNLSSLQRRSSSWAQAILLLHPPEYLGLQKMIHSLFLINCSGDIFLEKHWKSVVSQSVCDYFFEAQEKAADVENVPPVISTPHHYLISIYRDKLFFVSVIQTEVPPLFVIEFLHRVADTFQDYFGECSEAAIKDNVVIVYELLEEMLDNGFPLATESNILKELIKPPTILRSVVNSITGSSNVGDTLPTGQLSNIPWRRAGVKYTNNEAYFDVVEEIDAIIDKSGSTVFAEIQGVIDACIKLSGMPDLSLSFMNPRLLDDVSFHPCIRFKRWESERVLSFIPPDGNFRLISYRVSSQNLVAIPVYVKHSISFKENSSCGRFDITIGPKQNMGKTIEGITVTVHMPKVVLNMNLTPTQGSYTFDPVTKVLTWDVGKITPQKLPSLKGLVNLQSGAPKPEENPSLNIQFKIQQLAISGLKVNRLDMYGEKYKPFKGVKYVTKAGKFQVRT

SEQ ID NO: 42398 - protein, 24 aa, Homo sapiens
VSFPGISVVTLLLVNLSGRHSFKA

SEQ ID NO: 42399 - protein, 751 aa, Homo sapiens
VARAPRHEPVTKLGAEREAAVAEECEEEAVCVIMCASVKYNIRGPALIPRMKTKHRIYYITLFSIVLLGLIATGMFQFWPHSIESSNDWNVEKRSIRDVPVVRLPADSPIPERGDLSCRMHTCFDVYRCGFNPKNKIKVYIYALKKYVDDFGVSVSNTISREYNELLMAISDSDYYTDDINRACLFVPSIDVLNQNTLRIKETAQAMAQLSRWDRGTNHLLFNMLPGGPPDYNTALDVPRDRALLAGGGFSTWTYRQGYDVSIPVYSPLSAEVDLPEKGPGPRQYFLLSSQVGLHPEYREDLEALQVKHGESVLVLDKCTNLSEGVLSVRKRCHKHQVFDYPQVLQEATFCVVLRGARLGQAVLSDVLQAGCVPVVIADSYILPFSEVLDWKRASVVVPEEKMSDVYSILQSIPQRQIEEMQRQARWFWEAYFQSIKAIALATLQIINDRIYPYAAISYEEWNDPPAVKWGSVSNPLFLPLIPPQSQGFTAIVLTYDRVESLFRVITEVSKVPSLSKLLVVWNNQNKNPPEDSLWPKIRVPLKVVRTAENKLSNRFFPYDEIETEAVLAIDDDIIMLTSDELQFGYEVWREFPDRLVGYPGRLHLWDHEMNKWKYESEWTNEVSMVLTGAAFYHKYFNYLYTYKMPGDIKNWVDAHMNCEDIAMNFLVANVTGKAVIKVTPRKKFKCPECTAIDGLSLDQTHMVERSECINKFASVFGTMPLKVVEHRADPVLYKDDFPEKLKSFPNIGSL

SEQ ID NO: 42400 - protein, 162 aa, Homo sapiens
MAPIKVGDAIPAVEVFEGEPGNKVNLAELFKGKKGVLFGVPGAFTPGCSKTHLPGFVEQAEALKAKGVQVVACLSVNDAFVTGEWGRAHKAEGKVRLLADPTGAFGKETDLLLDDSLVSIFGNRRLKRFSMVVQDGIVKALNVEPDGTGLTCSLAPNIISQL

SEQ ID NO: 42401 - protein, 7 aa, Homo sapiens
LEKSTRT

SEQ ID NO: 42402 - protein, 7 aa, Homo sapiens
VMCVLKL

SEQ ID NO: 42403 - protein, 78 aa, Homo sapiens
RLKSLALDIDRDAEDQNRYLDGMDSDFTSMTSLLTGSVKRFSTMARSGQDNRKLLCGMAVGLIVAFFILSYFLSRART

SEQ ID NO: 42404 - protein, 485 aa, Homo sapiens
IVNLFHLLQSGSKKGCLRPLFTSTMSLDIQSLDIQCEELSDARWAELLPLLQQCQVVRLDDCGLTEARCKDISSALRVNPALAELNLRSNELGDVGVHCVLQGLQTPSCKIQKLSLQNCCLTGAGCGVLSSTLRTLPTLQELHLSDNLLGDAGLQLLCEGLLDPQCRLEKLQLEYCSLSAASCEPLASVLRAKPDFKELTVSNNDINEAGVRVLCQGLKDSPCQLEALKLESCGVTSDNCRDLCGIVASKASLRELALGSNKLGDVGMAELCPGLLHPSSRLRTLWIWECGITAKGCGDLCRVLRAKESLKELSLAGNELGDEGARLLCETLLEPGCQLESLWVKSCSFTAACCSHFSSVLAQNRFLLELQISNNRLEDAGVRELCQGLGQPGSVLRVLWLADCDVSDSSCSSLAATLLANHSLRELDLSNNCLGDAGILQLVESVRQPGCLLEQLVLYDIYWSEEMEDRLQALEKDKPSLRVIS

SEQ ID NO: 42405 - protein, 127 aa, Homo sapiens
MGLQACLLGLFALILSGKCSYSPEPDQRRTLPPGWVSLGRADPEEELSLTFALRQQNVERLSELVQAVSDPSSPQYGKYLTLENVADLVRPSPLTLHTVQKWLLAAGAQKCHSVITQDFLTCWLSIR

SEQ ID NO: 42406 - protein, 18 aa, Homo sapiens
VFWGKPFDLLAILFNMAV

SEQ ID NO: 42407 - protein, 22 aa, Homo sapiens
LSHPVPLRSSSSAHAKAVPHGL

SEQ ID NO: 42408 - protein, 285 aa, Homo sapiens
LSRLQLGSGAPLLTWVQETAGVAGGAPRRRTPVTMWRLLARASAPLLRVPLSDSWALLPASAGVKTLLPVPSFEDVSIPEKPKLRFIERAPLVPKVRREPKNLSDIRGPSTEATEFTEGNFAILALGGGYLHWGHFEMMRLTINRSMDPKNMFAIWRVPAPFKPITRKSVGHRMGGGKGAIDHYVTPVKAGRLVVEMGGRCEFEEVQGFLDQVAHKLPFAAKAVSRGTLEKMRKDQEERERNNQNPWTFERIATANMLGIRKVLSPYDLTHKGKYWGKFYMPKRV

SEQ ID NO: 42409 - protein, 136 aa, Homo sapiens
VCVKLFLRIVRNHQLLHPMARGGVQVAEQLGTQGLNLGPDTLLSRPWSTTLQYLPYCGPRRWAKSWQAVPAGCCCSLGCSSAPSSFCSGCLSSSMAPSTIPICRQSATSALCISTTGPTVIPPPPHSAPSLLPMSR

SEQ ID NO: 42410 - protein, 12 aa, Homo sapiens
MRLNDPAETLRV

SEQ ID NO: 42411 - protein, 34 aa, Homo sapiens
LSVYLEEEDITEEAALSKKRATKAKNTGQRGLKM

SEQ ID NO: 42412 - protein, 64 aa, Homo sapiens
KKRLVQSPNSCFMDVKCPGCYKIITVFSHAQTVVLCVGCSTVLCQPTGGKARLTEGCSFRRKQH

SEQ ID NO: 42413 - protein, 372 aa, Homo sapiens
VVVSAVAWAMANYIHVPPGSPEVPKLNVTVQDQEEHRCREGALSLLQHLRPHWDPQEVTLQLFTDGITNKLIGCYVGNTMEDVVLVRIYGNKTELLVDRDEEVKSFRVLQAHGCAPQLYCTFNNGLCYEFIQGEALDPKHVCNPAIFRLIARQLAKIHAIHAHNGWIPKSNLWLKMGKYFSLIPTGFADEDINKRFLSDIPSSQILQEEMTWMKEILSNLGSPVVLCHNDLLCKNIIYNEKQGDVQFIDYEYSGYNYLAYDIGNHFNEFAGVSDVDYSLYPDRELQSQWLRAYLEAYKEFKGFGTEVTEKEVEILFIQVNQFALASHFFWGLWALIQAKYSTIEFDFLGYAIVRFNQYFKMKPEVTALKVPE

SEQ ID NO: 42414 - protein, 151 aa, Homo sapiens
LPSGRRCRCRRRRRHRARFRPRPPSAVQGPSVSAPGPRLPASPGPGPGTMSEKSVEAAAELSAKDLKEKKEKVEEKASRKERKKEVVEEEENGAEEEEEETAEDGEEEDEGEEEDEEEEEEDDEGPALKRAAEEEDEADPKRQKTENGASA

SEQ ID NO: 42415 - protein, 127 aa, Homo sapiens
VTMLSRLLKEHQAKQNERKELQEKRRREAITAATCLTEALVDHLNVGVAQAYMNQRKLDHEVKTLQVQAAQFAKQTGQWIGMVENFNQALKEIGDVENWARSIELDMRTIATALEYVYKGQLQSAPS

SEQ ID NO: 42416 - protein, 394 aa, Homo sapiens
LLLSARGRRRRSIVKVSLHPAVMSKSESPKEPEQLRKLFIGGLSFETTDESLRSHFEQWGTLTDCVVMRDPNTKRSRGFGFVTYATVEEVDAAMNARPHKVDGRVVEPKRAVSREDSQRPGAHLTVKKIFVGGIKEDTEEHHLRDYFEQYGKIEVIEIMTDRGSGKKRGFAFVTFDDHDSVDKIVIQKYHTVNGHNCEVRKALSKQEMASASSSQRGRSGSGNFGGGRGGGFGGNDNFGRGGNFSGRGGFGGSRGGGGYGGSGDGYNGFGNDGGYGGGGPGYSGGSRGYGSGGQGYGNQGSGYGGSGSYDSYNNGGGGGFGGGSGSNFGGGGSYNDFGNYNNQSSNFGPMKGGNFGGRSSGPYGGGGQYFAKPRNQGGYGGSSSSSSYGSGRRF

SEQ ID NO: 42417 - protein, 451 aa, Homo sapiens
LPAIGPRSLGLSYRSEYHAVLQRPAARVPGRWSRPHQRPRGMEAENAGSYSLQQAQAFYTFPFQQLMAEAPNMAVVNEQQMPEEVPAPAPAQEPVQEAPKGRKRKPRTTEPKQPVEPKKPVESKKSGKSAKSKEKQEKITDTFKVKRKVDRFNGVSEAELLTKTLPDILTFNLDIVIIGINPGLMAAYKGHHYPGPGNHFWKCLFMSGLSEVQLNHMDDHTLPGKYGIGFTNMVERTTPGSKDLSSKEFREGGRILVQKLQKYQPRIAVFNGKCIYEIFSKEVFGVKVKNLEFGLQPHKIPDTETLCYVMPSSSARCAQFPRAQDKVHYYIKLKDLRDQLKGIERNMDVQEVQYTFDLQLAQEDAKKMAVKEEKYDPGYEAAYGGAYGENPCSSEPCGFSSNGLIESVELRGESAFSGIPNGQWMTQSFTDQIPSFSNHCGTQEQEEESHA

SEQ ID NO: 42418 - protein, 1171 aa, Homo sapiens
VVCRAPPPPARAGPLIASRERGGGSGAAACPPGGRLRAREALPSGEGREGGSGAPNPPCGARGRARGGCLGEGARGDSAPGEAEAAARGGGESPSAPGLPGWHEPAAGVRGGGEEAAGTGGEAGRAPEAMENAHTKTVEEVLGHFGVNESTGLSLEQVKKLKERWGSNELPAEEGKTLLELVIEQFEDLLVRILLLAACISFVLAWFEEGEETITAFVEPFVILLILVANAIVGVWQERNAENAIEALKEYEPEMGKVYRQDRKSVQRIKAKDIVPGDIVEIAVGDKVPADIRLTSIKSTTLRVDQSILTGESVSVIKHTDPVPDPRAVNQDKKNMLFSGTNIAAGKAMGVVVATGVNTEIGKIRDEMVATEQERTPLQQKLDEFGEQLSKVISLICIAVWIINIGHFNDPVHGGSWIRGAIYYFKIAVALAVAAIPEGLPAVITTCLALGTRRMAKKNAIVRSLPSVETLGCTSVICSDKTGTLTTNQMSVCRMFILDRVEGDTCSLNEFTITGSTYAPIGEVHKDDKPVNCHQYDGLVELATICALCNDSALDYNEAKGVYEKVGEATETALTCLVEKMNVFDTELKGLSKIERANACNSVIKQLMKKEFTLEFSRDRKSMSVYCTPNKPSRTSMSKMFVKGAPEGVIDRCTHIRVGSTKVPMTSGVKQKIMSVIREWGSGSDTLRCLALATHDNPLRREEMHLEDSANFIKYETNLTFVGCVGMLDPPRIEVASSVKLCRQAGIRVIMITGDNKGTAVAICRRIGIFGQDEDVTSKAFTGREFDELNPSAQRDACLNARCFARVEPSHKSKIVEFLQSFDEITAMTGDGVNDAPALKKAEIGIAMGSGTAVAKTASEMVLADDNFSTIVAAVEEGRAIYNNMKQFIRYLISSNVGEVVCIFLTAALGFPEALIPVQLLWVNLVTDGLPATALGFNPPDLDIMNKPPRNPKEPLISGWLFFRYLAIGCYVGAATVGAAAWWFIAADGGPRVSFYQLSHFLQCKEDNPDFEGVDCAIFESPYPMTMALSVLVTIEMCNALNSLSENQSLLRMPPWENIWLVGSICLSMSLHFLILYVEPLPLIFQITPLNVTQWLMVLKISLPVILMDETLKFVARNYLEPGKECVQPATKSCSFSACTDGISWPFVLLIMPLVIWVYSTDTNFSDMFWS

SEQ ID NO: 42419 - protein, 6 aa, Homo sapiens
MSLYNR

SEQ ID NO: 42420 - protein, 30 aa, Homo sapiens
ITNGRRKRFWGFCVERFLSAKMRFGLCQGT

SEQ ID NO: 42421 - protein, 381 aa, Homo sapiens
LWGWLWSERFWLPENVSWADLEGPADGYGYPRGRHILSVFPLAAGIFFVRLLFERFIAKPCALCIGIEDSGPYQAQPNAILEKVFISITKYPDKKRLEGLSKQLDWNVRKIQCWFRHRRNQDKPPTLTKFCESMWRFTFYLCIFCYGIRFLWSSPWFWDIRQCWHNYPFQPLSSGLYHYYIMELAFYWSLMFSQFTDIKRKDFLIMFVHHLVTIGLISFSYINNMVRVGTLIMCLHDVSDFLLEAAKLANYAKYQRLCDTLFVIFSAVFMVTRLGIYPFWILNTTLFESWEIIGPYASWWLLNGLLLTLQLLHVIWSYLIARIALKALIRGKVSKDDRSDVESSSEEEDVTTCTKSPCDSSSSNGANRVNGHMGGSYWAEE

SEQ ID NO: 42422 - protein, 247 aa, Homo sapiens [sequence omitted]

SEQ ID NO: 42423 - protein, 21 aa, Homo sapiens
IKLGSSKPKETVPTLGSKNFQ

SEQ ID NO: 42424 - protein, 565 aa, Homo sapiens
MNVIDHVRDMAAAGLHSNVRLLSSLLLTMSNNNPELFSPPQKYQLLVYHADSLFHDKEYRNAVSKYTMALQQKKALSKTSKVRPSTGNSASTPQSQCLPSEIEVKYKMAECYTMLKQDKDAIAILDGIPSRQRTPKINMMLANLYKKAGQERPSVTSYKEVLRQCPLALDAILGLLSLSVKGAEVASMTMNVIQTVPNLDWLSVWIKAYAFVHTGDNSRAISTICSLEKKSLLRDNVDLLGSLADLYFRAGDNKNSVLKFEQAQMLDPYLIKGMDVYGYLLAREGRLEDVENLGCRLFNISDQHAEPWVVSGCHSFYSKRYSRALYLGAKAIQLNSNSVQALLLKGAALRNMGRVQEAIIHFREAIRLAPCRLDCYEGLIECYLASNSIREAMVMANNVYKTLGANAQTLTLLATVCLEDPVTQEKAKTLLDKALTQRPDYIKAVVKKAELLSREQKYEDGIALLRNALANQSDCVLHRILGDFLVAVNEYQEAMDQYSIALSLDPNDQKSLEGMQKMEKEESPTDATQEEDVDDMEGSGEEGDLEGSDSEAAQWADQEQWFGMQ

SEQ ID NO: 42425 - protein, 14 aa, Homo sapiens
MISHLLWYLAGTVC

SEQ ID NO: 42426 - protein, 8 aa, Homo sapiens
LWIAVIVT

SEQ ID NO: 42427 - protein, 102 aa, Homo sapiens
VLPPRSCRVFWIHSGTTMSKVSFKITLTSDPRLPYKVLSVPESTPFTAVLKFAAEEFKVPAATSAIITNDGIGINPAQTAGNVFLKHGSELRIIPRDRVGSC

SEQ ID NO: 42428 - protein, 91 aa, Homo sapiens
KKEVVEEAENGRDAPANGNANEENGEQEADSEVDEEEEEGGEEEEEEEEGDGEEEDGDEDEEAESPTGKRAAEDDEDDDVDTKKQKTDEDD

SEQ ID NO: 42429 - protein, 136 aa, Homo sapiens
LASENSHRISAIMVENTFLSIPHMASTLFSFFPMRYLPLWCYKNKFLSYRKISQCRMPSLFISGLSDQLIPPVMMKQLYELSPSRTKRLAIFPDGTHNDTWQCQGYFTALEQFIKEVVKSHSPEEMAKTSSNVTII

SEQ ID NO: 42430 - protein, 959 aa, Homo sapiens
KMLKSKTFLKKTRAGGVMKIVREHYLRDDIGCGAPGCAACGGAHEGPALEPQPQDPASSVCPQPHYLLPDTNVLLHQIDVLEDPAIRNVIVLQTVLQEVRNRSAPVYKRIRDVTNNQEKHFYTFTNEHHRETYVEQEQGENANDRNDRAIRVAAKWYNEHLKKMSADNQLQVIFITNDRRNKEKAIEEGIPAFTCEEYVKSLTANPELIDRLACLSEEGNEIESGKIIFSEHLPLSKLQQGIKSGTYLQGTFRASRENYLEATVWIHGDNEENKEIILQGLKHLNRAVHEDIVAVELLPKSQWVAPSSVVLHDEGQNEEDVEKEEETERMLKTAVSEKMLKPTGRVVGIIKRNWRPYCGMLSKSDIKESRRHLFTPADKRIPRIRIETRQASTLEGRRIIVAIDGWPRNSRYPNGHFVRNLGDVGEKETETEVLLLEHDVPHQPFSQAVLSFLPKMPWSITEKDMKNREDLRHLCICSVDPPGCTDIDDALHCRELENGNLEVGVHIADVSHFIRPGNALDQESARRGTTVYLCEKRIDMVPELLSSNLCSLKCDVDRLAFSCIWEMNHNAEILKTKFTKSVINSKASLTYAEAQLRIDSANMNDDITTSLRGLNKLAKILKKRRIEKGALTLSSPEVRFHMDSETHDPIDLQTKELRETNSMVEEFMLLANISVAKKIHEEFSEHALLRKHPAPPPSNYEILVKAARSRNLEIKTDTAKSLAESLDQAESPTFPYLNTLLRILATRCMMQAVYFCSGMDNDFHHYGLASPIYTHFTSPIRRYADVIVHRLLAVAIGADCTYPELTDKHKLADICKNLNFRHKMAQYAQRASVAFHTQLFFKSKGIVSEEAYILFVRKNAIVVLIPKYGLEGTVFFEEKDKPNPQLIYDDEIPSLKIEDTVFHVFDKVKVKIMLDSSNLQHQKIRMSLVEPQIPGISIPTDTSNMDLNGPKKKKMKLGK

SEQ ID NO: 42431 - protein, 356 aa, Homo sapiens
IATPRLSAMPHIDNDVKLDFKDVLLRPKRSTLKSRSEVDLTRSFSFRNSKQTYSGVPIIAANMDTVGTFEMAKVLCKFSLFTAVHKHYSLVQWQEFAGQNPDCLEHLAASSGTGSSDFEQLEQILEAIPQVKYICLDVANGYSEHFVEFVKDVRKRFPQHTIMAGNVVTGEMVEELILSGADIIKVGIGPGSVCTTRKKTGVGYPQLSAVMECADAAHGLKGHIISDGGCSCPGDVAKAFGAGADFVMLGGMLAGHSESGGELIERDGKKYKLFYGMSSEMAMKKYAGGVAEYRASEGKTVEVPFKGDVEHTIRDILGGIRSTCTYVGAAKLKELSRRTTFIRVTQQVNPIFSEAC

SEQ ID NO: 42432 - protein, 51 aa, Homo sapiens
MAALKLGSTEVASNVPKVVGSAVGSGSITSNIMLPIVCLQPPLLSKTSILG

SEQ ID NO: 42433 - protein, 4 aa, Homo sapiens
MKPT

SEQ ID NO: 42434 - protein, 139 aa, Homo sapiens
MPDIMRLITKDLSEPYSIYTYRYFIHNWPQLCFLAMVGEECVGAIVCKLDMHKKMFRRGYIAMLAVDSKYRRNGIGTNLVKKAIYAMVEGDCDEVVLETEITNKSALKLYENLGFVRDKRLFRYYLNGVDALRLKLWLR

SEQ ID NO: 42435 - protein, 30 aa, Homo sapiens
MHQNGDLVEELKKLGIHSALLDEKKDQDSK

SEQ ID NO: 42436 - protein, 62 aa, Homo sapiens
VWTVIFLVPYLQMFLFLYSCTRADPKTVGYCIIPICLAVICNRHQAFVKASNQISRLQLIDT

SEQ ID NO: 42437 - protein, 26 aa, Homo sapiens
LLAVLCLGRALYWACMKVSHPVQNFS

SEQ ID NO: 42438 - protein, 25 aa, Homo sapiens
IPKTLGVIFGVSWFLSQVAPNLDLQ

SEQ ID NO: 42439 - protein, 417 aa, Homo sapiens
LDTLEALGYKGPLLEEQALTKAAEGGLSSPEFSELCIWLGSQIKSLCNLEESITSAGRDDLESFQLEISGFLKEMACPYSVLISGDIKDRLKKKEDCLKLLLFLSTELQASQILQNKKHKNSQLDKNSEVYQEVQAMFDTLGIPKSTTSDIPHMLNQVESKVKDILSKVQKNHVGKPLLKMDLNSEQAEQLERINDALSCEYECRRRMLMKRLDVTVQSFGWSDRAKVKTDDIARIYQPKRYALSPKTTITMAHLLAAREDLSKIIRTSSGTSREKTACAINKVLMGRVPDRGGRPNEIEPPPPEMPPWQKRQEGGGGRGGWGGGGGGGGRGGGGGGGGRGGWGGGGGGWGGGGGGGGGWGGGGGGGRGGFQGRGDYGGRGGYGGRGGYGGRGYGDPYGGGGGGGGGGGGGGGYRRY

SEQ ID NO: 42440 - protein, 336 aa, Homo sapiens
LPSMLMFAVIVASSGLLLMIERGILAEMKPLPLHPPGREGTAWRGKAPKPGGLSLRAGDADLQVRQDVRNRTLRAVCGQPGMPRDPWDLPVGQRRTLLRHILVSDRYRFLYCYVPKVACSNWKRVMKVLAGVLDSVDVRLKMDHRSDLVFLADLRPEEIRYRLQHYFKFLFVREPLERLLSAYRNKFGEIREYQQRYGAEIVRRYRAGAGPSPAGDDVTFPEFLRYLVDEDPERMNEHWMPVYHLCQPCAVHYDFVGSYERLEADANQVLEWVRAPPHVRFPARQAWYRPASPESLHYHLCSAPRALLQDVLPKYILDFSLFAYPLPNVTKEACQQ

SEQ ID NO: 42441 - protein, 115 aa, Homo sapiens
MTKKRRNNGRAKKGRGHMQPIRCTNCARCVPKDKAIKKFVIRNIVESAAVRDISEASVFDAYVLPKLYVKLHYCVSCAIHSKVVRNRSREARKDRTPPPRFRPAGAAPRPPPKPM

SEQ ID NO: 42442 - protein, 211 aa, Homo sapiens
LRNMAQETNHSQVPMLCSTGCGFYGNPRTNGMCSVCYKEHLQRQNSSNGRISPPATSVSSLSESLPVQCTDGSVPEAQSALDSTSSSMQPSPVSNQSLLSESVASSQLDSTSVDKAVPETEDVQASVSDTAQQPSEEQSKSLEKPKQKKNRCFMCRKKVGLTGFECRCGNVYCGVHRYSDVHNCSYNYKADAAEKIRKENPVVVGEKIQKI

SEQ ID NO: 42443 - protein, 26 aa, Homo sapiens
IGIFLVMTVKMDWMTVIHYCPSLGIP

SEQ ID NO: 42444 - protein, 42 aa, Homo sapiens
IITEEKVCMVCKKKIGNSAFARYPNGVVVHYFCSKEVNPADT

SEQ ID NO: 42445 - protein, 280 aa, Homo sapiens
KMAAPVRRTLLGVAGGWRRFERLWAGSLSSRSLALAAAPSSNGSPWRLLGALCLQRPPVVSKPLTPLQEEMASLLQQIEIERSLYSDHELRALDENQRLAKKKADLHDEEDEQDILLAQDLEDMWEQKFLQFKLGARITEADEKNDRTSLNRKLDRNLVLLVREKFGDQDVWILPQAEWQPGETLRGTAERTLATLSENNMEAKFLGNAPCGHYTFKFPQAMRTESNLGAKVFFFKALLLTGDFSQAGNKGHHVWVTKDELGDYLKPKYLAQVRRFVSDL

SEQ ID NO: 42446 - protein, 271 aa, Homo sapiens [sequence omitted]

SEQ ID NO: 42447 - protein, 177 aa, Homo sapiens
LLYNKSEYIETASGNKVSRQSVLCGSQNIVLNGKTIVMNDCIIRGDLANVRVGRHCVVKSRSVIRPPFKKFSKGVAFFPLHIGDHVFIEEDCVVNAAQIGSYVHVGKNCVIGRRCVLKDCCKILDNTVLPPETVVPPFTVFSGCPGLFSGELPECTQELMIDVTKSYYQKFLPLTQV

SEQ ID NO: 42448 - protein, 219 aa, Homo sapiens
LLLPILAMLMALCVHCHRLPGSYDSTSSDSLYPRGIQFKRPHTVAPWPPAYPPVTSYPPLSQPDLLPIPSPQPLGGSHRTPSSRRDSDGANSVASYENEEPACEDADEDEDDYHNPGYLVVLPDSTPATSTAAPSAPALSTPGIRDSAFSMESIDDYVNVPESGESAEASLDGSREYVNVSQELHPGAAKTEPAALSSQEAEEVEEEGAPDYENLQELN

SEQ ID NO: 42449 - protein, 283 aa, Homo sapiens
VVPEPQGPMGPAGVAARPGRFFGVYLLYCLNPRYRGRVYVGFTVNTARRVQQHNGGRKKGGAWRTSGRGPWEMVLVVHGFPSSVAALRFEWAWQHPHASRRLAHVGPRLRGETAFAFHLRVLAHMLRAPPWARLPLTLRWVRPDLRQDLCLPPPPHVPLAFGPPPPQAPAPRRRAGPFDDAEPEPDQGDPGACCSLCAQTIQDEEGPLCCPHPGCLLRAHVICLAEEFLQEEPGQLLPLEGQCPCCEKSLLWGDLIWLCQMDTEKEVEDSELEEAHWTDLLET

SEQ ID NO: 42450 - protein, 283 aa, Homo sapiens; identical to SEQ ID NO: 42449

SEQ ID NO: 42451 - protein, 5 aa, Homo sapiens
MRGHP

SEQ ID NO: 42452 - protein, 134 aa, Homo sapiens
MYRERLRTLLVIAVVMSLLNALSTSGGSISWNDFVHEMLAKGEVQRVQVVPESDVVEVYLHPGAVVFGRPRLALMYRMQVANIDKFEEKLRAAEDELNIEAKDRIPVSYKRTGFFGKCRSLSPRRKMPKSQPPT

SEQ ID NO: 42453 - protein, 147 aa, Homo sapiens
IPPAGPQNPMILQQPLQRGPQGGAQRLPRAALGVTWGLDASSPLRGAVPMSTKRRLEEEQEPLRKQFLSEENMATHFSQLSLHNDHPYCSPPMTFSPALPPLRSPCSELLLWRYPGSLIPEALRLLRLGDTPSPPYPATPAGDIMEL

SEQ ID NO: 42454 - protein, 554 aa, Homo sapiens
KMAAVSLRLGDLVWGKLGRYPPWPGKIVNPPKDLKKPRGKKCFFVKFFGTEDHAWIKVEQLKPYHAHKEEMIKINKGKRFQQAVDAVEEFLRRAKGKDQTSSHNSSDDKNRRNSSEERSRPNSGDEKRKLSLSEGKVKKNMGEGKKRVSSGSSERGSKSPLKRAQEQSPRKRGRPPKDEKDLTIPESSTVKGMMAGPMAAFKWQPTASEPVKDADPHFHHFLLSQTEKPAVCYQAITKKLKICEEETGSTSIQAADSTAVNGSITPTDKKIGFLGLGLMGSGIVSNLLKMGHTVTVWNRTAEKCDLFIQEGARLGRTPAEVVSTCDITFACVSDPKAAKDLVLGPSGVLQGIRPGKCYVDMSTVDADTVTELAQVIVSRGGRFLEAPVSGNQQLSNDGMLVILAAGDRGLYEDCSSCFQAMGKTSFFLGEVGNAAKMMLIVNMVQGSFMATIAEGLTLAQVTGQSQQTLLDILNQGQLASIFLDQKCQNILQGNFKPDFYLKYIQKDLRLAIALGDAVNHPTPMAAAANEVYKRAKALDQSDNDMSAVYRAYIH

SEQ ID NO: 42455 - protein, 121 aa, Homo sapiens
LAQIIVMGVQVVGRAFARALRQEFAASRAAADARGRAGHRSAAASNLSGLSLQEAQQILNVSKLSPEEVQKNYEHLFKVNDKSVGGSFYLQSKVVRAKERLDEELKIQAQEDREKGQMPHT

SEQ ID NO: 42456 - protein, 21 aa, Homo sapiens
IFRYLQNRSWIQVWLYEQVNM

SEQ ID NO: 42457 - protein, 23 aa, Homo sapiens
RVATVSMEDLGKILMVGSRWGKS

SEQ ID NO: 42458 - protein, 348 aa, Homo sapiens
KGQPFDVGPRYTQLQYIGEGAYGMVSSAYDHVRKTRVAIKKISPFEHQTYCQRTLREIQILLRFRHENVIGIRDILRASTLEAMRDVYIVQDLMETDLYKLLKSQQLSNDHICYFLYQILRGLKYIHSANVLHRDLKPSNLLINTTCDLKICDFGLARIADPEHDHTGFLTEYVATRWYRAPEIMLNSKGYTKSIDIWSVGCILAEMLSNRPIFPGKHYLDQLNHILGILGSPSQEDLNCIINMKARNYLQSLPSKTKVAWAKLFPKSDSKALDLLDRMLTFNPNKRITVEEALAHPYLEQYYDPTDEPVAEEPFTFAMELDDLPKERLKELIFQETARFQPGVLEAP

SEQ ID NO: 42459 - protein, 452 aa, Homo sapiens
LCVCPLALCSVLRLPTALLRSTMALLHSGRVLPGIAAAFHPGLAAAASARASSWWTHVEMGPPDPILGVTEAFKRDTNSKKMNLGVGAYRDDNGKPYVLPSVRKAEAQIAAKNLDKEYLPIGGLAEFCKASAELALGENSEVLKSGRFVTVQTISGTGALRIGASFLQRFFKFSRDVFLPKPTWGNHTPIFRDAGMQLQGYRYYDPKTCGFDFTGAVEDISKIPEQSVLLLHACAHNPTGVDPRPEQWKEIATVVKKRNLFAFFDMAYQGFASGDGDKDAWAVRHFIEQGINVCLCQSYAKNMGLYGERVGAFTMVCKDADEAKRVESQLKILIRPMYSNPPLNGARIAAAILNTPDLRKQWLQEVKVMADRIIGMRTQLVSNLKKEGSTHNWQHITDQIGMFCFTGLKPEQVERLIKEFSIYMTKDGRISVAGVTSSNVGYLAHAIHQVTK

SEQ ID NO: 42460 - protein, 374 aa, Homo sapiens
TPRVPRRAAAATLCAPRRPPVPPAMPGPAAGSRARVYAEVNSLRSREYWDYEAHVPSWGNQDDYQLVRKLGRGKYSEVFEAINITNNERVVVKILKPVKKKKIKREVKILENLRGGTNIIKLIDTVKDPVSKTPALVFEYINNTDFKQLYQILTDFDIRFYMYELLKALDYCHSKGIMHRDVKPHNVMIDHQQKKLRLIDWGLAEFYHPAQEYNVRVASRYFKGPELLVDYQMYDYSLDMWSLGCMLASMIFRREPFFHGQDNYDQLVRIAKVLGTEELYGYLKKYHIDLDPHFNDILGQHSRKRWENFIHSENRHLVSPEALDLLDKLLRYDHQQRLTAKEAMEHPYFYPVVKEQSQPCADNAVLSSGLTAAR

SEQ ID NO: 42461 - protein, 6 aa, Homo sapiens
KQFQKF

SEQ ID NO: 42462 - protein, 631 aa, Homo sapiens
LELLRGPRGSLGGGAMVGQLSEGAIAAIMQKGDTNIKPILQVINIRPITTGNSPPRYRLLMSDGLNTLSSFMLATQLNPLVEEEQLSSNCVCQIHRFIVNTLKDGRRVVILMELEVLKSAEAVGVKIGNPVPYNEGLGQPQVAPPAPAASPAASSRPQPQNGSSGMGSTVSKAYGASKTFGKAAGPSLSHTSGGTQSKVVPIASLTPYQSKWTICARVTNKSQIRTWSNSRGEGKLFSLELVDESGEIRATAFNEQVDKFFPLIEVNKVYYFSKGTLKIANKQFTAVKNDYEMTFNNETSVMPCEDDHHLPTVQFDFTGIDDLENKSKDSLVDIIGICKSYEDATKITVRSNNREVAKRNIYLMDTSGKVVTATLWGEDADKFDGSRQPVLAIKGARVSDFGGRSLSVLSSSTIIANPDIPEAYKLRGWFDAEGQALDGVSISDLKSGGVGGSNTNWKTLYEVKSENLGQGDKPDYFSSVATVVYLRKENCMYQACPTQDCNKKVIDQQNGLYRCEKCDTEFPNFKYRMILSVNIADFQENQWVTCFQESAEAILGQNAAYLGELKDKNEQAFEEVFQNANFRSFIFRVRVKVETYNDESRIKATVMDVKPVDYREYGRRLVMSIRRSALM

SEQ ID NO: 42463 - protein, 40 aa, Homo sapiens
KPSPNSENEQNSVTLEVLLVKVCHKKRKDVCCPIRQVPTE

SEQ ID NO: 42464 - protein, 16 aa, Homo sapiens
RYNSKRRHWRRTKLGL

SEQ ID NO: 42465 - protein, 69 aa, Homo sapiens
LSPLASRRSVPPCPPSPATAAAAFRRPFPPRKRNRIVCPLSRTSTLSTPLLMQVRVMTCFLLALRIISI

SEQ ID NO: 42466 - protein, 17 aa, Homo sapiens
VGVTVFFSFLVFGMYGR

SEQ ID NO: 42467 - protein, 141 aa, Homo sapiens
IGLGLREPETAAAAAAAAAGGAQGTPPLPVLCLGPSLLPRAQCGLASVKCHTMSDRKAVIKNADMSEDMQQDAVDCATQAMEKYNIEKDIAAYIKKEFDKKYNPTWHCIVGRNFGSYVTHETKHFIYFYLGQVAILLFKSG

SEQ ID NO: 42468 - protein, 12 aa, Homo sapiens
VDGGLSIPHSTK

SEQ ID NO: 42469 - protein, 5 aa, Homo sapiens
RIISI

SEQ ID NO: 42470 - protein, 212 aa, Homo sapiens
RMAVVPLLLLGGLWSAVGASSLGVVTCGSVVKLLNTRHNVRLHSHDVRYGSGSGQQSVTGVTSVDDSNSYWRIRGKSATVCERGTPIKCGQPIRLTHVNTGRNLHSHHFTSPLSGNQEVSAFGEEGEGDYLDDWTVLCNGPYWVRDGEVRFKHSSTEVLLSVTGEQYGRPISGQKEVHGMAQPSQNNYWKAMEGIFMKPSELLKAEAHHAEL

SEQ ID NO: 42471 - protein, 33 aa, Homo sapiens
IPLFLPMAVPILLSLVKIFLETRKSWRKPEKTD

SEQ ID NO: 42472 - protein, 33 aa, Homo sapiens
IKDYDANFKIKDFPEKAKDIFIEAHLCLNKLGP

SEQ ID NO: 42473 - protein, 165 aa, Homo sapiens
LEMNSDLKAQLRELNITAAKETEVGGGRKAIIIFVPVPQLKSFQKIQVRLVRELEKKFSGKHVVFIAQRRILPKPTRKSRTKNKQKCPRSRTLTAVHDAFLEDLVFPSEIVGKRIPVKLDSSRLIKVHLDKAQQNNVEHKVETFSGVYKKLTGKDVNFEFPEFQL

SEQ ID NO: 42474 - protein, 511 aa, Homo sapiens
LKGDLGPEDPSPSAAGRGQAGPVGAGAAAAALGLSHPPRIEALGAAGRQESDGESGAVRGAEPGAGPAVAAAAAPPPRVQTQEAAGRAGANRAAAAMELRVGNRYRLGRKIGSGSFGDIYLGTDIAAGEEVAIKLECVKTKHPQLHIESKIYKMMQGGVGIPTIRWCGAEGDYNVMVMELLGPSLEDLFNFCSRKFSLKTVLLLADQMISRIEYIHSKNFIHRDVKPDNFLMGLGKKGNLVYIIDFGLAKKYRDARTHQHIPYRENKNLTGTARYASINTHLGIEQSRRDDLESLGYVLMYFNLGSLPWQGLKAATKRQKYERISEKKMSTPIEVLCKGYPSEFATYLNFCRSLRFDDKPDYSYLRQLFRNLFHRQGFSYDYVFDWNMLKFGASRAADDAERERRDREERLRHSRNPATRGLPSTASGRLRGTQEVAPPTPLTPTSHTANTSPRPVSGMERERKVSMRLHRGAPVNISSSDLTGRQDTSRMSTSQIPGRVASSGLQSVVHR

SEQ ID NO: 42475 - protein, 354 aa, Homo sapiens
RRASGKTQPPSSPASPQRFVPLLGSAPMPGPTQTLSPNGENNNDIIQDNNGTIIPFRKHTVRGERSYSWGMAVNVYSTSITQETMSRHDIIAWVNDIVSLNYTKVEQLCSGAAYCQFMDMLFPGCISLKKVKFQAKLEHEYIHNFKLLQASFKRMNVDKVIPVEKLVKGRFQDNLDFIQWFKKFYDANYDGKEYDPVEARQGQDAIPPPDPGEQIFNLPKKSHHANSPTAGAAKSSPAAKPGSTPSRPSSAKRASSSGSASKSDKDLETQVIQLNEQVHSLKLALEGVEKERDFYFGKLREIELLCQEHGQENDDLVQRLMDILYASEEHEGHTEEPEAEEQAHEQQPPQQEEY

SEQ ID NO: 42476 - protein, 48 aa, Homo sapiens
TVEACSLTPEARETTNPPGGMNNSGGADLRAVTLTAKVCSFTFEPARP

SEQ ID NO: 42477 - protein, 30 aa, Homo sapiens
MECANKICEKRTPSCPVCQTAVTQAIQIHS

SEQ ID NO: 42478 - protein, 9 aa, Homo sapiens
TTPTRCGSG

SEQ ID NO: 42479 - protein, 56 aa, Homo sapiens
IMAAALFVLLGFALLGTHGASGAAGTVFTTVEDLGSKILLTCSLNDSATEQRAAPE

SEQ ID NO: 42480 - protein, 29 aa, Homo sapiens
LRSSCEPTMSSFASTRTARTEVGDPYRLQ

SEQ ID NO: 42481 - protein, 713 aa, Homo sapiens
MEEESGAPGVPSGNGAPGPKGEGERPAQNEKRKEKNIKRGGNRFEPYANPTKRYRAFITNIPFDVKWQSLKDLVKEKVGEVTYVELLMDAEGKSRGCAVVEFKMEESMKKAAEVLNKHSLSGRPLKVKEDPDGEHARRAMQKVMATTGGMGMGPGGPGMITIPPSILNNPNIPNEIIHALQAGRLGSTVFVANLDYKVGWKKLKEVFSMAGVVVRADILEDKDGKSRGIGTVTFEQSIEAVQAISMFNGQLLFDRPMHVKMDERALPKGDFFPPERPQQLPHGLGGIGMGLGPGGQPIDANHLNKGIGMGNIGPAGMGMEGIGFGINKMGGMEGPFGGGMENMGRFGSGMNMGRINEILSNALKRGEIIAKQGGGGGGGSVPGIERMGPGIDRLGGAGMERMGAGLGHGMDRVGSEIERMGLVMDRMGSVERMGSGIERMGPLGLDHMASSIERMGQTMERIGSGVERMGAGMGFGLERMAAPIDRVGQTIERMGSGVERMGPAIERMGLSMERMVPAGMGAGLERMGPVMDRMATGLERMGANNLERMGLERMGANSLERMGLERMGANSLERMGPAMGPALGAGIERMGLAMGGGGGASFDRAIEMERGNFGGSFAGSFGGAGGHAPGVARKACQIFVRNLPFDFTWKMLKDKFNECGHVLYADIKMENGKSKGCGVVKFESPEVAERACRMMNGMKLSGREIDVRIDRNA

SEQ ID NO: 42482 - protein, 97 aa, Homo sapiens
KSSPMDRNSDEYRQRRERNNMAVKKSRLKSKQKAQDTLQRVNQLKEENERLEAKIKLLTKELSVLKDLFLEHAHNLADNVQSISTENTTADGDNAGQ

SEQ ID NO: 42483 - protein, 57 aa, Homo sapiens
IIWPAARAGGRTGAASAAGPGGPTGGTSARGPASPAPPPPGPAGDPGPAAPVTCALP

SEQ ID NO: 42484 - protein, 146 aa, Homo sapiens
TMPGVTVKDVNQQEFVRALAAFLKKSGKLKVPEWVDTVKLAKHKELAPYDENWFYTRAASTARHLYLRGGAGVGSMTKIYGGRQRNGVMPSHFSRGSKSVARRVLQALEGLKMVEKDQDGGRKLTPQGQRDLDRIAGQVAAANKKH

SEQ ID NO: 42485 - protein, 59 aa, Homo sapiens
VEPEREPAGKLRLGVERRIVGRAKAAVFPSSSGRCRTARTATFPRRRTASAAVTARRPR

SEQ ID NO: 42486 - protein, 12 aa, Homo sapiens
ILAVFLAEYLGL

SEQ ID NO: 42487 - protein, 466 aa, Homo sapiens
VSIMATVTATTKVPEIRDVTRIERIGAHSHIRGLGLDDALEPRQASQGMVGQLAARRAAGVVLEMIREGKIAGRAVLIAGQPGTGKTAIAMGMAQALGPDTPFTAIAGSEIFSLEMSKTEALTQAFRRSIGVRIKEETEIIEGEVVEIQIDRPATGTGSKVGKLTLKTTEMETIYDLGTKMIESLTKDKVQAGDVITIDKATGKISKLGRSFTRARDYDAMGSQTKFVQCPDGELQKRKEVVHTVSLHEIDVINSRTQGFLALFSGDTGEIKSEVREQINAKVAEWREEGKAEIIPGVLFIDEVHMLDIESFSFLNRALESDMAPVLIMATNRGITRIRGTSYQSPHGIPIDLLDRLLIVSTTPYSEKDTKQILRIRCEEEDVEMSEDAYTVLTRIGLETSLRYAIQLITAASLVCRKRKGTEVQVDDIKRVYSLFLDESRSTQYMKEYQDAFLFNELKGETMDTS

SEQ ID NO: 42488 - protein, 39 aa, Homo sapiens
ITFLEILAKELEEKSDRLLKVLFLVLGYTVLAGMVFLKW

SEQ ID NO: 42489 - protein, 137 aa, Homo sapiens
LWSLGVILYILLSGYPPFVGRCGSDCGWDRGEACPACQNMLFESIQEGKYEFPDKDWAHISCAAKDLISKLLVRDAKQRLSAAQVLQHPWVQGCAPENTLPTPMVLQRWDSHFLLPPHPCRIHVRPGGLVRTVTVNE

SEQ ID NO: 42490 - protein, 36 aa, Homo sapiens
LTFSWDMAVLEDIKAAGAEPDSILKPELLSAIEKLL

SEQ ID NO: 42491 - protein, 25 aa, Homo sapiens
MAGSLSARGGGVAYLLEPHAARSQA

SEQ ID NO: 42492 - protein, 402 aa, Homo sapiens
LPVSADDTPEVLNRALSNLSSRWKNWWVRGILTLAMIAFFFIIIYLGPMVLMIIVMCVQIKCFHEIITIGYNVYHSYDLPWFRTLSWYFLLCVNYFFYGETVTDYFFTLVQREEPLRILSKYHRFISFTLYLIGFCMFVLSLVKKHYRLQFYMFGWTHVTLLIVVTQSHLVIHNLFEGMIWFIVPISCVICNDIMAYMFGFFFGRTPLIKLSPKKTWEGFIGGFFATVVFGLLLSYVMSGYRCFVCPVEYNNDTNSFTVDCEPSDLFRLQEYNIPGVIQSVIGWKTVRMYPFQIHSIALSTFASLIGPFGGFFASGFKRAFKIKDFANTIPGHGGIMDRFDCQYLMATFVNVYIASFIRGPNPSKLIQQFLTLRPDQQLHIFNTLRSHLIDKGMLTSTTEDE

SEQ ID NO: 42493 - protein, 14 aa, Homo sapiens
LWFVSVSLHSVVIF

SEQ ID NO: 42494 - protein, 24 aa, Homo sapiens
LVFIFVVIFFTFLSSIPALTATLR

SEQ ID NO: 42495 - protein, 38 aa, Homo sapiens
ILIFPTLSVRSPPPLDARAPGESTAGRMVGSTLTIGGN

SEQ ID NO: 42496 - protein, 28 aa, Homo sapiens
MDPEVPGLSADLCPVCPVAPGDVSSRRG

SEQ ID NO: 42497 - protein, 4 aa, Homo sapiens
MHCA

SEQ ID NO: 42498 - protein, 256 aa, Homo sapiens
LNSDELQELYEGLRLNNMNKYDYVLTGYTRDKSFLAMVVDIVQELKQQNPRLVYVCDPVLGDKWDGEGSMYVPEDLLPVYKEKVVPLADIITPNQFEAELLSGRKIHSQEEALRVMDMLHSMGPDTVVITSSDLPSPQGSNYLIVLGSQRRRNPAGSVVMERIRMDIRKVDAVFVGTGDLFAAMLLAWTHKHPNNLKVACEKTVSTLHHVLQRTIQCAKAQAGEGVRPSPMQLELRMVQSKRDIEDPEIVVQATVL

SEQ ID NO: 42499 - protein, 16 aa, Homo sapiens
LKLLLFYIYLLFICSF

SEQ ID NO: 42500 - protein, 16 aa, Homo sapiens
LKLLLFYIYLLFICSF

SEQ ID NO: 42501 - protein, 467 aa, Homo sapiens [sequence omitted]

SEQ ID NO: 42502 - protein, 30 aa, Homo sapiens
LTEFIERTENMTSTSSSALLQLLKLIFKAT

SEQ ID NO: 42503 - protein, 290 aa, Homo sapiens
LTHPGKAILAGGLAGGIEICITFPTEYVKTQLQLDERSHPPRYRGIGDCVRQTVRSHGVLGLYRGLSSLLYGSIPKAAVRFGMFEFLSNHMRDAQGRLDSTRGLLCGLGAGVAEAVVVVCPMETIKVKFIHDQTSPNPKYRGFFHGVREIVREQGLKGTYQGLTATVLKQGSNQAIRFFVMTSLRNWYRGDNPNKPMNPLITGVFGAIAGAASVFGNTPLDVIKTRMQGLEAHKYRNTWDCGLQILKKEGLKAFYKGTVPRLGRVCLDVAIVFVIYDEVVKLLNKVWKTD

SEQ ID NO: 42504 - protein, 176 aa, Homo sapiens
LVFGFLQSCSDNSFRRELDALGHELPVLAPQWEGYDELQTDGNRSSHSRLGRIEADSESQEDIIRNIARHLAQVGDSMDRSIPPGLVNGLALQLRNTSRSEEDRNRDLATALEQLLQAYPRDMEKEKTMLVLALLLAKKVASHTPSLLRDVFHTTVNFINQNLRTYVRSLARNGMD

SEQ ID NO: 42505 - protein, 45 aa, Homo sapiens
VVFLRDPQELLEGGNQGEGDPQAEGRRQDLPSSLPEPETQAPPRS

SEQ ID NO: 42506 - protein, 193 aa, Homo sapiens
RQRWPLLLLGLAVVTHGLLRPTAASQSRALGPGAPGGSSRSSLRSRWGRFLLQRGSWTGPRCWPRGFQSKHNSVTHVFGSGTQLTVLSQPKATPSVTLFPPSSEELQANKATLVCLMNDFYPGILTVTWKADGTPITQGVEMTTPSKQSNNKYAASSYLSLTPEQWRSRRSYSCQVMHEGSTVEKTVAPAECS

SEQ ID NO: 42507 - protein, 44 aa, Homo sapiens
LTSSTPEFEPYEQWNLGTTKDPDIILSSVIEKRIWDLRRYLLIF

SEQ ID NO: 42508 - protein, 698 aa, Homo sapiens
MDFGSWERHTKGIGQKLLQKMGYVPGRGLGKNAQGIINPIEAKQRKGKGAVGAYGSERTTQSMQDFPVVDSEEEAEEEFQKELSQWRKDPSGSKKKPKYSYKTVEELKAKGRISKKLTAPQKELSQVKVIDMTGREQKVYYSYSQISHKHNVPDDGLPLQSQQLPQSGKEAKAPGFALPELEHNLQLLIDLTEQEIIQNDRQLQYERDMVVNLFHELEKMTEVLDHEERVISNLSKVLEMVEECERRMQPDCSNPLTLDECARIFETLQDKYYEEYRMSDRVDLAVAIVYPLMKEYFKEWDPLKDCTYGTEIISKWKSLLENDQLLSHGGQDLSADAFHRLIWEVWMPFVRNIVTQWQPRNCDPMVDFLDSWVHIIPVWILDNILDQLIFPKLQKEVENWNPLTDTVPIHSWIHPWLPLMQARLEPLYSPIRSKLSSALQKWHPSDSSAKLILQPWKDVFTPGSWEAFMVKNIVPKLGMCLGELVINPHQQHMDAFYWVIDWEGMISVSSLVGLLEKHFFPKWLQVLCSWLSNSPNYEEITKWYLGWKSMFSDQVLAHPSVKDKFNEALDIMNRAVSSNVGAYMQPGARENIAYLTHTERRKDFQYEAMQERREAENMAQRGIGVAASSVPMNFKDLIETKAEEHNIVFMPVIGKRHEGKQLYTFGRIVIYIDRGVVFVQGEKTWVPTSLQSLIDMAK

SEQ ID NO: 42509 - protein, 129 aa, Homo sapiens
LSKPLLDHSYDPDFNQLDGPTRIIVPFVTCGDLSSYDSDRSYPLDLEGGSEYKYTPPTQPPISPPYQEACTLKRKGQLAKEIRPQDCPISRVDTFPQPLAAPQCHTLLAPEVWKCDSQPALTPSPCAFF

SEQ ID NO: 42510 - protein, 166 aa, Homo sapiens
VSRSSEAPGTPAHAMADSERLSAPGCWAACTNFSRTRKGILLFAEIILCLVILICFSASTPGYSSLSVIEMILAAIFFVVYMCDLHTKIPFINWPWSDFFRTLIAAILYLITSIVVLVERGNHSKIVAGVLGLIATCLFGYDAYVTFPVRQPRHTAAPTDPADGPV

SEQ ID NO: 42511 - protein, 70 aa, Homo sapiens
VYVLTVTELLEDWEDSVSIGRKREWFKVEDAIKVLQCHKPVHAEYLEKLKLGGSPTNGNSMAPSSPDSDP

SEQ ID NO: 42512 - protein, 275 aa, Homo sapiens
TSVLVCLLSAMPLPVALQTRLAKRGILKHLEPEPEEEIIAEDYDDDPVDYEATRLEGLPPSWYKVFDPSCGLPYYWNADTDLVSWLSPHDPNSVVTKSAKKLRSSNADAEEKLDRSHDKSDRGHDKSDRSHEKLDRGHDKSDRGHDKSDRDRERGYDKVDRERERDRERDRDRGYDKADREEGKERRHHRREELAPYPKSKKAVSRKDEELDPMDPSSYSDAPRGTWSTGLPKRNEAKTGADTTAAGPLFQQRPYPSPGAVLRANAEASRTKQQD

SEQ ID NO: 42513 - protein, 125 aa, Homo sapiens
RIGPEKQPEKKNLIMANIHQENEEMEQPMQNGEEDRPLGGGEGHQPAGNRRGQARRLAPNFRWAIPNRQINDGMGGDGDDMEIFMEEMREIRRKLRELQLRNCLRILMGELSNHHDHHDEFCLMP

SEQ ID NO: 42514 - protein, 31 aa, Homo sapiens
RHCWRTETDFFLFTLIGASLLQSASGPCRIS

SEQ ID NO: 42515 - protein, 258 aa, Homo sapiens
MGLCIGELNDDTSRSDSKFAYTGTEMRTVAEKVDAVRIVHIHSVIILRRSDKRKDRVEISPEQLSAASTEAERLAELTGRPMRVVGWYHSHPHITVWPSHVDVRTQAMYQMMDQGFVGLIFSCFIEDKNTKTGRVLYTCFQSIQAQKSSEYERIEIPIHIVPHVTIGKVCLESAVELPKILCQEEQDAYRRIHSLTHLDSVTKIHNGSVFTKNLCSQMSAVSGPLLQWLEDRLEQNQQHLQELQQEKEELMQELSSLE

SEQ ID NO: 42516 - protein, 10 aa, Homo sapiens
LQSSYQTEIG

SEQ ID NO: 42517 - protein, 306 aa, Homo sapiens
MSPANPSLHSPVPDASHSPRAGTSSQTMPTNMPPPRKLPQRSWAASIPTILTHSALNILLLPSPTPGLVPGLAGSYLCSPLERFLGSVIMRRHLQRIIQQETLQLINSNEPGVIMFKTDALKCRVALSPKTNQTLQLKVTPENAGQWKPDELQVLEKFFETRVAGPPFKANTLIAFTKLLGAPTHILRDCVHIMKLELFPDQATQLKWNVQFCLTIPPSAPPIAPPGTPAVVLKSKMLFFLQLTQKTSVPPQEPVSIIVPIIYDMASGTTQQADIPRQQNSSVAAPMMVSNILKRFAEMNPPRQGT

SEQ ID NO: 42518 - protein, 15 aa, Homo sapiens
ISSGFVGGFLLGLAS

SEQ ID NO: 42519 - protein, 17 aa, Homo sapiens
LEQTQKSKPVFSESLSD

SEQ ID NO: 42520 - protein, 197 aa, Homo sapiens
LRNPELHLGCALALRFLALVSWDIPGARALDNGLARTPTMGWLHWERFMCNLDCQEEPDSCISEKLFMEMAELMVSEGWKDAGYEYLCIDDCWMAPQRDSEGRLQADPQRFPHGIRQLANYVHSKGLKLGIYADVGNKTCAGFPGSFGYYDIDAQTFADWGVDLLKFDGCYCDSLENLADAQLYRNPTVLQSLAKFC

SEQ ID NO: 42521 - protein, 38 aa, Homo sapiens
LNAEKLKDFKIRLQYFARGLQIYIRQLRLALQGKSSPG

SEQ ID NO: 42522 - protein, 1594 aa, Homo sapiens
KMAAAAVVVPAEWIKNWEKSGRGEFLHLCRILSENKSHDSSTYRDFQQALYELSYHVIKGNLKHEQASNVLSDISEFREDMPSILADVFCILDIETNCLEEKSKRDYFTQLVLACLYLVSDTVLKERLDPETLESLGLIKQSQQFNQKSVKIKTKLFYKQQKFNLLREENEGYAKLIAELGQDLSGSITSDLILENIKSLIGCFNLDPNRVLDVILEVFECRPEHDDFFISLLESYMSMCEPQTLCHILGFKFKFYQEPNGETPSSLYRVAAVLLQFNLIDLDDLYVHLLPADNCIMDEHKREIAEAKQIVRKLTMVVLSSEKMDEREKEKEKEEEKVEKPPDNQKLGLLEALLKIGDWQHAQNIMDQMPPYYAASHKLIALAICKLIHITIEPLYRRVGVPKGAKGSPVNALQNKRAPKQAESFEDLRRDVFNMFCYLGPHLSHDPILFAKVVRIGKSFMKEFQSDGSKQEDKEKTEVILSCLLSITDQVLLPSLSLMDCNACMSEELWGMFKTFPYQHRYRLYGQWKNETYNSHPLLVKVKAQTIDRAKYIMKRLTKENVKPSGRQIGKLSHSNPTILFDYILSQIQKYDNLITPVVDSLKYLTSLNYDVLAYCIIEALANPEKERMKHDDTTISSWLQSLASFCGAVFRKYPIDLAGLLQYVANQLKAGKSFDLLILKEVVQKMAGIEITEEMTMEQLEAMTGGEQLKAEGGYFGQIRNTKKSSQRLKDALLDHDLALPLCLLMAQQRNGVIFQEGGEKHLKLVGKLYDQCHDTLVQFGGFLASNLSTEDYIKRVPSIDVLCNEFHTPHDAAFFLSRPMYAHHISSKYDELKKSEKGSKQQHKVHKYITSCEMVMAPVHEAVVSLHVSKVWDDISPQFYATFWSLTMYDLAVPHTSYEREVNKLKVQMKAIDDNQEMPPNKKKKEKERCTALQDKLLEEEKKQMEHVQRVLQRLKLEKDNWLLAKSTKNETITKFLQLCIFPRCIFSAIDAVYCARFVELVHQQKTPNFSTLLCYDRVFSDIIYTVASCTENEASRYGRFLCCMLETVTRWHSDRATYEKECGNYPGFLTILRATGFDGGNKADQLDYENFRHVVHKWHYKLTKASVHCLETGEYTHIRNILIVLTKILPWYPKVLNLGQALERRVHKICQEEKEKRPDLYALAMGYSGQLKSRKSYMIPENEFHHKDPPPRNAVASVQNGPGGGPSSSSIGSASKSDESSTEETDKSRERSQCGVKAVNKASSTTPKGNSSNGNSGSNSNKAVKENDKEKGKEKEKEKKEKTPATTPEARVLGKDGKEKPKEERPNKDEKARETKERTPKSDKEKEKFKKEEKAKDEKFKTTVPNAESKSTQEREREKEPSRERDIAKEMKSKENVKGGEKTPVSGSLKSPVPRSDIPEPEREQKRRKIDTHPSPSHSSTVKDSLIELKESSAKLYINHTPPPLSKSKEREMDKKDLDKSRERSREREKKDEKDRKERKRDHSNNDREVPPDLTKRRKEENGTMGVSKHKSESPCESPYPNEKDKEKNKSKSSGKEKGSDSFKSEKMDKISSGGKKESRHDKEKIEKKEKRDSSGGKEEKKHHKSSDKHR

SEQ ID NO: 42523 - protein, 435 aa, Homo sapiens
LADAGAMAATDIARQVGEGCRTVPLAGHVGFDSLPDQLVNKSVSQGFCFNILCVGETGLGKSTLMDTLFNTKFEGEPATHTQPGVQLQSNTYDLQESNVRLKLTIVSTVGFGDQINKEDSYKPIVEFIDAQFEAYLQEELKIRRVLHTYHDSRIHVCLYFIAPTGHSLKSLDLVTMKKLDSKVNIIPIIAKADAISKSELTKFKIKITSELVSNGVQIYQFPTDDESVAEINGTMNAHLPFAVIGSTEELKIGNKMMRARQYPWGTVQVENEAHCDFVKLREMLIRVNMEDLREQTHTRHYELYRRCKLEEMGFKDTDPDSKPFSLQETYEAKRNEFLGELQKKEEEMRQMFVQRVKEKEAELKEAEKELHEKFDRLKKLHQDEKKKLEDKKKSLDDEVNAFKQRKTAAELLQSQGSQAGGSQTLKRDKEKKNFF

SEQ ID NO: 42524 - protein, 686 aa, Homo sapiens
MDEEETPYLVKLPVAPERVTLADFKNVLSNRPVHAYKFFFKSMDQDFGVVKEEIFDDNAKLPCFNGRVVSWLVLAEGAHSDAGSQGTDSHTDLPPPLERTGGIGDSRPPSFHPNVASSRDGMDNETGTESMVSHRRERARRRNREEAARTNGHPRGDRRRDVGLPPDSASTALSSELESSSFVDSDEDGSTSRLSSSTEQSTSSRLIRKHKRRRRKQRLRQADRASSFSSITDSTMSLNIVTVTLNMERHHFLGISIVGQSNDRGDGGIYIGSIMKGGAVAADGRIEPGDMLLQVNDVNFENMSNDDAVRVLREIVSQTGPISLTVAKCWDPTPRSYFTVPRADPVRPIDPAAWLSHTAALTGALPRYGTSPCSSAVTRTSSSSLTSSVPGAPQLEEAPLTVKSDMSAVVRVMQLPDSGLEIRDRMWLKITIANAVIGADVVDWLYTHVEGFKERREARKYASSLLKHGFLRHTVNKITFSEQCYYVFGDLCSNLATLNLNSGSSGTSDQDTLAPLPHPAAPWPLGQGYPYQYPGPPPCFPPAYQDPGFSYGSGSTGSQQSEGSKSSGSTRSSRRAPGREKERRAAGAGGSGSESDHTAPSGVGSSWRERPAGQLSRGSSPRSQASATAPGLPPPHPTTKAYTVVGGPPGGPPVRELAAVPPELTGSRQSFQKAMGNPCEFFVDIM

SEQ ID NO: 42525 - protein, 723 aa, Homo sapiens
MEITIRNSPYRREDSMEDRGEEDDSLAIKPPQQMSRKEKVHHRKDEKRKEKCRHHSHSAEGGKHARVKEREHERRKRHREEQDKARREWERQKRREMAREHSRRERDRLEQLERKRERERKMREQQKEQREQKERERRAEERRKEREARREVSAHHRTMREDYSDKVKASHWSRSPPRPPRERFELGDGRKPVKEEKMEERDLLSDLQDISDSERKTSSAESSSAESGSGSEEEEEEEEEEEEEGSTSEESEEEEEEEEEEEEETGSNSEEASEQSAEEVSEEEMSEDEERENENHLLVVPESRFDRDSGESEEAEEEVGEGTPQSSALTEGDYVPDSPALLPIELKQELPKYLPALQGCRSVEEFQCLNRIEEGTYGVVYRAKDKKTDEIVALKRLKMEKEKEGFPITSLREINTILKAQHPNIVTVREIVVGSNMDKIYIVMNYVEHDLKSLMETMKQPFLPGEVKTLMIQLLRGVKHLHDNWILHRDLKTSNLLLSHAGILKVGDFGLAREYGSPLKAYTPVVVTQWYRAPELLLGAKEYSTAVDMWSVGCIFGELLTQKPLFPGNSEIDQINKVFKELGTPSEKIWPGYSELPVVKKMTFSEHPYNNLRKRFGALLSDQGFDLMNKFLTYFPGRRISAEDGLKHEYFRETPLPIDPSMFPTWPAKSEQQRVKRGTSPRPPEGGLGYSQLGDDDLKETGFHLTTTNQGASAAGPGFSLKF

SEQ ID NO: 42526 - protein, 901 aa, Homo sapiens
MIHAPTVSGWRSPRFCQFPQEIVLQMVERCRIRKLQLLAHQYMISSKIEFYISESLPEYFAPYQAERFRRLGYVSLCDNEKTGCKARELKSVYVDAVGQFLKLIFHQNHVNKYNIYNQVALVAINIIGDPADFSDESNTASREKLIDHYLGHNSEDPALEGTYARKSDYISPLDDLAFDMYQDPEVAQIIRKLDERKREAVQKERYDYAKKLKQAIADLQKVGERLGRYEVEKRCAVEKEDYDLAKEKKQQMEQYRAEVYEQLELHSLLDAELMRRPFDLPLQPLARSGSPCHQKPMPSLPQLEERGTENQFAEPFLQEKPSSYSLTISPQHSAVDPLLPATDPHPKINAESLPYDERPLPAIRKHYGEAVVEPEMSNADISDARRGGMLGEPEPLTEKALREASSAIDVLGETLVAEAYCKTWSYREDALLALSKKLMEMPVGTPKEDLKNTLRASVFLVRRAIKDIVTSVFQASLKLLKMIITQYIPKHKLSKLETAHCVERTIPVLLTRTGDSSARLRVTAANFIQEMALFKEVKSLQIIPSYLVQPLKANSSVHLAMSQMGLLARLLKDLGTGSSGFTIDNVMKFSVSALEHRVYEVRETAVRIILDMYRQHQASILEYLPPDDSNTRRNILYKTIFEGFAKIDGRATDAEMRARRKAATEEAEKQKKEEIKALQGQLAALKEIQAEVQEKESDAVKPKNQDIQGGKAAPAEALGIPDEHYLDNLCIFCGERSESFTEEGLDLHYWKHCLMLTRCDHCKQVVEISSLTEHLLTECDKKDGFGKCYRCSEAVFKEELPRHIKHKDCNPAKPEKLANRCPLCHENFSPGEEAWKAHLMGPAGCTMNLRKTHILQKAPALQPGKSSAVAASGPLGSKAGSKIPTPKGGLSKSSSRTYAKR

SEQ ID NO: 42527 - protein, 339 aa, Homo sapiens
MLFLVLLLPLELSLAGALAPGTPARNLPENHIDLPGPALWTPQASHHRRRGPGKKEWGPGLPSQAQDGAVVTATRQASRLPEAEGLLPEQSPAGLLQDKDLLLGLALPYPEKENRPPGWERTRKRSREHKRRRDRLRLHQGRALVRGPSSLMKKAELSEAQVLDAAMEESSTSLAPTMFFLTTFEAAPATEESLILPVTSLRPQQAQPRSDGEVMPTLDMALFDWTDYEDLKPDGWPSAKKKEKHRGKLSSDGNETSPAEGEPCDHHQDCLPGTCCDLREHLCTPHNRGLNNKCFDDCMCVEGLRCYAKFHRNRRVTRRKGRCVEPETANGDQGSFINV

SEQ ID NO: 42528 - protein, 508 aa, Homo sapiens
MALAFGCPPGGGGGGCPGGGGGGGGAGPGPSPVTAALRDDLGSNIHLLKGLNVRFRCFLAKVHELERRNRLLEKQLEQQQSERERRLRYKTFSREQAVQTGPELLRPPAPGGGHGLSSGAAAGANANAVALGGLPPGGGSHPQHYGRLPGTIWSYTQVRRTGGGGVETVQGPGVSWVHPDGVGVQIDTITPEIRALYNVLAKVKRERDEYKRRWEEELAKRMNLQTMVDTLQEAAQEADAIQEEMNEKIERLKAELVVFKGLMSDPMTDLDTKIQEKAMKVDMDICRRIDITAKLCDVAQQRNSEDVSKIFQVVPKKKERKVASDDDISEQDGEVNRFSDDEVGSMNITDEMKRMFNQLRETFDFDDDCDSLTWEENEDTLLLWEDFTNCNPTIDLQGEQEENLGNLIHETESFFKTRDKEYQETIGQIELELATAKSDMNRHLHEYMEMCSMKRGLDVQMETCRRLIKGSADRNSPSPSSVASSDSGSTDEIQDEFEREADVEPMVS

SEQ ID NO: 42529 - protein, 5138 aa, Homo sapiens
MKELPQLVASVIESESEILHHEKQYEPFYSSFVALSTHYITTVCSLIPRNQLQSVAAACKVLIEFSLLRLENPDEACAVSQKHLILLIKGLCTGCSRLDRTEIITFTAMMKSAKLPQTVKTLSDVEDQKELASPVSPELRQKEVQMNFLNQLTSVFNPRTVASQPISTQTLVEGENDEQSSTDQASAIKTKNVFIAQNVASLQELGGSEKLLRVCLNLPYFLRYINRFQDAVLANSFFIMPATVADATAVRNGFHSLVIDVTMALDTLSLPVLEPLNPSRLQDVTVLSLSCLYAGVSVATCMAILHVGSAQQVRTGSTSSKEDDYESDAATIVQKCLEIYDMIGQAISSSRRAGGEHYQNFQLLGAWCLLNSLFLILNLSPTALADKGKEKDPLAALRVRDILSRTKEGVGSPKLGPGKGHQGFGVLSVILANHAIKLLTSLFQDLQVEALHKGWETDGPPAALSIMAQSTSIQRIQRLIDSVPLMNLLLTLLSTSYRKACVLQRQRKGSMSSDASASTDSNTYYEDDFSSTEEDSSQDDDSEPILGQWFEETISPSKEKAAPPPPPPPPPLESSPRVKSPSKQAPGEKGNILASRKDPELFLGLASNILNFITSSMLNSRNNFIRNYLSVSLSEHHMATLASIIKEVDKDGLKGSSDEEFAAALYHFNHSLVTSDLQSPNLQNTLLQQLGVAPFSEGPWPLYIHPQSLSVLSRLLLIWQHKASAQGDPDVPECLKVWDRFLSTMKQNALQGVVPSETEDLNVEHLQMLLLIFHNFTETGRRAILSLFVQIIQELSVNMDAQMRFVPLILARLLLIFDYLLHQYSKAPVYLFEQVQHNLLSPPFGWASGSQDSNSRRATTPLYHGFKEVEENWSKHFSSDAVPHPRFYCVLSPEASEDDLNRLDSVACDVLFSKLVKYDELYAALTALLAAGSQLDTVRRKENKNVTALEACALQYYFLILWRILGILPPSKTYINQLSMNSPEMSECDILHTLRWSSRLRISSYVNWIKDHLIKQGMKAEHASSLLELASTTKCSSVKYDVEIVEEYFARQISSFCSIDCTTILQLHEIPSLQSIYTLDAAISKVQVSLDEHFSKMAAETDPHKSSEITKNLLPATLQLIDTYASFTRAYLLQNFNEEGTTEKPSKEKLQGFAAVLAIGSSRCKANTLGPTLVQNLPSSVQTVCESWNNINTNEFPNIGSWRNAFANDTIPSESYISAVQAAHLGTLCSQSLPLAASLKHTLLSLVRLTGDLIVWSDEMNPPQVIRTLLPLLLESSTESVAEISSNSLERILGPAESDEFLARVYEKLITGCYNILANHADPNSGLDESILEECLQYLEKQLESSQARKAMEEFFSDSGELVQIMMATANENLSAKFCNRVLKFFTKLFQLTEKSPNPSLLHLCGSLAQLACVEPVRLQAWLTRMTTSPPKDSDQLDVIQENRQLLQLLTTYIVRENSQVGEGVCAVLLGTLTPMATEMLANGDGTGFPELMVVMATLASAGQGAGHLQLHNAAVDWLSRCKKYLSQKNVVEKLNANVMHGKHVMILECTCHIMSYLADVTNALSQSNGQGPSHLSVDGEERAIEVDSDWVEELAVEEEDSQAEDSDEDSLCNKLCTFTITQKEFMNQHWYHCHTCKMVDGVGVCTVCAKVCHKDHEISYAKYGSFFCDCGAKEDGSCLALVKRTPSSGMSSTMKESAFQSEPRISESLVRHASTSSPADKAKVTISDGKVADEEKPKKSSLCRTVEGCREELQNQANFSFAPLVLDMLNFLMDAIQTNFQQASAVGSSSRAQQALSELHTVEKAVEMTDQLMVPTLGSQEGAFENVRMNYSGDQGQTIRQLISAHVLRRVAMCVLSSPHGRRQHLAVSHEKGKITVLQLSALLKQADSSKRKLTLTRLASAPVPFTVLSLTGNPCKEDYLAVCGLKDCHVLTFSSSGSVSDHLVLHPQLATGNFIIKAVWLPGSQTELAIVTADFVKIYDLCVDALSPTFYFLLPSSKIRDVTFLFNEEGKNIIVIMSSAGYIYTQLMEEASSAQQGPFYVTNVLEINHEDLKDSNSQVAGGGVSVYYSHVLQMLFFSYCQGKSFAATISRTTLEVLQLFPINIKSSNGGSKTSPALCQWSEVMNHPGLVCCVQQTTGVPLVVMVKPDTFLIQEIKTLPAKAKIQDMVAIRHTACNEQQRTTMILLCEDGSLRIYMANVENTSYWLQPSLQPSSVISIMKPVRKRKTATITTRTSSQVTFPIDFFEHNQQLTDVEFGGNDLLQVYNAQQIKHRLNSTGMYVANTKPGGFTIEISNNNSTMVMTGMRIQIGTQAIERAPSYIEIFGRTMQLNLSRSRWFDFPFTREEALQADKKLNLFIGASVDPAGVTMIDAVKIYGKTKEQFGWPDEPPEEFPSASVSNICPSNLNQSNGTGDSDSAAPTTTSGTVLERLVVSSLEALESCFAVGPIIEKERNKNAAQELATLLLSLPAPASVQQQSKSLLASLHTSRSAYHSHKDQALLSKAVQCLNTSSKEGKDLDPEVFQRLVITARSIAIMRPNNLVHFTESKLPQMETEGMDEGKEPQKQLEGDCCSFITQLVNHFWKLHASKPKNAFLAPACLPGLTHIEATVNALVDIIHGYCTCELDCINTASKIYMQMLLCPDPAVSFSCKQALIRVLRPRNKRRHVTLPSSPRSNTPMGDKDDDDDDDADEKMQSSGIPNGGHIRQESQEQSEVDHGDFEMVSESMVLETAENVNNGNPSPLEALLAGAEGFPPMLDIPPDADDETMVELAIALSLQQDQQGSSSSALGLQSLGLSGQAPSSSSLDAGTLSDTTASAPASDDEGSTAATDGSTLRTSPADHGGSVGSESGGSAVDSVAGEHSVSGRSSAYGDATAEGHPAGPGSVSSSTGAISTTTGHQEGDGSEGEGEGETEGDVHTSNRLHMVRLMLLERLLQTLPQLRNVGGVRAIPYMQVILMLTTDLDGEDEKDKGALDNLLSQLIAELGMDKKDVSKKNERSALNEVHLVVMRLLSVFMSRTKSGSKSSICESSSLISSATAAALLSSGAVDYCLHVLKSLLEYWKSQQNDEEPVATSQLLKPHTTSSPPDMSPFFLRQYVKGHAADVFEAYTQLLTEMVLRLPYQIKKITDTNSRIPPPVFDHSWFYFLSEYLMIQQTPFVRRQVRKLLLFICGSKEKYRQLRDLHTLDSHVRGIKKLLEEQGIFLRASVVTASSGSALQYDTLISLMEHLKACAEIAAQRTINWQKFCIKDDSVLYFLLQVSFLVDEGVSPVLLQLLSCALCGSKVLAALAASSGSSSASSSSAPVAASSGQATTQSKSSTKKSKKEEKEKEKDGETSGSQEDQLCTALVNQLNKFADKETLIQFLRCFLLESNSSSVRWQAHCLTLHIYRNSSKSQQELLLDLMWSIWPELPAYGRKAAQFVDLLGYFSLKTPQTEKKLKEYSQKAVEILRTQNHILTNHPNSNIYNTLSGLVEFDGYYLESDPCLVCNNPEVPFCYIKLSSIKVDTRYTTTQQVVKLIGSHTISKVTVKIGDLKRTKMVRTINLYYNNRTVQAIVELKNKPARWHKAKKVQLTPGQTEVKIDLPLPIVASNLMIEFADFYENYQASTETLQCPRCSASVPANPGVCGNCGENVYQCHKCRSINYDEKDPFLCNACGFCKYARFDFMLYAKPCCAVDPIENEEDRKKAVSNINTLLDKADRVYHQLMGHRPQLENLLCKVNEAAPEKPQDDSGTAGGISSTSASVNRYILQLAQEYCGDCKNSFDELSKIIQKVFASRKELLEYDLQQREAATKSSRTSVQPTFTASQYRALSVLGCGHTSSTKCYGCASAVTEHCITLLRALATNPALRHILVSQGLIRELFDYNLRRGAAAMREEVRQLMCLLTRDNPEATQQMNDLIIGKVSTALKGHWANPDLASSLQYEMLLLTDSISKEDSCWELRLRCALSLFLMAVNIKTPVVVENITLMCLRILQKLIKPPAPTSKKNKDVPVEALTTVKPYCNEIHAQAQLWLKRDPKASYDAWKKCLPIRGIDGNGKAPSKSELRHLYLTEKYVWRWKQFLSRRGKRTSPLDLKLGHNNWLRQVLFTPATQAARQAACTIVEALATIPSRKQQVLDLLTSYLDELSIAGECAAEYLALYQKLITSAHWKVYLAARGVLPYVGNLITKEIARLLALEEATLSTDLQQGYALKSLTGLLSSFVEVESIKRHFKSRLVGTVLNGYLCLRKLVVQRTKLIDETQDMLLEMLEDMTTGTESETKAFMAVCIETAKRYNLDDYRTPVFIFERLCSIIYPEENEVTEFFVTLEKDPQQEDFLQGRMPGNPYSSNEPGIGPLMRDIKNKICQDCDLVALLEDDSGMELLVNNKIISLDLPVAEVYKKVWCTTNEGEPMRIVYRMRGLLGDATEEFIESLDSTTDEEEDEEEVYKMAGVMAQCGGLECMLNRLAGIRDFKQGRHLLTVLLKLFSYCVKVKVNRQQLVKLEMNTLNVMLGTLNLALVAEQESKDSGGAAVAEQVLSIMEIILDESNAEPLSEDKGNLLLTGDKDQLVMLLDQINSTFVRSNPSVLQGLLRIIPYLSFGEVEKMQILVERFKPYCNFDKYDEDHSGDDKVFLDCFCKIAAGIKNNSNGHQLKDLILQKGITQNALDYMKKHIPSAKNLDADIWKKFLSRPALPFILRLLRGLAIQHPGTQVLIGTDSIPNLHKLEQVSSDEGIGTLAENLLEALREHPDVNKKIDAARRETRAEKKRMAMAMRQKALGTLGMTTNEKGQVVTKTALLKQMEELIEEPGLTCCICREGYKFQPTKVLGIYTFTKRVALEEMENKPRKQQGYSTVSHFNIVHYDCHLAAVRLARGREEWESAALQNANTKCNGLLPVWGPHVPESAFATCLARHNTYLQECTGQREPTYQLNIHDIKLLFLRFAMEQSFSADTGGGGRESNIHLIPYIIHTVLYVLNTTRATSREEKNLQGFLEQPKEKWVESAFEVDGPYYFTVLALHILPPEQWRATRVEILRRLLVTSQARAVAPGGATRLTDKAVKDYSAYRSSLLFWALVDLIYNMFKKVPTSNTEGGWSCSLAEYIRHNDMPIYEAADKALKTFQEEFMPVETFSEFLDVAGLLSEITDPESFLKDLLNSVP

SEQ ID NO: 42530 - protein, 74 aa, Homo sapiens
MSVPLLTDAATVSGAERETAAVIFLHGLGDTGHSWADALSTIRLPHVKYICPHAPRIPVTLNMKMVMPSCQGLD

SEQ ID NO: 42531 - protein, 1476 aa, Homo sapiens
MKDLTRLSQDLQHSGVHLDCGGLRLSRPPAPPPGDLQYSFFSSPSLANSIRSPEERATPHAKSERPSHPLYEPEPEPRDSPQPGQGHSPGATAAATGLPPEPEPDSTDYSELADADILSELASLTCPEAQLLEAQALEPPSPEPEPQLLDPQPRFLDPQALEPLGEALELPPLQPLADPLGLPGLALQALDTLPDSLESQLLDPQALDPLPKLLDVPGRRLEPQQPLGHCPLAEPLRLDLCSPHGPPGPEGHPKYALRRTDRPKILCRRRKAGRGRKADAGPEGRLLPLPMPTGLVAALAEPPPPPPPPPPALPGPGPVSVPELKPESSQTPVVSTRKGKCRGVRRMVVKMAKIPVSLGRRNKTTYKVSSLSSSLSVEGKELGLRVSAEPTPLLKMKNNGRNVVVVFPPGEMPIILKRKRGRPPKNLLLGPGKPKEPAVVAAEAATVAAATMAMPEVKKRRRRKQKLASPQPSYAADANDSKAEYSDVLAKLAFLNRQSQCAGRCSPPRCWTPSEPESVHQAPDTQSISHFLHRVQGFRRRGGKAGGFGGRGGGHAAKSARCSFSDFFEGIGKKKKVVAVAAAGVGGPGLTELGHPRKRGRGEVDAVTGKPKRKRRSRKNGTLFPEQVPSGPGFGEAGAEWAGDKGGGWAPHHGHPGGQAGRNCGFQGTEARAFASTGLESGASGRGSYYSTGAPSGQTELSQERQNLFTGYFRSLLDSDDSSDLLDFALSASRPESRKASGTYAGPPTSALPAQRGLATFPSRGAKASPVAVGSSGAGADPSFQPVLSARQTFPPGRAASYGLTPAASDCRAAETFPKLVPPPSAMARSPTTHPPANTYLPQYGGYGAGQSVFAPTKPFTGQDCANSKDCSFAYGSGNSLPASPSSAHSAGYAPPPTGGPCLPPSKASFFSSSEGAPFSGSAPTPLRCDSRASTVSPGGYMVPKGTTASATSAASAASSSSSSFQPSPENCRQFAGASQWPFRQGYGGLDWASEAFSQLYNPSFDCHVSEPNVILDISNYTPQKVKQQTAVSETFSESSSDSTQFNQPVGGGGFRRANSEASSSEGQSSLSSLEKLMMDWNEASSAPGYNWNQSVLFQSSSKPGRGRRKKVDLFEASHLGFPTSASAAASGYPSKRSTGPRQPRGGRGGGACSAKKERGGAAAKAKFIPKPQPVNPLFQDSPDLGLDYYSGDSSMSPLPSQSRAFGVGERDPCDFIGPYSMNPSTPSDGTFGQGFHCDSPSLGAPELDGKHFPPLAHPPTVFDAGLQKAYSPTCSPTLGFKEELRPPPTKLAACEPLKHGLQGASLGHAAAAQAHLSCRDLPLGQPHYDSPSCKGTAYWYPPGSAARSPPYEGKVGTGLLADFLGRTEAACLSAPHLASPPATPKADKEPLEMARPPGPPRGPAAAAAGYGCPLLSDLTLSPVPRDSLLPLQDTAYRYPGFMPQAHPGLGGGPKSGFLGPMAEPHPEDTFTVTSL

SEQ ID NO: 42532 - protein, 1153 aa, Homo sapiens
MPVVLTSGTGSQAQPQPAANQALAAGTHSSPVPGSIGVAGRSQDDAMVDYFFQRQHGEQLGGGGSGGGGYNNSKHRWPTGDNIHAEHQVRSMDELNHDFQALALEGRAMGEQLLPGKKFWETDESSKDGPKGIFLGDQWRDSAWGTSDHSVSQPIMVQRRPGQSFHVNSEVNSVLSPRSESGGLGVSMVEYVLSSSPGDSCLRKGGFGPRDADSDENDKGEKKNKGTFDGDKLGDLKEEGDVMDKTNGLPVQNGIDADVKDFSRTPGNCQNSANEVDLLGPNQNGSEGLAQLTSTNGAKPVEDFSNMESQSVPLDPMEHVGMEPLQFDYSGTQVPVDSAAATVGLFDYNSQQQLFQRPNALAVQQLTAAQQQQYALAAAHQPHIGLAPAAFVPNPYIISAAPPGTDPYTAGLAAAATLGPAVVPHQYYGVTPWGVYPASLFQQQAAAAAAATNSANQQTTPQAQQGQQQVLRGGASQRPLTPNQNQQGQQTDPLVAAAAVNSALAFGQGLAAGMPGYPVLAPAAYYDQTGALVVNAGARNGLGAPVRLVAPAPVIISSSAAQAAVAAAAASANGAAGGLAGTTNGPFRPLGTQQPQPQPQQQPNNNLASSSFYGNNSLNSNSQSSSLFSQGSAQPANTSLGFGSSSSLGATLGSALGGFGTAVANSNTGSGSRRDSLTGSSDLYKRTSSSLTPIGHSFYNGLSFSSSPGPVGMPLPSQGPGHSQTPPPSLSSHGSSSSLNLGGLTNGSGRYISAAPGAEAKYRSASSASSLFSPSSTLFSSSRLRYGMSDVMPSGRSRLLEDFRNNRYPNLQLREIAGHIMEFSQDQHGSRFIQLKLERATPAERQLVFNEILQAAYQLMVDVFGNYVIQKFFEFGSLEQKLALAERIRGHVLSLALQMYGCRVIQKALEFIPSDQQNEMVRELDGHVLKCVKDQNGNHVVQKCIECVQPQSLQFIIDAFKGQVFALSTHPYGCRVIQRILEHCLPDQTLPILEELHQHTEQLVQDQYGNYVIQHVLEHGRPEDKSKIVAEIRGNVLVLSQHKFASNVVEKCVTHASRTERAVLIDEVCTMNDGPHSALYTMMKDQYANYVVQKMIDVAEPGQRKIVMHKIRPHIATLRKYTYGKHILAKLEKYYMKNGVDLGPICGPPNGII

SEQ ID NO: 42533 - protein, 1156 aa, Homo sapiens
MPVVLTSGTGSQAQPQPAANQALAAGTHSSPVPGSIGVAGRSQDDAMVDYFFQRQHGEQLGGGGSGGGGYNNSKHRWPTGDNIHAEHQVRSMDELNHDFQALALEGRAMGEQLLPGKKFWETDESSKDGPKGIFLGDQWRDSAWGTSDHSVSQPIMVQRRPGQSFHVNSEVNSVLSPRSESGGLGVSMVEYVLSSSPGDSCLRKGGFGPRDADSDENDKGEKKNKGTFDGDKLGDLKEEGDVMDKTNGLPVQNGIDADVKDFSRTPGNCQNSANEVDLLGPNQNGSEGLAQLTSTNGAKPVEDFSNMESQSVPLDPMEHVGMEPLQFDYSGTQVPVDSAAATVGLFDYNSQQQLFQRPNALAVQQLTAAQQQQYALAAAHQPHIAGLAPAAFVPNPYIISAAPPGTDPYTAGLAAAATLGPAVVPHQYYGVTPWGVYPASLFQQQAAAAAAATNSANQQTTPQAQQGQQQVLRGGASQRPLTPNQNQQGQQTDPLVAAAAVNSALAFGQGLAAGMPGYPVLAPAAYYDQTGALVVNAGARNGLGAPVRLVAPAPVIISSSAAQAAVAAAAASANGAAGGLAGTTNGPFRPLGTQQPQPQPQQQPNNNLASSSFYGNNSLNSNSQSSSLFSQGSAQPANTSLGFGSSSSLGATLGSALGGFGTAVANSNTGSGSRRDSLTGSSDLYKRTSSSLTPIGHSFYNGLSFSSSPGPVGMPLPSQGPGHSQTPPPSLSSHGSSSSLNLGGLTNGSGRYISAAPGAEAKYRSASSASSLFSPSSTLFSSSRLRYGMSDVMPSGRSRLLEDFRNNRYPNLQLREIAGHIMEFSQDQHGSRFIQLKLERATPAERQLVFNEILQAAYQLMVDVFGNYVIQKFFEFGSLEQKLALAERIRGHVLSLALQMYGCRVIQKALEFIPSDQQVINEMVRELDGHVLKCVKDQNGNHVVQKCIECVQPQSLQFIIDAFKGQVFALSTHPYGCRVIQRILEHCLPDQTLPILEELHQHTEQLVQDQYGNYVIQHVLEHGRPEDKSKIVAEIRGNVLVLSQHKFASNVVEKCVTHASRTERAVLIDEVCTMNDGPHSALYTMMKDQYANYVVQKMIDVAEPGQRKIVMHKIRPHIATLRKYTYGKHILAKLEKYYMKNGVDLGPICGPPNGII

SEQ ID NO: 42534 - protein, 1129 aa, Homo sapiens
MPVVLTSGTGSQAQPQPAANQALAAGTHSSPVPGSIGVAGRSQDDAMVDYFFQRQHGEQLGGGGSGGGGYNNSKHRWPTGDNIHAEHQVRSMDELNHDFQALALEGRAMGEQLLPGKKFWETDESSKDGPKGIFLGDQWRDSAWGTSDHSVSQPIMVQRRPGQSFHVNSEVNSVLSPRSESGGLGVSMVEYVLSSSPGDSCLRKGGFGPRDADSDENDKGEKKNKGTFDGDKLGDLKEEGDVMDKTNGLPVQNGIDADVKDFSRTPGNCQNSANEVDLLGPNQNGSEGLAQLTSTNGAKPVEDFSNMESQSVPLDPMEHVGMEPLQFDYSGTQVPVDSAAATVGLFDYNSQQQLFQRPNALAVQQLTAAQQQQYALAAAHQPHIAGLAPAAFVPNPYIISAAPPGTDPYTAGLAAAATLGPAVVPHQYYGVTPWGVYPASLFQQQAAAAAAATNSANQQTTPQAQQGQQQVLRGGASQRPLTPNQNQQGQQTDPLVAAAAVNSALAFGQGLAAGMPGYPVLAPAAYYDQTGALVVNAGARNGLGAPVRLVAPAPVIISSSAAQAGTQQPQPQPQQQPNNNLASSSFYGNNSLNSNSQSSSLFSQGSAQPANTSLGFGSSSSLGATLGSALGGFGTAVANSNTGSGSRRDSLTGSSDLYKRTSSSLTPIGHSFYNGLSFSSSPGPVGMPLPSQGPGHSQTPPPSLSSHGSSSSLNLGGLTNGSGRYISAAPGAEAKYRSASSASSLFSPSSTLFSSSRLRYGMSDVMPSGRSRLLEDFRNNRYPNLQLREIAGHIMEFSQDQHGSRFIQLKLERATPAERQLVFNEILQAAYQLMVDVFGNYVIQKFFEFGSLEQKLALAERIRGHVLSLALQMYGCRVIQKALEFIPSDQQVINEMVRELDGHVLKCVKDQNGNHVVQKCIECVQPQSLQFIIDAFKGQVFALSTHPYGCRVIQRILEHCLPDQTLPILEELHQHTEQLVQDQYGNYVIQHVLEHGRPEDKSKIVAEIRGNVLVLSQHKFASNVVEKCVTHASRTERAVLIDEVCTMNDGPHSALYTMMKDQYANYVVQKMIDVAEPGQRKIVMHKIRPHIATLRKYTYGKHILAKLEKYYMKNGVDLGPICGPPNGII

SEQ ID NO: 42535 - protein, 267 aa, Homo sapiens
MVGRSSLLVGNLKKKYAQGFLPEKLPQQDHTTTTDSEMEEPYLQESKEEGAPLKLKCELCGRVDFAYKFKRSKRFCSMACAKRYNVGCTKRVGLFHSDRSKLQKAGAATHNRRRASKASLPPLTKDTKKQPTGTVPLSVTAALQLTHSQEDSSRCSDNSSYEEPLSPISASSSTSRRRQGQRDLELPDMHMRDLVGMGHHFLPSEPTKWNVEDVYEFIRSLPGLPSSFPKGHETSIYSLSKHLRHSRFPQSPSGSCLWPVLRPRPHL

SEQ ID NO: 42536 - protein, 26 aa, Homo sapiens
MRPTKGRSTSHDQEPFTSSGNPSRTH

SEQ ID NO: 42537 - protein, 445 aa, Homo sapiens
MAVGGGSRMTDLTSSIPKPLLPVGNKPLIWYPLNLLERVGFEEVIVVTTRDVQKALCAEFKMKMKPDIVCIPDDADMGTADSLRYIYPKLKTDVLVLSCDLITDVALHEVVDLFRAYDASLAMLMRKGQDSIEPVPGQKGKKKAVEQRDFIGVDSTGKRLLFMANEADLDEELVIKGSILQKHPRIRFHTGLVDAHLYCLKKYIVDFLMENGSITSIRSELIPYLVRKQFSSASSQQGQEEKEEDLKKKELKSLDIYSFIKEANTLNLAPYDACWNACRGDRWEDLSRSQVRCYVHIMKEGLCSRVSTLGLYMEANRQVPKLLSALCPEEPPVHSSAQIVSKHLVGVDSLIGPETQIGEKSSIKRSVIGSSCLIKDRVTITNCLLMNSVTVEEGSNIQGSVICNNAVIEKGADIKDCLIGSGQRIEAKAKRVNEVIVGNDQLMEI

SEQ ID NO: 42538 - protein, 394 aa, Homo sapiens
MAVGGGSRMTDLTSSIPKPLLPVGNKPLIWYPLNLLERVGFEEVIVVTTRDVQKALCAEFKMKMKPDIVCIPDDADMGTADSLRYIYPKLKTDVLVLSCDLITDVALHEVVDLFRAYDASLAMLMRKGQDSIEPVPGQKGKKKAVEQRDFIGVDSTGKRLLFMANEADLDEELVIKGSILQKHPRIRFHTGLVDAHLYCLKKYIVDFLMENGSITSIRSELIPYLVRKQFSSASSQQGQEEKEEDLKKKELKSLDIYSFIKEANTLNLAPYDACWNACRGDRWEDLSRSQVRCYVHIMKEGLCSRVSTLGLYMEANRQVPKLLSALCPEEPPVHSSAQIVSKHLVGVDSLIGPETQIGEKSSIKRSVIGSSCLIKDRVTITNCLLMNSVTVEEG

SEQ ID NO: 42539 - protein, 124 aa, Homo sapiens [sequence omitted]

SEQ ID NO: 42540 - protein, 306 aa, Homo sapiens
MPGGPIPPGFFQPFMSPRYAGGPRPPIRMGNQPPGGVPGTQPLLPNSMDPTRQQGHPNMGGSMQRMNPPRGMGPMGPGPQNYGSGMRPPPNSLGPAMPGINMGPGAGRPWPNPNSANSIPYSSSSPGTYVGPPGGGGPPGTPIMPSPADSTNSSDNIYTMINPVPPGGSRSNFPMGPGSDGPMGGMGGMEPHHMNGSLGSGDIDGLPKNSPNNISGISNPPGTPRDDGELGGNFLHSFQNDNYSPSMTMSVSPLLRDAERAGIAGGKMPEIMQEVRCHYPGAGGEGISLLPSTPSHPIHAPYLSQF

SEQ ID NO: 42541 - protein, 527 aa, Homo sapiens
MFNWFTDCLWTLFLSNYQPSVESSSPGGSATSDDHEFDPSADMLVHDFDDERTLEEEEMMEGETNFSSEIEDLAREGDMPIHELLSLYGYGSTVRLPEEDEEEEEEEEEGEDDEDADNDDNSGCSGENKEENIKDSSGQEDETQSSNDDPSQSVASQDAQEIIRPRRCKYFDTNSEVEEESEEDEDYIPSEDWKKEIMVGSMFQAEIPVGICRYKENEKVYENDDQLLWDPEYLPEDKVIIFLKDASRRTGDEKGVEAIPEGSHIKDNEQALYELVKCNFDTEEALRRLRFNVKAAREELSVWTEEECRNFEQGLKAYGKDFHLIQANKVRTRSVGECVAFYYMWKKSERYDFFAQQTRFGKKKYNLHPGVTDYMDRLLDESESAASSRAPSPPPTASNSSNSQSEKEDGTVSTANQNGVSSNGPGEILNKEEVKVEGLHINGPTGGNKKPLHADMDTNGYETDNLTTDPKLAHMTARNENDFDEKSERPAKRRRVNSNGKESPGSSEFFQEAVSHGKFEELENTDD

SEQ ID NO: 42542 - protein, 329 aa, Homo sapiens
MYLGIWDNLPGVVKCQMEQALHLDFGTELEPRKEIVLFDKPTRGTTVQKFKEMVYSLFKAKLGDQGNLSELVNLILTVADGDKDGQVSLGEAKSAWALLQLNEFLLMVILQDKEHTPKLMGFCGDLYVMESVEYTSLYGISLPWVIELFIPSGFRRSMDQLFTPSWPRKAKIAIGLLEFVEDVFHGPYGNFLMCDTSAKNLGYNDKYDLKMVDMRKIVPETNLKELIKDRHCESDLDCVYGTDCRTSCDQSTMKCTSEVIQPNLAKACQLLKDYLLRGAPSEIREELEKQLYSCIALKVTANQMEMEHSLILNNLKTLLWKKISYTNDS

SEQ ID NO: 42543 - protein, 63 aa, Homo sapiens [sequence omitted]

SEQ ID NO: 42544 - protein, 213 aa, Homo sapiens
MKLTPEKVQNWNSEILAKQKPLIAKPSAKLLFVNRLKGKKYKTNSSTKVLQDASNSIDHRIPNSQRKISADTIGDEGFFDLLSRFQSNRMDDQRCCLQEKNCHTASTTTSSTPPKMMLKTSSVPVVSPNTDEFLDLLASSQSRRLDDQRASFSNLPGLRLTQNSQSVLSHLMTNDNKEADEDFFDILVKCQVCLYIFFVLHTAQIPLKTLVVL

SEQ ID NO: 42545 - protein, 684 aa, Homo sapiens
MKKPSAKQQKEVEKVKPQCKEVHQTLILDPAQRKRLQQQMQQHVQLLTQIHLLATCNPNLNPEASSTRICLKELGTFAQSSIALHHQYNPKFQTLFQPCNLMGAMQLIEDFSTHVSIDCSPHKTVKKTANEFPCLPKQVAWILATSKVFMYPELLPVCSLKAKNPQDKILFTKAEDNLLALGLKHFEGTEFLNPLISKYLLTCKTARQLTVRIKNLNMNRAPDNIIKFYKKTKQLPVLGKCCEEIQPHQWKPPIEREEHRLPFWLKASLPSIQEELRHMADGAREVGNMTGTTEINSDQGLEKDNSELGSETRYPLLLPKGVVLKLKPVADRFPKKAWRQKRSSVLKPLLIQPSPSLQPSFNPGKTPAQSTHSEAPPSKMVLRIPHPIQPATVLQTVPGVPPLGVSGGESFESPAALPAMPPEARTSFPLSESQTLLSSAPVPKVMMPSPASSMFRKPYVRRRPSKRRGARAFRCIKPAPVIHPASVIFTVPATTVKIVSLGGGCNMIQPVNAAVAQSPQTIPIATLLVNPTSFPCPLNQPLVASSVSPLIVSGNSVNLPIPSTPEDKAHMNVDIACAVADGENAFQGLEPKLEPQELSPLSATVFPKVEHSPGPPPVDKQCQEGLSENSAYRWTVVKTEEGRQALEPLPQGIQESLNNSSPGDLEEVVKMEPEDATEEISGFL

SEQ ID NO: 42546 - protein, 314 aa, Homo sapiens [sequence omitted]

SEQ ID NO: 42547 - protein, 577 aa, Homo sapiens [sequence omitted]

SEQ ID NO: 42548 - protein, 337 aa, Homo sapiens
MAFLLPLIIVLMVKHSDSRTHSLRYFRLGVSDPIHGVPEFISVGYVDSHPITTYDSVTRQKEPRAPWMAENLAPDHWERYTQLLRGWQQMFKVELKRLQRHYNHSGSHTYQRMIGCELLEDGSTTGFLQYAYDGQDFLIFNKDTLSWLAVDNVAHTIKQAWEANQHELLYQKNWLEEECIAWLKRFLEYGKDTLQRTEPPLVRVNRKETFPGVTALFCKAHGFYPPEIYMTWMKNGEEIVQEIDYGDILPSGDGTYQAWASIELDPQSSNLYSCHVEHCGVHMVLQVPQESETIPLVMKAVSGSIVLVIVLAGVGVLVWRRRPREQNGAIYLPTPDR

SEQ ID NO: 42549 - protein, 245 aa, Homo sapiens
MAFLLPLIIVLMVKHSDSRTHSLRYFRLGVSDPIHGVPEFISVGYVDSHPITTYDSVTRQKEPRAPWMAENLAPDHWERYTQLLRGWQQMFKVELKRLQRHYNHSGSHTYQRMIGCELLEDGSTTGFLQYAYDGQDFLIFNKDTLSWLAVDNVAHTIKQAWEANQHELLYQKNWLEEECIAWLKRFLEYGKDTLQRTESETIPLVMKAVSGSIVLVIVLAGVGVLVWRRRPREQNGAIYLPTPDR

SEQ ID NO: 42550 - protein, 752 aa, Homo sapiens
MGKKHDKSASDALRAERGRFLIKSNIVKHALIPGTRAKTSAVWNFFYTDPQHISRAVCNICKRSVSRGRPGSHLGTSTLQRHLQATHPIHWAVANKDSGAVANGLDEAETERSDLLSDTLHGEKSTGSQDLTAEDLSDSDSDEPMLEVENRSESPIPVAEQGTLMRAQERETTCCGNPVSSHISQAIIQMIVEDMHPYNYFSTPAFQRFMQIVAPDYRLPSETYFFTKAVPQLYDCVREKIFLTLENVQSQKIHLTVDIWTHDPSTDYFIVTVHWVSLETASFLNNGRIPDFRKWAVLCVTGLAKDCLITNILQELNDQIGLWLSPNFLIPSFIVSDNSSNVVHAIKDGGFTHVPCFLHCLNMVIQDFFCEHKSIENMLVAARKTCHHFSHSVKARQILQEFQNDHQLPWKNLKQDETGHWISTFYMLKWLLEHCYSVHHSLGRASGVVLTSLQWTLMTYVCDILKPFEEATQKVSVKTAGLNQVLPLIHHLLLSLQKLREDFQVRGITQALNLVDSLSLKLETDTLLSAMLKSKPCILATLLDPCFKNSLEDFFPQGADLETYKQFLAEEVCNYMESSPEICQIPTSEASCPSVTVGADSFTSSLKEGTSSSGSVDSSAVDNVALGSKSFMFPSAVAVVDEYFKEKYSEFSGGDDPLIYWQRKISIWPALTQVAIQYLSCPMCSWQSECIFTKNSHFHPKQIMSLDFDNIEQLMFLKMNLKNVNYDYSTLVLSWDPEQNEVVQSSEKEILP

SEQ ID NO: 42551 - protein, 14 aa, Homo sapiens
MDFWLWPLYFLPGV

SEQ ID NO: 42552 - protein, 65 aa, Homo sapiens
MSYDEISQLRLVCKRMDLVCQRMLNQGFLKVERYHNLCQKQVKAQLPRYVVGGNDNDVQLVLFVA

SEQ ID NO: 42553 - protein, 133 aa, Homo sapiens
MKEIAEAYLGNMVTNAVVTVPAYFNDPQHQATKYARTIAGLNVLRSISEPTVAATAYSLDKKVGAERNVLTFDLRGGTFDVSILTIEDGIFEVRSTAGDTHLGGEDFDNRMSTILLLSSRASIRRTSVRIREL

SEQ ID NO: 42554 - protein, 1548 aa, Homo sapiens
MALPLEVRARLAELELELSEGDITQKGYEKKRSKLIGAYLPQPPRVDQALPQERRAPVTPSSASRYHRRRSSGSRDERYRSDVHTEAVQAALAKHKERKMAVPMPSKRRSLVVQTSMDAYTPPDTSSGSEDEGSVQGDSQGTPTSSQGSINMEHWISQAIHGSTTSTTSSSSTQSGGSGAAHRLADVMAQTHIENHSAPPDVTTYTSEHSIQVERPQGSTGSRTAPKYGNAELMETGDGVPVSSRVSAKIQQLVNTLKRPKRPPLREFFVDDFEELLEVQQPDPNQPKPEGAQMLAMRGEQLGVVTNWPPSLEAALQRWGTISPKAPCLTTMDTNGKPLYILTYGKLWTRSMKVAYSILHKLGTKQEPMVRPGDRVALVFPNNDPAAFMAAFYGCLLAEVVPVPIEVPLTRKDAGSQQIGFLLGSCGVTVALTSDACHKGLPKSPTGEIPQFKGWPKLLWFVTESKHLSKPPRDWFPHIKDANNDTAYIEYKTCKDGSVLGVTVTRTALLTHCQALTQACGYTEAETIVNVLDFKKDVGLWHGILTSVMNMMHVISIPYSLMKVNPLSWIQKVCQYKAKVACVKSRDMHWALVAHRDQRDINLSSLRMLIVADGANPWSISSCDAFLNVFQSKGLRQEVICPCASSPEALTVAIRRPTDDSNQPPGRGVLSMHGLTYGVIRVDSEEKLSVLTVQDVGLVMPGAIMCSVKPDGVPQLCRTDEIGELCVCAVATGTSYYGLSGMTKNTFEVFPMTSSGAPISEYPFIRTGLLGFVGPGGLVFVVGKMDGLMVVSGRRHNADDIVATALAVEPMKFVYRGRIAVFSVTVLHDERIVIVAEQRPDSTEEDSFQWMSRVLQAIDSIHQVGVYCLALVPANTLPKTPLGGIHLSETKQLFLEGSLHPCNVLMCPHTCVTNLPKPRQKQPEIGPASVMVGNLVSGKRIAQASGRDLGQIEDNDQARKFLFLSEVLQWRAQTTPDHILYTLLNCRGAIANSLTCVQLHKRAEKIAVMLMERGHLQDGDHVALVYPPGIDLIAAFYGCLYAGCVPITVRPPHPQNIATTLPTVKMIVEVSRSACLMTTQLICKLLRSREAAAAVDVRTWPLILDTDDLPKKRPAQICKPCNPDTLAYLDFSVSTTGMLAGVKMSHAATSAFCRSIKLQCELYPSREVAICLDPYCGLGFVLWCLCSVYSGHQSILIPPSELETNPALWLLAVSQYKVRDTFCSYSVMELCTKGLGSQTESLKARGLDLSRVRTCVVVAEERPRIALTQSFSKLFKDLGLHPRAVSTSFGCRVNLAICLQGTSGPDPTTVYVDMRALRHDRVRLVERGSPHSLPLMESGKILPGVRIIIANPETKGPLGDSHLGEIWVHSAHNASGYFTIYGDESLQSDHFNSRLSFGDTQTIWARTGYLGFLRRTELTDANGERHDALYVVGALDEAMELRGMRYHPIDIETSVIRAHKSVTECAVFTWTNLLVVVVELDGSEQEALDLVPLVTNVVLEEHYLIVGVVVVVDIGVIPINSRGEKQRMHLRDGFLADQLDPIYVAYNM

SEQ ID NO: 42555 - protein, 941 aa, Homo sapiens
MDSTGVPHILEHTVLCGSQKYPCRDPFFKMLNRSLSTFMNAFTASDYTLYPFSTQNPKDFQNLLSVYLDATFFPCLRELDFWQEGWRLEHENPSDPQTPLVFKGVVFNEMKGAFTDNERIFSQHLQNRLLPDHTYSVVSGGDPLCIPELTWEQLKQFHATHYHPSNARFFTYGNFPLEQHLKQIHEEALSKFQKIEPSTVVPAQTPWDKPREFQITCGPDSFATDPSKQTTISVSFLLPDITDTFEAFTLSLLSSLLTSGPNSPFYKALIESGLGTDFSPDVGYNGYTREAYFSVGLQGIAEKDIETVRSLIDRTIDEVVEKGFEDDRIEALLHKIEIQMKHQSTSFGLMLTSYIASCWNHDGDPVELLKLGNQLAKFRQCLQENPKFLQEKVKQYFKNNQHKLTLSMRPDDKYHEKQAQVEATKLKQKVEALSPGDRQQIYEKGLELRSQQSKPQDASCLPALKVSDIEPTIPVTELDVVLTAGDIPVQYCAQPTNGMVYFRAFSSLNTLPEELRPYVPLFCSVLTKLGCGLLDYREQAQQIELKTGGMSASPHVLPDDSHMDTYEQGVLFSSLCLDRNLPDMMQLWSEIFNNPCFEEEEHFKVLVKMTAQELANGIPDSGHLYASIRAGRTLTPAGDLQETFSGMDQVRLMKRIAEMTDIKPILRKLPRIKKHLLNGDNMRCSVNATPQQMPQTEKAVEDFLRSIGRSKKERRPVRPHTVEKPVPSSSGGDAHVPHGSQVIRKLVMEPTFKPWQMKTHFLMPFPVNYVGECIRTVPYTDPDHASLKILARLMTAKFLHTEIREKGGAYGGGAKLSHNGIFTLYSYRDPNTIETLQSFGKAVDWAKSGKFTQQDIDEAKLSVFSTVDAPVAPSDKGMDHFLYGLSDEMKQAHREQLFAVSHDKLLAVSDRYLGTGKSTHGLAILGPENPKIAKDPSWIIQ

SEQ ID NO: 42556 - protein, 969 aa, Homo sapiens
MAKSNSVGQDSCQDSEGDMIFPAESSCALPQEGSAGPGSPGSAPPSRKRSWSSEEESNQATGTSRWDGVSKKAPRHHLSVPCTRPREARQEAEDSTSRLSAESGETDQDAGDVGPDPIPDSYYGLLGTLPCQEALSHICSLPSEVLRHVFAFLPVEDLYWNLSLVCHLWREIISDPLFIPWKKLYHRYLMNEEQAVSKVDGILSNCGIEKESDLCVLNLIRYTATTKCSPSVDPERVLWSLRDHPLLPEAEACVRQHLPDLYAAAGGVNIWALVAAVVLLSSSVNDIQRLLFCLRRPSSTVTMPDVTETLYCIAVLLYAMREKGINISNRIHYNIFYCLYLQENSCTQATKVKEEPSVWPGKKTIQLTHEQQLILNHKMEPLQVVKIMAFAGTGKTSTLVKYAEKWSQSRFLYVTFNKSIAKQAERVFPSNVICKTFHSMAYGHIGRKYQSKKKLNLFKLTPFMVNSVLAEGKGGFIRAKLVCKTLENFFASADEELTIDHVPIWCKNSQGQRVMVEQSEKLNGVLEASRLWDNMRKLGECTEEAHQMTHDGYLKLWQLSKPSLASFDAIFVDEAQDCTPAIMNIVLSQPCGKIFVGDPHQQIYTFRGAVNALFTVPHTHVFYLTQSFRFGVEIAYVGATILDVCKRVRKKTLVGGNHQSGIRGDAKGQVALLSRTNANVFDEAVRVTEGEFPSRIHLIGGIKSFGLDRIIDIWILLQPEEERRKQNLVIKDKFIRRWVHKEGFSGFKRYVTAAEDKELEAKIAVVEKYNIRIPELVQRIEKCHIEDLDFAEYILGTVHKAKGLEFDTVHVLDDFVKVPCARHNLPQLPHFRVESFSEDEWNLLYVAVTRAKKRLIMTKSLENILTLAGEYFLQAELTSNVLKTGVVRCCVGQCNNAIPVDTVLTMKKLPITYSNRKENKGGYLCHSCAEQRIGPLAFLTASPEQVRAMERTVENIVLPRHEALLFLVF

SEQ ID NO: 42557 - protein, 499 aa, Homo sapiens
MRNEELLLSNGTANKMNGALDHSDQPDPDAIKMFVGQIPRSWSEKELKELFEPYGAVYQINVLRDRSQNPPQSKGCCFVTFYTRKAALEAQNALHNIKTLPGMHHPIQMKPADSEKSNAVEDRKLFIGMVSKKCNENDIRVMFSPFGQIEECRILRGPDGLSRGCAFVTFSTRAMAQNAIKAMHQSQTMEGCSSPIVVKFADTQKDKEQRRLQQQLAQQMQQLNTATWGNLTGLGGLTPQYLALLQQATSSSNLGAFSGIQQMAGMNALQLQNLATLAAAAAAAQTSATSTNANPLSTTSSALGALTSPVAASTPNSTAGAAMNSLTSLGTLQGLAGATVGLNNINALAGMAALNGGLGATGLTNGTAGTMDALTQAYSGIQQYAAAALPTLYSQSLLQQQSAAGSQKEGPEGANLFIYHLPQEFGDQDILQMFMPFGNVISAKVFIDKQTNLSKCFGFVSYDNPVSAQAAIQAMNGFQIGMKRLKVQLKRSKNDSKPY

SEQ ID NO: 42558 - protein, 24 aa, Homo sapiens
MLIRGCAPCSSFMQALGKAGAAAA

SEQ ID NO: 42559 - protein, 1011 aa, Homo sapiens
MKVFSLIQQAVTRYRKAIAKDPNYWIQVHRLEHGDGGILDLDDILCDVADDKDRLVAVFDEQDPHHGGDGTSASSTGTQSPEIFGSELGTNNVSAFQPYQATSEIEVTPSVLRANMPLHVRRSSDPALIGLSTSVSDSNFSSEEPSRKNPTRWSTTAGFLKQNTAGSPKTCDRKKDENYRSLPRDTSNWSNQFQRDNARSSLSASHPMVGKWLEKQEQDEDGTEEDNSRVEPVGHADTGLEHIPNFSLDDMVKLVEVPNDGGPLGIHVVPFSARGGRTLGLLVKRLEKGGKAEHENLFRENDCIVRINDGDLRNRRFEQAQHMFRQAMRTPIIWFHVVPAANKEQYEQLSQSEKNNYYSSRFSPDSQYIDNRSVNSAGLHTVQRAPRLNHPPEQIDSHSRLPHSAHPSGKPPSAPASAPQNVFSTTVSSGYNTKKIGKRLNIQLKKGTEGLGFSITSRDVTIGGSAPIYVKNILPRGAAIQDGRLKAGDRLIEVNGVDLVGKSQEEVVSLLRSTKMEGTVSLLVFRQEDAFHPRELNAEPSQMQIPKETKAEDEDIVLTPDGTREFLTFEVPLNDSGSAGLGVSVKGNRSKENHADLGIFVKSIINGGAASKDGRLRVNDQLIAVNGESLLGKTNQDAMETLRRSMSTEGNKRGMIQLIVARRISKCNELKSPGSPPGPELPIETALDDRERRISHSLYSGIEGLDESPSRNAALSRIMGKYQLSPTVNMPQDDTVIIEDDRLPVLPPHLSDQSSSSSHDDVGFVTADAGTWAKAAISDSADCSLSPDVDPVLAFQREGFGRQSMSEKRTKQFSDASQLDFVKTRKSKSMDLGIADETKLNTVDDQKAGSPSRDVGPSLGLKKSSSLESLQTAVAEVTLNGDIPFHRPRPRIIRGRGCNESFRAAIDKSYDKPAVDDDDEGMETLEEDTEESSRSGRESVSTASDQPSHSLERQMNGNQEKGDKTDRKKDKTGKEKKKDRDKEKDKMKAKKGMLKGLGDMFSLAKLKPEKR

SEQ ID NO: 42560 - protein, 454 aa, Homo sapiens [sequence omitted]

SEQ ID NO: 42561 - protein, 672 aa, Homo sapiens
MKEKLNGDTEEGFNRLSDEFSKSHKSRRKDLPNGDIDEYEKKSKRVSSLDTSTHKSSDNKLEETLTREQKEGAFSNFPISEETIKLLKGRGVTYLFPIQVKTFGPVYEGKDLIAQARTGTGKTFSFAIPLIERLQRNQETIKKSRSPKVLVLAPTRELANQVAKDFKDITRKLSVACFYGGTSYQSQINHIRNGIDILVGTPGRIKDHLQSGRLDLSKLRHVVLDEVDQMLDLGFAEQVEDIIHESYKTDSEDNPQTLLFSATCPQWVYKVAKKYMKSRYEQVDLVGKMTQKAATTVEHLAIQCHWSQRPAVIGDVLQVYSGSEGRAIIFCETKKNVTEMAMNPHIKQNAQCLHGDIAQSQREITLKGFREGSFKVLVATNVAARGLDIPEVDLVIQSSPPQDVESYIHRSGRTGRAGRTGICICFYQPRERGQLRYVEQKAGITFKRVGVPSTMDLVKSKSMDAIRSLASVSYAAVDFFRPSAQRLIEEKGAVDALAAALAHISGASSFEPRSLITSDKGFVTMTLESLEEIQDVSCAWKELNRKLSSNAVSQITRMCLLKGNMGVCFDVPTTESERLQAEWHDSDWILSVPAKLPEIEEYYDGNTSSNSRQRSGWSSGRSGRSGRSGGRSGGRSGRQSRQGSRSGSRQDGRRRSGNRNRSRSGGHKRSFD

SEQ ID NO: 42562 - protein, 1834 aa, Homo sapiens
MFAEWEDGERFSFEDSDRFEEDSLCSFISEAESLCQNWRGWRKQSAGPNSPTGGGGGGGSGGTRMRDGLVIPLVELSAKQVAFHIPFEVVEKVYPPVPEQLQLRIAFWSFPENEEDIRLYSCLANGSADEFQRGDQLFRMRAVKDPLQIGFHLSATVVPPQMVPPKGAYNVAVMFDRCRVTSCSCTCGAGAKWCTHVVALCLFRIHNASAVCLRAPVSESLSRLQRDQLQKFAQYLISELPQQILPTAQRLLDELLSSQSTAINTVCGAPDPTAGPSASDQSTWYLDESTLTDNIKKTLHKFCGPSPVVFSDVNSMYLSSTEPPAAAEWACLLRPLRGREPEGVWNLLSIVREMFKRRDSNAAPLLEILTDQCLTYEQITGWWYSVRTSASHSSASGHTGRSNGQSEVAAHACASMCDEMVTLWRLAVLDPALSPQRRRELCTQLRQWQLKVIENVKRGQHKKTLERLFPGFRPAVEACYFNWEEAYPLPGVTYSGTDRKLALCWARALPSRPGASRSGGLEESRDRPRPLPTEPAVRPKEPGTKRKGLGEGVPSSQRGPRRLSAEGGDKALHKMGPGGGKAKALGGAGSGSKGSAGGGSKRRLSSEDSSLEPDLAEMSLDDSSLALGAEASTFGGFPESPPPCPLHGGSRGPSTFLPEPPDTYEEDGGVYFSEGPEPPTASVGPPGLLPGDVCTQDDLPSTDESGNGLPKTKEAAPAVGEEDDDYQAYYLNAQDGAGGEEEKAEGGAGEEHDLFAGLKPLEQESRMEVLFACAEALHAHGYSSEASRLTVELAQDLLANPPDLKVEPPPAKGKKNKVSTSRQTWVATNTLSKAAFLLTVLSERPEHHNLAFRVGMFALELQRPPASTKALEVKLAYQESEVAALLKKIPLGPSEMSTMRCRAEELREGTLCDYRPVLPLMLASFIFDVLCAPGSRPPSRNWNSETPGDEELGFEAAVAALGMKTTVSEAEHPLLCEGTRREKGDLALALMITYKDDQAKLKKILDKLLDRESQTHKPQTLSSFYSSSRPTTASQRSPSKHGGPSAPGALQPLTSGSAGPAQPGSVAGAGPGPTEGFTEKNVPESSPHSPCEGLPSEAALTPRPEGKVPSRLALGSRGGYNGRGWGSPGRPKKKHTGMASIDSSAPETTSDSSPTLSRRPLRGGWAPTSWGRGQDSDSISSSSSDSLGSSSSSGSRRASASGGARAKTVEVGRYKGRRPESHAPHVPNQPSEAAAHFYFELAKTVLIKAGGNSSTSIFTHPSSSGGHQGPHRNLHLCAFEIGLYALGLHNFVSPNWLSRTYSSHVSWITGQAMEIGSAALTILVECWDGHLTPPEVASLADRASRARDSNMVRAAAELALSCLPHAHALNPNEIQRALVQCKEQDNLMLEKACMAVEEAAKGGGVYPEVLFEVAHQWFWLYEQTAGGSSTAREGATSCSASGIRAGGEAGRGMPEGRGGPGTEPVTVAAAAVTAAATVVPVISVGSSLYPGPGLGHGHSPGLHPYTALQPHLPCSPQYLTHPAHPAHPMPHMPRPAVFPVPSSAYPQGVHPAFLGAQYPYSVTPPSLAATAVSFPVPSMAPITVHPYHTEPGLPLPTSVACELWGQGTVSSVHPASTFPAIQGASLPALTTQPSPLVSGGFPPPEEETHSQPVNPHSLHHLHAAYRVGMLALEMLGRRAHNDHPNNFSRSPPYTDDVKWLLGLAAKLGVNYVHQFCVGAAKGVLSPFVLQEIVMETLQRLSPAHAHNHLRAPAFHQLVQRCQQAYMQYIHHRLIHLTPADYDDFVNAIRSARSAFCLTPMGMMQFNDILQNLKRSKQTKELWQRVSLEMATFSP

SEQ ID NO: 42563 - protein, 267 aa, Homo sapiens
MLTINPAKRITADQALKHPWVCQRSTVASMMHRQETVECLRKFNARRKLKGAILTTMLVSRNFSAAKSLLNKKSDGGVKPQSNNKNSLVSPAQEPAPLQTAMEPQTTVVHNATDGIKGSTESCNTTTEDEDLKVRKQEIIKITEQLIEAINNGDFEAYTKICDPGLTSFEPEALGNLVEGMDFHKFYFENLLSKNSKPIHTTILNPHVHVIGEDAACIAYIRLTQYIDGQGRPRTSQSEETRVWHRRDGKWLNVHYHCSGAPAAPLQ

SEQ ID NO: 42564 - protein, 1064 aa, Homo sapiens
MDRHIQQTNDRLQCIKQHLQNPANFHNAATELLDWCGDPRAFQRPFEQSLMGCLTVVSRVAAQQGFDLDLGYRLLAVCAANRDKFTPKSAALLSSWCEELGRLLLLRHQKSRQSDPPGKLPMQPPLSSMSSMKPTLSHSDGSFPYDSVPWQQNTNQPPGSLSVVTTVWGVTNTSQSQVLGNPMANANNPMNPGGNPMASGMTTSNPGLNSPQFAGQQQQFSAKAGPAQPYIQQSMYGRPNYPGSGGFGASYPGGPNAPAGMGIPPHTRPPADFTQPAAAAAAAAVAAAAATATATATATVAALQETQNKDINQYGPMGPTQAYNSQFMNQPGPRGPASMGGSMNPASMAAGMTPSGMSGPPMGMNQPRPPGISPFGTHGQRMPQQTYPGPRPQSLPIQNIKRPYPGEPNYGNQQYGPNSQFPTQPGQYPAPNPPRPLTSPNYPGQRMPSQPSSGQYPPPTVNMGQYYKPEQFNGQNNTFSGSSYSNYSQGNVNRPPRPVPVANYPHSPVPGNPTPPMTPGSSIPPYLSPSQDVKPPFPPDIKPNMSALPPPPANHNDELRLTFPVRDGVVLEPFRLEHNLAVSNHVFHLRPTVHQTLMWRSDLELQFKCYHHEDRQMNTNWPASVQVSVNATPLTIERGDNKTSHKPLHLKHVCQPGRNTIQITVTACCCSHLFVLQLVHRPSVRSVLQGLLKKRLLPAEHCITKIKRNFSSVAASSGNTTLNGEDGVEQTAIKVSLKCPITFRRIQLPARGHDCKHVQCFDLESYLQLNCERGTWRCPVCNKTALLEGLEVDQYMWGILNAIQHSEFEEVTIDPTCSWRPVPIKSDLHIKDDPDGIPSKRFKTMSPSQMIMPNVMEMIAALGPGPSPYPLPPPPGGTNSNDYSSQGNNYQGHGNFDFPHGNPGGTSMNDFMHGPPQLSHPPDMPNNMAALEKPLSHPMQETMPHAGSSDQPHPSIQQGLHVPHPSSQSGPPLHHSGAPPPPPSQPPRQPPQAAPSSHPHSDLTFNPSSALEGQAGAQGASDMPEPSLDLLPELTNPDELLSYLDPPDLPSNSNDDLLSLFENN

SEQ ID NO: 42565 - protein, 944 aa, Homo sapiens
MFDKNGIKGGLKSVSLFTSKLAKPSTMFVSSTEELNQKSFSGPSNLGKFTKGTLLGRTSYSSINTPKSQLNGFYGNRSAGSMQRPRANSCATRSSSGESLAQSPDSSKSINCEKMVRSQSFSHSIQNSFLPPSSITRSHSFNRAVDLTKPYQNQQLSIRVPLRSSMLTRNSRQPEVLNGNEHLGYGFNRPYAAGGKKLALPNGPGVTSTLGYRMVHPSLLKSSRSPFSGTMTVDGNKNSPADTCVEEDATVLAKDRAANKDQELIENESYRTKNNQTMKHDAKMRYLSDDVDDISLSSLSSSDKNDLSEDFSDDFIDIEDSNRTRITPEEMSLKEEKHENGPPQDMFDSPKENEKAFSKTDEWIDISVSDRSECTKHTSGNNLVSPDTDYRAGSSFELSPSDSSDGTYMWDEEGLEPIGNVHPVGSYESSEMNSIDILNNLESCDLEDDDLMLDVDLPEDAPLENVECDNMNRFDRPDRNVRQPQEGFWKRPPQRWSGQEHYHLSHPDHYHHHGKSDLSRGSPYRESPLGHFESYGGMPFFQAQKMFVDVPENTVILDEMTLRHMVQDCTAVKTQLLKLKRLLHQHDGSGSLHDIQLSLPSSPEPEDGDKVYKNEDLLNEIKQLKDEIKKKDEKIQLLELQLATQHICHQKCKEEKCTYADKYTQTPWRRIPPQVLQPSSSLPRPTDHTQGKLIKPQRIEARSECSIQDMHQGGAHPEESFTHVLHQESNYGLEEQPFSSGPQLTMDVAKSTPSEANLNITVNAQEPYHLANNQISDMQFIPTSLQTPPESSTVDQAKRVGRNQSPPVGYMSQPKSLQLLKPSILSSLVPPPVSESSPSRTPTCKKSPIITTCNSAKLQPTSSQTNLANNQNLKASKLRPPSGSFKQKQTNSPQLEPQSFQAKTSIPRPLTQRKEIMQNPNGNLHSGDCLASNRYSRLPKPKIH

SEQ ID NO: 42566 - protein, 421 aa, Homo sapiens
MPDHTDVSLSPEERVRALSKLGCNITISEDITPRRYFRSGVEMERMASVYLEEGNLENAFVLYNKFITLFVEKLPNHRDYQQCAVPEKQDIMKKLKEIAFPRTDELKNDLLKKYNVEYQEYLQSKNKYKAEILKKLEHQRLIEAERKRIAQMRQQQLESEQFLFFEDQLKKQELARGQMRSQQTSGLSEQIDGSALSCFSTHQNNSLLNVFADQPNKSDATNYASHSPPVNRALTPAATLSAVQNLVVEGLRCVVLPEDLCHKFLQLAESNTVRGIETCGILCGKLTHNEFTITHVIVPKQSAGPDYCDMENVEELFNVQDQHDLLTLGWIHTHPTQTAFLSSVDLHTHCSYQLMLPEAIAIVCSPKHKDTGIFRLTNAGMLEVSACKKKGFHPHTKEPRLFSICKHVLVKDIKIIVLDLR

SEQ ID NO: 42567 - protein, 446 aa, Homo sapiens
MPDHTDVSLSPEERVRALSKLGCNITISEDITPRRYFRSGVEMERMASVYLEEGNLENAFVLYNKFITLFVEKLPNHRDYQQCAVPEKQDIMKKLKEIAFPRTDELKNDLLKKYNVEYQEYLQSKNKYKAEILKKLEHQRLIEAERKRIAQMRQQQLESEQFLFFEDQLKKQELARGQMRSQQTSGLSEQIDGSALSCFSTHQNNSLLNVFADQPNKSDATNYASHSPPVNRALTPAATLSAVQNLVVEGLRCVVLPEDLCHKFLQLAESNTVRGIETCGILCGKLTHNEFTITHVIVPKQSAGPDYCDMENVEELFNVQDQHDLLTLGWIHTHPTQTAFLSSVDLHTHCSYQLMLPEAIAIVCSPKHKDTGIFRLTNAGMLEVSACKKKGFHPHTKEPRLFSIQKFLSGIISGTALEMEPLKIGYGPNGFPLLGISRSSSPSEQL

SEQ ID NO: 42568 - protein, 978 aa, Homo sapiens
MNNPAIKRIGNHITKSPEDKREYRGLELANGIKVLLISDPTTDKSSAALDVHIGSLSDPPNIAGLSHFCEHMLFLGTKKYPKENEYSQFLSEHAGSSNAFTSGEHTNYYFDVSHEHLEGALDRFAQFFLCPLFDESCKDREVNAVDSEHEKNVMNDAWRLFQLEKATGNPKHPFSKFGTGNKYTLETRPNQEGIDVRQELLKFHSAYYSSNLMAVCVLGRESLDDLTNLVVKLFSEVENKNVPLPEFPEHPFQEEHLKQLYKIVPIKDIRNLYVTFPIPDLQKYYKSNPGHYLGHLIGHEGPGSLLSELKSKGWVNTLVGGQKEGARGFMFFIINVDLTEEGLLHVEDIILHMFQYIQKLRAEGPQEWVFQECKDLNAVAFRFKDKERPRGYTSKIAGILHYYPLEEVLTAEYLLEEFRPDLIEMVLDKLRPENVRVAIVSKSFEGKTDRTEEWYGTQYKQEAIPDEVIKKWQNADLNGKFKLPTKNEFIPTNFEILPLEKEATPYPALIKDTAMSKLWFKQDDKFFLPKACLNFEFFSPFAYVDPLHCNMAYLYLELLKDSLNEYAYAAELAGLSYDLQNTIYGMYLSVKGYNDKQPILLKKIIEKMATFEIDEKRFEIIKEAYMRSLNNFRAEQPHQHAMYYLRLLMTEVAWTKDELKEALDDVTLPRLKAFIPQLLSRLHIEALLHGNITKQAALGIMQMVEDTLIEHAHTKPLLPSQLVRYREVQLPDRGWFVYQQRNEVHNNCGIEIYYQTDMQSTSENMFLELFCQIISEPCFNTLRTKEQLGYIVFSGPRRANGIQGLRFIIQSEKPPHYLESRVEAFLITMEKSIEDMTEEAFQKHIQALAIRRLDKPKKLSAECAKYWGEIISQQYNFDRDNTEVAYLKTLTKEDIIKFYKEMLAVDAPRRHKVSVHVLAREMDSCPVVGEFPCQNDINLSQAPALPQPEVIQNMTEFKRGLPLFPLVKPHINFMAAKL

SEQ ID NO: 42569 - protein, 1058 aa, Homo sapiens
MKGVKEHHEDHGIHESRRPCLSLASKYLAKGTNIYVPSSYHLPKEMKSLKKKHRSPERRKSLFIHENNEKNDRDRGKTNADSKKQTTVAEADIFNNSSRSLSSRSSLSRHHPEESPLGAKFQLSLASYCRERELKRLRKEQMEQRINSENSFSEASSLSLKSSIERKYKPRQEQRKQNDIIPGKNNLSNVENGHLSRKRSSSDSWEPTSAGSKQNKFPEKRKRNSVDSDLKSTRESMIPKARESFLEKRPDGPHQKEKFIKHIALKTPGDVLRLEDISKEPSDETDGSSAGLAPSNSGNSGHHSTRNSDQIQVAGTKETKMQKPHLPLSQEKSAIKKASNLQKNKTASSTTKEKETKLPLLSRVPSAGSSLVPLNAKNCALPVSKKDKERSSSKECSGHSTESTKHKEHKAKTNKADSNVSSGKISGGPLRSEYGTPTKSPPAALEVVPCIPSPAAPSDKAPSEGESSGNSNAGSSALKRKLRGDFDSDEESLGYNLDSDEEEETLKSLEEIMALNFNQTPAATGKPPALSKGLRSQSSDYTGHVHPGTYTNTLERLVKEMEDTQRLDELQKQLQEDIRQGRGIKSPIRIGEEDSTDDEDGLLEEHKEFLKKFSVTIDAIPDHHPGEEIFNFLNSGKIFNQYTLDLRDSGFIGQSAVEKLILKSGKTDQIFLTTQGFLTSAYHYVQCPVPVLKWLFRMMSVHTDCIVSVQILSTLMEITIRNDTFSDSPVWPWIPSLSDVAAVFFNMGIDFRSLFPLENLQPDFNEDYLVSETQTTSRGKESEDSSYKPIFSTLPETNILNVVKFLGLCTSIHPEGYQDREIMLLILMLFKMSLEKQLKQIPLVDFQSLLINLMKNIRDWNTKVPELCLGINELSSHPHNLLWLVQLVPNWTSRGRQLRQCLSLVIISKLLDEKHEDVPNASNLQVSVLHRYLVQMKPSDLLKKMVLKKKAEQPDGIIDDSLHLELEKQAYYLTYILLHLVGEVSCSHSFSSGQRKHFVLLCGALEKHVKCDIREDARLFYRTKVKDLVARIHGKWQEIIQNCRPTQGQLHDFWVPDS

SEQ ID NO: 42570 - protein, 644 aa, Homo sapiens
MGSVSSLISGRPCPGGPAPPRHHGPPGPTFFRQQDGLLRGGYEAQEPLCPAVPPRKAVPVTSFTYINEDFRTESPPSPSSDVEDAREQRAHNAHLRGPPPKLIPVSGKLEKNMEKILIRPTAFKPVLPKPRGAPSLPSFMGPRATGLSGSQGSLTQLFGGPASSSSSSSSSSAADKPLAFSGWASGCPSGTLSDSGRNSLSSLPTYSTGGAEPTTSSPGGHLPSHGSGRGALPGPARGVPTGPSHSDSGRSSSSKSTGSLGGRVAGGLLGSGTRASPDSSSCGERSPPPPPPPPSDEALLHCVLEGKLRDREAELQQLRDSLDENEATMCQAYEERQRHWQREREALREDCAAQAQRAQRAQQLLQLQVFQLQQEKRQLQDDFAQLLQEREQLERRCATLEREQRELGPRLEETKWEVCQKSGEISLLKQQLKESQAELVQKGSELVALRVALREARATLRVSEGRARGLQEAARARELELEACSQELQRHRQEAEQLREKAGQLDAEAAGLREPPVPPATADPFLLAESDEAKVQRAAAGVGGSLRAQVERLRVELQRERRRGEEQRDSFEGERLAWQAEKEQVIRYQKQLQHNYIQMYRRNRQLEQELQQLSLELEARELADLGLAEQAPCICLEEITATEI

SEQ ID NO: 42571 - protein, 373 aa, Homo sapiens
MLDRDVGPTPMYPPTYLEPGIGRHTPYGNQTDYRIFELNKRLQNWTEECDNLWWDAFTTEFFEDDAMLTITFCLEDGPKRYTIGRTLIPRYFRSIFEGGATELYYVLKHPKEAFHSNFVSLDCDQGSMVTQHGKPMFTQVCVEGRLYLEFMFDDMMRIKTWHFSIRQHRELIPRSILAMHAQDPQMLDQLSKNITRCGLSNSTLNYLRLCVILEPMQELMSRHKTYSLSPRDCLKTCLFQKWQRMVAPPAEPTRQQPSKRRKRKMSGGSTMSSGGGNTNNSNSKKKSPASTFALSSQDVMVVGEPTLMGGEFGDEDERLITRLENTQFDAANGIDDEDSFNNSPALGANSPWNSKPPSSQESKSENPTSQASQ

SEQ ID NO: 42572 - protein, 849 aa, Homo sapiens
MAARRSLSARGRGILQAAAGRLLPLLLLSCCCGAGGCAAVGENEETVIIGLRLEDTNDVSFMEGGALRVSERTRVKLRVYGQNINNETWSRIAFTEHERRRHSPGERGLGGPAPPEPDSGPQRCGIRTSDIIILPHIILNRRTSGIIEIEIKPLRKMEKSKSYYLCTSLSTPALGAGGSGSTGGAVGGKGGSGVAGLPPPPWAETTWIYHDGEDTKMIVGEEKKFLLPFWLQVIFISLLLCLSGMFSGLNLGLMALDPMELRIVQNCGTEKEKNYAKRIEPVRRQGNYLLCSLLLGNVLVNTTLTILLDDIAGSGLVAVVVSTIGIVIFGEIVPQAICSRHGLAVGANTIFLTKFFMMMTFPASYPVSKLLDCVLGQEIGTVYNREKLLEMLRVTDPYNDLVKEELNIIQGALELRTKTVEDVMTPLRDCFMITGEAILDFNTMSEIMESGYTRIPVFEGERSNIVDLLFVKDLAFVDPDDCTPLKTITKFYNHPLHFVFNDTKLDAMLEEFKKGKSHLAIVQRVNNEGEGDPFYEVLGIVTLEDVIEEIIKSEILDETDLYTDNRTKKKVAHRERKQDFSAFKQTDSEMKVKISPQLLLAMHRFLATEVEAFSPSQMSEKILLRLLKHPNVIQELKYDEKNKKAPEYYLYQRNKPVDYFVLILQGKVEVEAGKEGMKFEASAFSYYGVMALTASPVPLSLSRTFVVSRTELLAAGSPGENKSPPRPCGLNHSDSLSRSDRIDAVTPTLGSSNNQLNSSLLQVYIPDYSVRALSDLQFVKISRQQYQNALMASRMDKTPQSSDSENTKIELTLTELHDGLPDETANLLNEQNCVTHSKANHSLHNEGAI

SEQ ID NO: 42573 - protein, 545 aa, Homo sapiens [sequence omitted]

SEQ ID NO: 42574 - protein, 1103 aa, Homo sapiens
MVTKNDVMNLLESAGFSRSNPYYIVKQGKINQMATAPDSQRLKLLREVAGTRVYDERKEESISLMKETEGKREKINELLKYIEERLHTLEEEKEELAQYQKWDKMRRALEYTIYNQELNETRAKLDELSAKRETSGEKSRQLRDAQQDARDKMEDIERQVRELKTKISAMKEEKEQLSAERQEQIKQRTKLELKAKDLQDELAGNSEQRKRLLKERQKLLEKIEEKQKELAETEPKFNSVKEKEERGIARLAQATQERTDLYAKQGRGSQFTSKEERDKWIKKELKSLDQAINDKKRQIAAIHKDLEDTEANKEKNLEQYNKLDQDLNEVKARVEELDRKYYEVKNKKDELQSERNYLWREENAEQQALAAKREDLEKKQQLLRAATGKAILNGIDSINKVLDHFRRKGINQHVQNGYHGIVMNNFECEPAFYTCVEVTAGNRLFYHIVDSDEVSTKILMEFNKMNLPGEVTFLPLNKLDVRDTAYPETNDAIPMISKLRYNPRFDKAFKHVFGKTLICRSMEVSTQLARAFTMDCITLEGDQVSHRGALTGGYYDTRKSRLELQKDVRKAEEELGELEAKLNENLRRNIERINNEIDQLMNQMQQIETQQRKFKASRDSILSEMKMLKEKRQQSEKTFMPKQRSLQSLEASLHAMESTRESLKAELGTDLLSQLSLEDQKRVDALNDEIRQLQQENRQLLNERIKLEGIITRVETYLNENLRKRLDQVEQELNELRETEGGTVLTATTSELEAINKRVKDTMARSEDLDNSIDKTEAGIKELQKSMERWKNMEKEHMDAINHDTKELEKMTNRQGMLLKKKEECMKKIRELGSLPQEAFEKYQTLSLKQLFRKLEQCNTELKKYSHVNKKALDQFVNFSEQKEKLIKRQEELDRGYKSIMELMNVLELRKYEAIQLTFKQVSKNFSEVFQKLVPGGKATLVMKKGDVEGSQSQDEGEGSGESERGSGSQSSVPSVDQFTGVGIRVSFTGKQGEMREMQQLSGGQKSLVALALIFAIQKCDPAPFYLFDEIDQALDAQHRKAVSDMIMELAVHAQFITTTFRPELLESADKFYGVKFRNKVSHIDVITAEMAKDFVEDDTTHG

SEQ ID NO: 42575 - protein, 702 aa, Homo sapiens
MGDYKVAHPQDPHHPSEKPVIHCHKCGEPCKGEVLRVQTKHFHIKCFTCKVCGCDLAQGGFFIKNGEYLCTLDYQRMYGTRCHGCGEFVEGEVVTALGKTYHPNCFACTICKRPFPPGDRVTFNGRDCLCQLCAQPMSSSPKETTFSSNCAGCGRDIKNGQALLALDKQWHLGCFKCKSCGKVLTGEYISKDGAPYCEKDYQGLFGVKCEACHQFITGKVLEAGDKHYHPSCARCSRCNQMFTEGEEMYLQGSTVWHPDCKQSTKTEEKLRPTRTSSESIYSRPGSSIPGSPGHTIYAKVDNEILDYKDLAAIPKVKAIYDIERPDLITYEPFYTSGYDDKQERQSLGESPRTLSPTPSAEGYQDVRDRMIHRSTSQGSINSPVYSRHSYTPTTSRSPQHFHRPGNEPSSGRNSPLPYRPDSRPLTPTYAQAPKHFHVPDQGINIYRKPPIYKQHAALAAQSKSSEDIIKFSKFPAAQAPDPSETPKIETDHWPGPPSFAVVGPDMKRRSSGREEDDEELLRRRQLQEEQLMKLNSGLGQLILKEEMEKESRERSSLLASRYDSPINSASHIPSSKTASLPGYGRNGLHRPVSTDFAQYNSYGDVSGGVRDYQTLPDGHMPAMRMDRGVSMPNMLEPKIFPYEMLMVTNRGRNKILREVDRTRLERHLAPEVFREIFGMSIQEFDRLPLWRRNDMKKKAKLF

SEQ ID NO: 42576 - protein, 102 aa, Homo sapiens [sequence omitted]

SEQ ID NO: 42577 - protein, 292 aa, Homo sapiens
MDNPQNLPSGSSRVGAIKLTYISKVSDATKLRPKAEFCFVMNAGMRKYFLQANDQQDLVEWVNVLNKAIKITVPKQSDSQPNSDNLSRHGECGKKQVSYRTDIVGGVPIITPTQKEEVNECGESIDRNNLKRSQSHLPYFTPKPPQDSAVIKAGYCVKQGAVMKNWKRRYFQLDENTIGYFKSELEKEPLRVIPLKEVHKVQECKQSDIMMRDNLFEIVTTSRTFYVQADSPEEMHSWIKAVSGAIVAQRGPGRSASSMRQARRLSNPCIQRYTSRAGECSTYVGSHANVPS

SEQ ID NO: 42578 - protein, 347 aa, Homo sapiens
MEVYLGEEYCGTSRGKNVCTVLDDSEHEKIILYKKNLKLESSTHACKIKLLSFGERQCVFISKVVVHMRSVFANSSTSSPALGSRIDLDKVQTIMESMGSKLSPGAQQLMDMVRCQQRNCIPIGEQLQSVLGNSGYKHMIGLQSSSTLGTLNKSSSTPFPFRTGLTSGNVTENLQTYIDKSTQLPGGENSTKLDECKVMPQNHSFLENDLKNAMASFLPKKVSDNSNIPNSELLPFLQNLCSQVNHLHVGNKTECQENITKHGERILGVGMEEQSICSYLEKILSKNMELMEKKLMDYIDQRIHELQEHIDDKIALLLDLLQNPNSPPTGIPLRHYDSGERLSNGER

SEQ ID NO: 42579 - protein, 201 aa, Homo sapiens [sequence omitted]

SEQ ID NO: 42580 - protein, 166 aa, Homo sapiens [sequence omitted]

SEQ ID NO: 42581 - protein, 399 aa, Homo sapiens [sequence omitted]

SEQ ID NO: 42582 - protein, 692 aa, Homo sapiens [sequence omitted]

SEQ ID NO: 42583 - protein, 652 aa, Homo sapiens
MATFMDPGIFPRAEEDEDKEDDFRAPLYKTVEIKGIQVRMKWCATCRFYRPPRCSHCSVCDNCVEEFDHHCPWVNNCIGRRNYRYFFLFLLSLTAHIMGVFGFGLLYVLYHIEELSGVRTAVTMAVMCVAGLFFIPVAGLTGFHVVLVARGRTTNEQVTGKFRGGVNPFTNGCCNNVSRVLCSSPAPRYLGRPKKEKTIVIRPPFLRPEVSDGQITVKIMDNGIQGELRRTKSKGSLEITESQSADAEPPPPPKPDLSRYTGLRTHLGLATNEDSSLLAKDSPPTPTMYKYRPGYSSSSTSAAMPHSSSAKLSRGDSLKEPTSIAESSRHPSYRSEPSLEPESFRSPTFGKSFHFDPLSSGSRSSSLKSAQGTGFELGQLQSIRSEGTTSTSYKSLANQTRNGSLSYDSLLTPSDSPDFESVQAGPEPDPPLGYTSPFLSARLAQQREAERHPRLVPTGPTHREPSPVRYDNLSRHIVASLQEREKLLRQSPPLPGREEEPGLGDSGIQSTPGSGHAPRTSSSSDDSKRSPLGKTPLGRPAVPRFGKPDGLRGRGVGSPEPGPTAPYLGRSMSYSSQKAQPGVSETEEVALQPLLTPKDEVQLKTTYSKSNGQPKSLGSASPGPGQPPLSSPTRGGVKKVSGVGGTTYEISV

SEQ ID NO: 42584 - protein, 664 aa, Homo sapiens [sequence omitted]

SEQ ID NO: 42585 - protein, 18 aa, Homo sapiens
MLGFIIPTSLSLLLACTS

SEQ ID NO: 42586 - protein, 621 aa, Homo sapiens
MKVLNHPNIVKLFEVIETEKTLYLVMEYASGGEVFDYLVAHGRMKEKEARAKFRQIVSAVQYCHQKFIVHRDLKAENLLLDADMNIKIADFGFSNEFTFGNKLDTFCGSPPYAAPELFQGKKYDGPEVDVWSLGVILYTLVSGSLPFDGQNLKELRERVLRGKYRIPFYMSTDCENLLKKFLILNPSKRGTLEQIMKDRWMNVGHEDDELKPYVEPLPDYKDPRRTELMVSMGYTREEIQDSLVGQRYNEVMATYLLLGYKSSELEGDTITLKPRPSADLTNSSAPSPSHKVQRSVSANPKQRRFSDQAGPAIPTSNSYSKKTQSNNAENKRPEEDRESGRKASSTAKVPASPLPGLERKKTTPTPSTNSVLSTSTNRSRNSPLLERASLGQASIQNGKDSTAPQRVPVASPSAHNISSSGGAPDRTNFPRGVSSRSTFHAGQLRQVRDQQNLPYGVTPASPSGHSQGRRGASGSIFSKFTSKFVRRNLNEPESKDRVETLRPHVVGSGGNDKEKEEFREAKPRSLRFTWSMKTTSSMEPNEMMREIRKVLDANSCQSELHEKYMLLCMHGTPGHEDFVQWEMEVCKLPRLSLNGVRFKRISGTSMAFKNIASKIANELKL

SEQ ID NO: 42587 - protein, 1451 aa, Homo sapiens
MVPENVDISVTLYRDPHVDQYEAKEWTFIIENESKGQRKVLATAEVDLARHAGPVPVQVPVRLRLKPKSVKVVQAELSLTLSGVLLREGRATDDDMQSLASLMSVKPSDVGNLDDFAESDEDEAHGPGAPEARARVPQPDPSRELKTLCEEEEEGQGRPQQAVASPSNAEDTSPAPVSAPAPPARTSRGQGSERANEAGGQVGPEAPRPPETSPEMRSSRQPAQDTAPTPAPRLRKGSDALRPPVPQGEDEVPKASGAPPAGLGSARETQAQACPQEGTEAHGARLGPSIEDKGSGDPFGRQRLKAEEMDTEDRPEASGVDTEPRSGGREANTKRSGVRAGEAEESSAVCQVDAEQRSKVRHVDTKGPEATGVMPEARCRGTPEAPPRGSQGRLGVRTRDEAPSGLSLPPAEPAGHSGQLGDLEGARAAAGQEREGAEVRGGAPGIEGTGLEQGPSVGAISTRPQVSSWQGALLSTAQGAISRGLGGWEAEAGGSGDLETETEVVGLEVLGTQEKEVEGSGFPETRTLEIEILGALEKEAARSRVLESEVAGTAQCEGLETQETEVGVIETPGTETEVLGTQKTEAGGSGVLQTRTTIAETEVLVTQEISGDLGPLKIEDTIQSEMLGTQETEVEASRVPESEAEGTEAKILGTQEITARDSGVREIEAEIAESDILVAQEIEVGLLGVLGIETGAAEGAILGTQEIASRDSGVPGLEADTTGIQVKEVGGSEVPEIATGTAETEILGTQEIASRSSGVPGLESEVAGAQETEVGGSGISGPEAGMAEARVLMTRKTEIIVPEAEKEEAQTSGVQEAETRVGSALKYEALRAPVTQPRVLGSQEAKAEISGVQGSETQVLRVQEAEAGVWGMSEGKSGAWGAQEAEMKVLESPENKSGTFKAQEAEAGVLGNEKGKEAEGSLTEASLPEAQVASGAGAGAPRASSPEKAEEDRRLPGSQAPPALVSSSQSLLEWCQEVTTGYRGVRITNFTTSWRNGLAFCAILHRFYPDKIDYASLDPLNIKQNNKQAFDGFAALGVSRLLEPADMVLLSVPDKLIVMTYLCQIRAFCTGQELQLVQLEGGGGAGTYRVGSAQPSPPDDLDAGGLAQRLRGHGAEGPQEPKEAADRADGAAPGVASRNAVAGRASKDGGAEAPRESRPAEVPAEGLVNGAGAPGGGGVRLRRPSVNGEPGSVPPPRAHGSFSHVRDADLLKKRRSRLRNSSSFSMDDPDAGAMGAAAAEGQAPDPSPAPGPPTAADSQQPPGGSSPSEEPPPSPGEEAGLQRFQDTSQYVCAELQALEQEQRQIDGRAAEVEMQLRSLMESGANKLQEEVLIQEWFTLVNKKNALIRRQDQLQLLMEEQDLERRFELLSRELRAMLAIEDWQKTSAQQHREQLLLEELVSLVNQRDELVRDLDHKERIALEEDERLERGLEQRRRKLSRQLSRRERCVLS

SEQ ID NO: 42588 - protein, 301 aa, Homo sapiens
MDHYRTFHMLERLLHAPPKLLHQLIFQIPPSRQALLIERYYAFDEAFVREVLGKKLSKGTKKDLDDISTKTGITLKSCRRQFDNFKRVFKVVEEMRGSLVDNIQQHFLLSDRLARDYAAIVFFANNRFETGKKKLQYLSFGDFAFCAELMIQNWTLGAVDSQMDDMDMDLDKEFLQDLKELKVLVADKDLLDLHKSLVCTALRGKLGVFSEMEANFKNLSRGLVNVAAKLTHNKDVRDLFVDLVEKFVEPCRSDHWPLSDVRFFLNQYSASVHSLDGFRHQALWDRYMGTLRGCLLRLYHD

SEQ ID NO: 42589 - protein, 385 aa, Homo sapiens
MKVLRKAKIVRNAKDTAHTRAERNILESVKHPFIVELAYAFQTGGKLYLILECLSGGELFTHLEREGIFLEDTACFYLAEITLALGHLHSQGIIYRDLKPENIMLSSQGHIKLTDFGLCKESIHEGAVTHTFCGTIEYMAPEILVRSGHNRAVDWWSLGALMYDMLTGSPPFTAENRKKTMDKIIRGKLALPPYLTPDARDLVKKFLKRNPSQRIGGGPGDAADVQRHPFFRHMNWDDLLAWRVDPPFRPCLQSEEDVSQFDTRFTRQTPVDSPDDTALSESANQAFLGFTYVAPSVLDSIKEGFSFQPKLRSPRRLNSSPRAPVSPLKFSPFEGFRPSPSLPEPTELPLPPLLPPPPPSTTAPLPIRPPSGTKKSKRGRGRPGR

SEQ ID NO: 42590 - protein, 161 aa, Homo sapiens
MRHNWTPDLSPLWVLLLCAHVVTLLVRATPVSQTTTAATASVRSTKDPCPSQPPVFPAAKQCPALEVTWPEVEVPLNGTLSLSCVACSRFPNFSILYWLGNGSFIEHLPGRLWEGSTSRERGSTGWAEGNLAPHPRSPALQPQQSTAAGLRLSTGPAAAQP

SEQ ID NO: 42591 - protein, 362 aa, Homo sapiens
MIRLRNPWGEREWNGPWSDTSEEWQKVSKSEREKMGVTVQDDGEFWMTFEDVCRYFTDIIKCRVINTSHLSIHKTWEEARLHGAWTLHEDPRQNRGGGCINHKDTFFQNPQYIFEVKKPEDEVLICIQQRPKRSTRREGKGENLAIGFDIYKVEENRQYRMHSLQHKAASSIYINSRSVFLRTDQPEGRYVIIPTTFEPGHTGEFLLRVFTDVPSNCRELRLDEPPHTCWSSLCGYPQLVTQVHVLGAAGLKDSPTGANSYVIIKCEGDKVRSAVQKGTSTPEYNVKGIFYRKKLSQPITVQVWNHRVLKDEFLGQVHLKADPDNLQALHTLHLRDRNSRQPSNLPGTVAVHILSSTSLMAV

SEQ ID NO: 42592 - protein, 104 aa, Homo sapiens
MFCDLDCETCTITRSGLTGLVIGGLYPVFLAIPVNGGLAARYQSALLPHKGNILSYWIRTSKPVFRKMLFPILLQTMFSAYLGSEQYKLLIKALQLSEPGKEIH

SEQ ID NO: 42593 - protein, 124 aa, Homo sapiens
MCDCTEKLQNKFDFLRSQLNDISSFKNIYRYAFDFARDKDQRSLDIDTAKSMLALLLGRTWPLFSVFYQYLEQSKYRVMNKDQWYNVLEFSRTVHADLSNYDEDGAWPVLLDEFVEWQKVRQTS

SEQ ID NO: 42594 - protein, 890 aa, Homo sapiens [sequence omitted]

SEQ ID NO: 42595 - protein, 924 aa, Homo sapiens [sequence omitted]

SEQ ID NO: 42596 - protein, 227 aa, Homo sapiens
MFLFNLIFWLCGCGLLGVGIWLSVSQGNFATFSPSFPSLSAANLVIAIGTIVMVTGFLGCLGAIKENKCLLLSFFIVLLVILLAELILLILFFVYMDKVNENAKKDLKEGLLLYHTENNVGLKNAWNIIQAEMRCCGVTDYTDWYPVLGENTVPDRCCMENSQGCGRNATTPLWRTGCYEKVKMWFDDNKHVLGTVGMCILIMQILGMAFSMTLFQHIHRTGKKYDA

SEQ ID NO: 42597 - protein, 223 aa, Homo sapiens
MYRYQRWKSKLYSIVCGKSTPEKEGELEGTTTKPLAPNPSFSPTPGFTPTLGFSPVPSSTFTSSSTYTPGDCPNFAAPRREVAPPYQGADPILATALASDPIPNPLQKWEDSAHKPQSLDTDDPATLYAVVENVPPLRWKEFVRRLGLSDHEIDRLELQNGRCLREAQYSMLATWRRRTPRREATLELLGRVLRDMDLLGCLEDIEEALCGPAALPPAPSLLR

SEQ ID NO: 42598 - protein, 348 aa, Homo sapiens [sequence omitted]

SEQ ID NO: 42599 - protein, 2697 aa, Homo sapiens [sequence omitted]

SEQ ID NO: 42600 - protein, 629 aa, Homo sapiens
MGERRRKQPEPDAASAAGECSLLAAAESSTSLQSAGAGGGGVGDLERAARRQFQQDETPAFVYVVAVFSALGGFLFGYDTGVVSGAMLLLKRQLSLDALWQELLVSSTVGAAAVSALAGGALNGVFGRRAAILLASALFTAGSAVLAAANNKETLLAGRLVVGLGIGIASMTVPVYIAEVSPPNLRGRLVTINTLFITGGQFFASVVDGAFSYLQKDGWRYMLGLAAVPAVIQFFGFLFLPESPRWLIQKGQTQKARRILSQMRGNQTIDEEYDSIKNNIEEEEKEVGSAGPVICRMLSYPPTRRALIVGCGLQMFQQLSGINTIMYYSATILQMSGVEDDRLAIWLASVTAFTNFIFTLVGVWLVEKVGRRKLTFGSLAGTTVALIILALGFVLSAQVSPRITFKPIAPSGQNATCTRYSYCNECMLDPDCGFCYKMNKSTVIDSSCVPVNKASTNEAAWGRCENETKFKTEDIFWAYNFCPTPYSWTALLGLILYLVFFAPGMGPMPWTVNSEIYPLWARSTGNACSSGINWIFNVLVSLTFLHTAEYLTYYGAFFLYAGFAAVGLLFIYGCLPETKGKKLEEIESLFDNRLCTCGTSDSDEGRYIEYIRVKGSNYHLSDNDASDVE

SEQ ID NO: 42601 - protein, 464 aa, Homo sapiens [sequence omitted]

SEQ ID NO: 42602 - protein, 299 aa, Homo sapiens
MRGCGLAPSLSKRDEGSSPSLALNTYPSYLSQLDSWGDPKAAYRLEQPVGRPLSSCSYPPSVKEENVCCMYSAEKRAKSGPEAALYSHPLPESCLGEHEVPVPSYYRASPSYSALDKTPHCSGANDFEAPFEQRASLNPRAEHLESPQLGGKVSFPETPKSDSQTPSPNEIKTEQSLAGPKGSPSESEKERAKAADSSPDTSDNEAKEEIKAENTTGNWLTAKSGRKKRCPYTKHQTLELEKEFLFNMYLTRERRLEISKTINLTDRQVKIWFQNRRMKLKKMNRENRIRELTSNFNFT

SEQ ID NO: 42603 - protein, 1866 aa, Homo sapiens [sequence omitted]

SEQ ID NO: 42604 - protein, 838 aa, Homo sapiens
MPPEKVQRLYVDFPQHLRHLLGDWLESQPWEFLVGSDAFCCNLASALLSDTVQHLQASVGEQGEGSTILQHISTLESIYQRDPLKLVATFRQILQGEKKAVMEQFRHLPMPFHWKQEELKFKTGLRRLQHRVGEIHLLREALQKGAEAGQVSLHSLIETPANGTGPSEALAMLLQETTGELEAAKALVLKRIQIWKRQQQLAGNGAPFEESLAPLQERCESLVDIYSQLQQEVGAAGGELEPKTRASLTGRLDEVLRTLVTSCFLVEKQPPQVLKTQTKFQAGVRFLLGLRFLGAPAKPPLVRADMVTEKQARELSVPQGPGAGAESTGEIINNTVPLENSIPGNCCSALFKNLLLKKIKRCERKGTESVTEEKCAVLFSASFTLGPGKLPIQLQALSLPLVVIVHGNQDNNAKATILWDNAFSEMDRVPFVVAERVPWEKMCETLNLKFMAEVGTNRGLLPEHFLFLAQKIFNDNSLSMEAFQHRSVSWSQFNKEILLGRGFTFWQWFDGVLDLTKRCLRSYWSDRLIIGFISKQYVTSLLLNEPDGTFLLRFSDSEIGGITIAHVIRGQDGSPQIENIQPFSAKDLSIRSLGDRIRDLAQLKNLYPKKPKDEAFRSHYKPEQMGKDGRGYVPATIKMTVERDQPLPTPELQMPTMVPSYDLGMAPDSSMSMQLGPDMVPQVYPPHSHSIPPYQGLSPEESVNVLSAFQEPHLQMPPSLGQMSLPFDQPHPQGLLPCQPQEHAVSSPDPLLCSDVTMVEDSCLSQPVTAFPQGTWIGEDIFPPLLPPTEQDLTKLLLEGQGESGGGSLGAQPLLQPSHYGQSGISMSHMDLRANPSW

SEQ ID NO: 42605 - protein, 470 aa, Homo sapiens
MHSFLHQYTGSFKKPPLRRPHSVIGGSLGSFMAMPRNGSRLDIVHENLKMGSDGESDQASGTSSDEVQSPTGVCLRNRIHRRISMEDLNKRLSLPADIRIPDGYLEKLQINSPPFDQPMSRRSRRASLSEIGFGKMETYIKLEKLGEGTYATVYKGRSKLTENLVALKEIRLEHEEGAPCTAIREVSLLKDLKHANIVTLHDIVHTDKSLTLVFEYLDKDLKQYMDDCGNIMSMHNVKLFLYQILRGLAYCHRRKVLHRDLKPQNLLINEKGELKLADFGLARAKSVPTKTYSNEVVTLWYRPPDVLLGSSEYSTQIDMWGVGCIFFEMASGRPLFPGSTVEDELHLIFRLLGTPSQETWPGISSNEEFKNYNFPKYKPQPLINHAPRLDSEGIELITKFLQYESKKRVSAEEAMKHVYFRSLGPRIHALPESVSIFSLKEIQLQKDPGFRNSSYPETGHGKNRRQSMLF

SEQ ID NO: 42606 - protein, 65 aa, Homo sapiens
MSTYLKMFAASLLAMCAGAEVVHRYYRPDLTIPEIPPKRGELKTELLGLKERKHKPQVSQQEELK

SEQ ID NO: 42607 - protein, 53 aa, Homo sapiens
MSTYLKMFAASLLAMCAGAEVVHRYYRPDLQNWITSLSVGELEGLGRVEQRRP

SEQ ID NO: 42608 - protein, 47 aa, Homo sapiens
MSTYLKMFAASLLAMCAGAEVVHRYYRPDLMRNRLRRVKLISQSHIA

SEQ ID NO: 42609 - protein, 508 aa, Homo sapiens
MTAADRAIQRFLRTGAAVRYKVMKNWGVIGGIAAALAAGIYVIWGPITERKKRRKGLVPGLVNLGNTCFMNSLLQGLSACPAFIRWLEEFTSQYSRDQKEPPSHQYLSLTLLHLLKALSCQEVTDDEVLDASCLLDVLRMYRWQISSFEEQDAHELFHVITSSLEDERDRQPRVTHLFDVHSLEQQSEITPKQITCRTRGSPHPTSNHWKSQHPFHGRLTSNMVCKHCEHQSPVRFDTFDSLSLSIPAATWGHPLTLDHCLHHFISSESVRDVVCDNCTKIEAKGTLNGEKVEHQRTTFVKQLKLGKLPQCLCIHLQRLSWSSHGTPLKRHEHVQFNEFLMMDIYKYHLLGHKPSQHNPKLNKNPGPTLELQDGPGAPTPVLNQPGAPKTQIFMNGACSPSLLPTLSAPMPFPLPVVPDYSSSTYLFRLMAVVVHHGDMHSGHFVTYRRSPPSARNPLSTSNQWLWVSDDTVRKASLQEVLSSSAYLLFYERVLSRMQHQSQECKSEE

SEQ ID NO: 42610 - protein, 487 aa, Homo sapiens
MALEGVPELLQKILEAPDFYVQMKWEFTSWVPLVSRICPNDVCRIWKSGAKLRVDITLLGFENMSWIRGRRSFIFKGEDNWAELMEVNHDDKVVTTERFDLSQEMERLTLDLMKPKSREVERRLTSPVINTSLDTKNIAFERTKSGFWGWRTDKAEVVNGYEAKVYTVNNVNVITKIRTEHLTEEEKKRYKADRNPLESLLGTVEHQFGAQGDLTTECATANNPTAITPDEYFNEEFDLKDRDIGRPKELTIRTQKFKAMLWMCEEFPLSLVEQVIPIIDLMARTSAHFARLRDFIKLEFPPGFPVKIEIPLFHVLNARITFGNVNGCSTAEESVSQNVEGTQADSASHITNFEVDQSVFEIPESYYVQDNGRNVHLQDEDYEIMQFAIQQSLLESSRSQELSGPASNGGISQTNTYDAQYERAIQESLLTSTEGLCPSALSETSRFDNDLQLAMELSAKELEEWELRLQEEEAELQQVLQLSLTDK

SEQ ID NO: 42611 - protein, 490 aa, Homo sapiens [sequence omitted]

SEQ ID NO: 42612 - protein, 316 aa, Homo sapiens
MLENYKNLVSLGYQLTKPDVILRLEKGEEPWLVEREIHQETHPDSETAFEIKSSVSSRSIFKDKQSCDIKMEGMARNDLWYLSLEEVWKCRDQLDKYQENPERHLSIPRVLSLPARHTKLTVGMATRVRTASIWVPPLQERNSSWDRIRKLQGQESILGQGTPGLQPLPGTPRQKQKSRRIEKVLEWLFISQEQPKITKSWGPLSFMDVFVDFTWEEWQLLDPAQKCLYRSVMLENYSNLVSLGYQHTKPDIIFKLEQGEELCMVQAQVPNQTCPILKAGKSKAKVLAGLVSGEGLLCASKMTPCCCILWRHSLEN

SEQ ID NO: 42613 - protein, 179 aa, Homo sapiens
MHRANVIRLMDERDLRLVQRNTSTEPAEYQLMTGLQILQERQRLREMEKANPKTGPTLRKELILSSNIGQHDLDTKTKQIQQWIKKKHLVQITIKKGKNVDVSENEMEEIFHQILQTMPGIATFSSRPQAVQGGKALMCVLRAFSKNEEKAYKETQETQERDTLNKDHGNDKESNVLHQ

SEQ ID NO: 42614 - protein, 3295 aa, Homo sapiens
MDQADDVSCPLLNSCLSESPVVLQCTHVTPQRDKSVVCGSLFHTPKFVKGRQTPKHISESLGAEVDPDMSWSSSLATPPTLSSTVLIVRNEEASETVFPHDTTANVKSYFSNHDESLKKNDRFIASVTDSENTNQREAASHGFGKTSGNSFKVNSCKDHIGKSMPNVLEDEVYETVVDTSEEDSFSLCFSKCRTKNLQKVRTSKTRKKIFHEANADECEKSKNQVKEKYSFVSEVEPNDTDPLDSNVANQKPFESGSDKISKEVVPSLACEWSQLTLSGLNGAQMEKIPLLHISSCDQNISEKDLLDTENKRKKDFLTSENSLPRISSLPKSEKPLNEETVVNKRDEEQHLESHTDCILAVKQAISGTSPVASSFQGIKKSIFRIRESPKETFNASFSGHMTDPNFKKETEASESGLEIHTVCSQKEDSLCPNLIDNGSWPATTTQNSVALKNAGLISTLKKKTNKFIYAIHDETSYKGKKIPKDQKSELINCSAQFEANAFEAPLTFANADSGLLHSSVKRSCSQNDSEEPTLSLTSSFGTILRKCSRNETCSNNTVISQDLDYKEAKCNKEKLQLFITPEADSLSCLQEGQCENDPKSKKVSDIKEEVLAAACHPVQHSKVEYSDTDFQSQKSLLYDHENASTLILTPTSKDVLSNLVMISRGKESYKMSDKLKGNNYESDVELTKNIPMEKNQDVCALNENYKNVELLPPEKYMRVASPSRKVQFNQNTNLRVIQKNQEETTSISKITVNPDSEELFSDNENNFVFQVANERNNLALGNTKELHETDLTCVNEPIFKNSTMVLYGDTGDKQATQVSIKKDLVYVLAEENKNSVKQHIKMTLGQDLKSDISLNIDKIPEKNNDYMNKWAGLLGPISNHSFGGSFRTASNKEIKLSEHNIKKSKMFFKDIEEQYPTSLACVEIVNTLALDNQKKLSKPQSINTVSAHLQSSVVVSDCKNSHITPQMLFSKQDFNSNHNLTPSQKAEITELSTILEESGSQFEFTQFRKPSYILQKSTFEVPENQMTILKTTSEECRDADLHVIMNAPSIGQVDSSKQFEGTVEIKRKFAGLLKNDCNKSASGYLTDENEVGFRGFYSAHGTKLNVSTEALQKAVKLFSDIENISEETSAEVHPISLSSSKCHDSVVSMFKIENHNDKTVSEKNNKCQLILQNNIEMTTGTFVEEITENYKRNTENEDNKYTAASRNSHNLEFDGSDSSKNDTVCIHKDETDLLFTDQHNICLKLSGQFMKEGNTQIKEDLSDLTFLEVAKAQEACHGNTSNKEQLTATKTEQNIKDFETSDTFFQTASGKNISVAKESFNKIVNFFDQKPEELHNFSLNSELHSDIRKNKMDILSYEETDIVKHKILKESVPVGTGNQLVTFQGQPERDEKIKEPTLLGFHTASGKKVKIAKESLDKVKNLFDEKEQGTSEITSFSHQWAKTLKYREACKDLELACETIEITAAPKCKEMQNSLNNDKNLVSIETVVPPKLLSDNLCRQTENLKTSKSIFLKVKVHENVEKETAKSPATCYTNQSPYSVIENSALAFYTSCSRKTSVSQTSLLEAKKWLREGIFDGQPERINTADYVGNYLYENNSNSTIAENDKNHLSEKQDTYLSNSSMSNSYSYHSDEVYNDSGYLSKNKLDSGIEPVLKNVEDQKNTSFSKVISNVKDANAYPQTVNEDICVEELVTSSSPCKNKNAAIKLSISNSNNFEVGPPAFRIASGKIVCVSHETIKKVKDIFTDSFSKVIKENNENKSKICQTKIMAGCYEALDDSEDILHNSLDNDECSTHSHKVFADIQSEEILQHNQNMSGLEKVSKISPCDVSLETSDICKCSIGKLHKSVSSANTCGIFSTASGKSVQVSDASLQNARQVFSEIEDSTKQVFSKVLFKSNEHSDQLTREENTAIRTPEHLISQKGFSYNVVNSSAFSGFSTASGKQVSILESSLHKVKGVLEEFDLIRTEHSLHYSPTSRQNVSKILPRVDKRNPEHCVNSEMEKTCSKEFKLSNNLNVEGGSSENNHSIKVSPYLSQFQQDKQQLVLGTKVSLVENIHVLGKEQASPKNVKMEIGKTETFSDVPVKTNIEVCSTYSKDSENYFETEAVEIAKAFMEDDELTDSKLPSHATHSLFTCPENEEMVLSNSRIGKRRGEPLILVGEPSIKRNLLNEFDRIIENQEKSLKASKSTPDGTIKDRRLFMHHVSLEPITCVPFRTTKERQEIQNPNFTAPGQEFLSKSHLYEHLTLEKSSSNLAVSGHPFYQVSATRNEKMRHLITTGRPTKVFVPPFKTKSHFHRVEQCVRNINLEENRQKQNIDGHGSDDSKNKINDNEIHQFNKNNSNQAVAVTFTKCEEEPLDLITSLQNARDIQDMRIKKKQRQRVFPQPGSLYLAKTSTLPRISLKAAVGGQVPSACSHKQLYTYGVSKHCIKINSKNAESFQFHTEDYFGKESLWTGKGIQLADGGWLIPSNDGKAGKEEFYRALCDTPGVDPKLISRIWVYNHYRWIIWKLAAMECAFPKEFANRCLSPERVLLQLKYRYDTEIDRSRRSAIKKIMERDDTAAKTLVLCVSDIISLSANISETSSNKTSSADTQKVAIIELTDGWYAVKAQLDPPLLAVLKNGRLTVGQKIILHGAELVGSPDACTPLEAPESLMLKISANSTRPARWYTKLGFFPDPRPFPLPLSSLFSDGGNVGCVDVIIQRAYPIQWMEKTSSGLYIFRNEREEEKEAAKYVEAQQKRLEALFTKIQEEFEEHEENTTKPYLPSRALTRQQVRALQDGAELYEAVKNAADPAYLEGYFSEEQLRALNNHRQMLNDKKQAQIQLEIRKAMESAEQKEQGLSRDVTTVWKLRIVSYSKKEKDSVILSIWRPSSDLYSLLTEGKRYRIYHLATSKSKSKSERANIQLAATKKTQYQQLPVSDEILFQIYQPREPLHFSKFLDPDFQPSCSEVDLIGFVVSVVKKTGLAPFVYLSDECYNLLAIKFWIDLNEDIIKPHMLIAASNLQWRPESKSGLLTLFAGDFSVFSASPKEGHFQETFNKMKNTVENIDILCNEAENKLMHILHANDPKWSTPTKDCTSGPYTAQIIPGTGNKLLMSSPNCEIYYQSPLSLCMAKRKSVSTPVSAQMTSKSCKGEKEIDDQKNCKKRRALDFLSRLPLPPPVSPICTFVSPAAQKAFQPPRSCGTKYETPIKKKELNSPQMTPFKKFNEISLLESNSIADEELALINTQALLSGSTGEKQFISVSESTRTAPTSSEDYLRLKRRCTTSLIKEQESSQASTEECEKNKQDTITTKKYI

SEQ ID NO: 42615 - protein, 498 aa, Homo sapiens
MPGNRPDVIESIDSQVLQEARPPLVSADDEIYSTSKAFIGPIYKPPEKKKRNEGRNEAHVLNGINDRGGQKEKQKFNSEKSEIDNELFQFYKEIEELEKEKDGFENSCKESEPSQEQFVPFYEGHNNGLLKPDEEKKDLSNKAMPSHCDYQQNLGNEPDKYPCNGQVIPTFCDTSFTSFRPEWQSVYPFIVPYGPPLPSLNYHLNIQRFSGPPNPPSNIFQAQDDSQIQNGYYVNNCHVNWNCMTFDQNNEYTDCSENRSSVHPSGNGCSMQDRYVSNGFCEVRERCWKDHCMDKHNGTDRFVNQQFQEEKLNKLQKLLILLRGLPGSGKTTLSRILLGQNRDGIVFSTDDYFHHQDGYRYNVNQLGDAHDWNQNRAKQAIDQGRSPVIIDNTNIQAWEMKPYVEVAIGKGYRVEFHEPETWWKFDPEELEKRNKHGVSRKKIAQMLDRYEYQMSISIVMNSVEPSHKSTQRPPPPQGRQRWGGSLGSHNRVCVTNNH

SEQ ID NO: 42616 - protein, 17 aa, Homo sapiens
MLIFTESKRKLEMIGSL

SEQ ID NO: 42617 - protein, 583 aa, Homo sapiens
MELCHFVSLEILNLYHNCIRVIPEAIVNLQMLTYLNLSRNQLSALPACLCGLPLKVLIASNNKLGSLPEEIGQLKQLMELDVSCNEITALPQQIGQLKSLRELNVRRNYLKVLPQELVDLSLVKFDFSCNKVLVIPICFREMKQLQVLLLENNPLQSPPAQICTKGKVHIFKYLSIQACQIKTADSLYLHTMERPHLHQHVEDGKKDSDSGVGSDNGDKRLSATEPSDEDTVSLNVPMSNIMEEEQIIKEDSCHRLSPVKGEFHQEFQPEPSLLGDSTNSGEERDQFTDRADGLHSEFMNYKARAEDCEELLRIEEDVHWQTEGIISSSKDQDMDIAMIEQLREAVDLLQDPNGLSTDITERSVLNLYPMGSAEALELQDSALNGQIQLETSPVCEVQSDLTLQSNGSQYSPNEIRENSPAVSPTTNSTAPFGLKPRSVFLRPQRNLESIDPQFTIRRKMEQMREEKELVEQLRESIEMRLKVSLHEDLGAALMDGVVLCHLVNHIRPRSVASIHVPSPAVPKLSMAKCRRNVENFLEACRKLGVPEEKLCLPHHILEEKGLVKVGITIQALLDITVTKALFT

SEQ ID NO: 42618 - protein, 816 aa, Homo sapiens
MSFTFTELQKNIEISVHKFFNLLKEIDTSTKVDNAMSRLLKKYDVLFALFSKLERTCELIYLTQPSSSISTEINSALVLKVSWITFLLAKGEVLQMEDDLVISFQLMLCVLDYFIKLSPPMLLKEPYKTAVIPINGSPRTPRRGQNRSARIAKQLENDTRIIEVLCKEHECNIDEVKNVYFKNFIPFMNSLGLVTSNGLPEVENLSKRYEEIYLKNKDLDARLFLDHDKTLQTDSIDSFETQRTPRKSNLDEEVNVIPPHTPVRTVMNTIQQLMMILNSASDQPSENLISYFNNCTVNPKESILKRVKDIGYIFKEKFAKAVGQGCVEIGSQRYKLGVRLYYRVMESMLKSEEERLSIQNFSKLLNDNIFHMSLLACALEVVMATYSRSTSQNLDSGTDLSFPWILNVLNLKAFDFYKVIESFIKAEGNLTREMIKHLERCEHRIMESLAWLSDSPLFDLIKQSKDREGPTDHLESACPLNLPLQNNHTAADMYLSPVRSPKKKGSTTRVNSTANAETQATSAFQTQKPLKSTSLSLFYKKVYRLAYLRLNTLCERLLSEHPELEHIIWTLFQHTLQNEYELMRDRHLDQIMMCSMYGICKVKNIDLKFKIIVTAYKDLPHAVQETFKRVLIKEEEYDSIIVFYNSVFMQRLKTNILQYASTRPPTLSPIPHIPRSPYKFPSSPLRIPGGNIYISPLKSPYKISEGLPTPTKMTPRSRILVSIGESFGTSEKFQKINQMVCNSDRVLKRSAEGSNPPKPLKKLRFDIEGSDEADGSKHLPGESKFQQKLAEMTSTRTRMQKQKMNDSMDTSNKEEK

SEQ ID NO: 42619 - protein, 430 aa, Homo sapiens [sequence omitted]

SEQ ID NO: 42620 - protein, 225 aa, Homo sapiens
MTFTQSRTTSSLAPVFALFVPFYCSIPRVQVAQILGPLSITNKTLIYILGLQLFTSGSYIWIVAISGLMSGLCYDSKMFQVHQVLCIPSWMAKFFSWTLEPIFSSSEPTSEARIGMGATLDIQRQQRMELLDRQLMFSQFAQGRRQRQQQGGMINWNRLFPPLRQRQNVNYQGGRQSEPAAPPLEVSEEQVARLMEMGFSRGDALEALRASNNDLNVATNFLLQH

SEQ ID NO: 42621 - protein, 2232 aa, Homo sapiens
MALSPPSPPTATWDPSPTQAKESPVAAGEAGPDWFPEGQEEDGGLCPPLNQSSPTSKEGGTLPAPVGSPEDPSDPPQPYRLADDYTPAPAAFQGLSLSSHMSLLHSRNSCKTLKCPKCNWHYKYQQTLDVHMREKHPESNSHCSYCSAGGAHPRLARGESYNCGYKPYRCDVCNYSTTTKGNLSIHMQSDKHLANLQGFQAGPGGQGSPPEASLPPSAGDKEPKTKSSWQCKVCSYETNISRNLRIHMTSEKHMQNVLMLHQGLPLGLPPGLMGPGPPPPPGATPTSPPELFQYFGPQALGQPQTPLAGPGLRPDKPLEAQLLLNGFHHVGAPARKFPTSAPGSLSPDAHLPPSQLLGSSSDSLPTSPPPDDSLSLKVFRCLVCQAFSTDSLELLLYHCSIGRSLPEAEWKEVAGDTHRCKLCCYGTQLKANFQLHLKTDKHAQKYQLAAHLREGGGAMGTPSPASLGDGAPYGSVSPLHLRCNICDFESNSKEKMQLHARGAAHEENSQIYKFLLDMEGAEAGAELGLYHCLLCAWETPSRLAVLQHLRTPAHRDAQAQRRLQLLQNGPTTEEGLAALQSILSFSHGQLRTPGKAPVTPLAEPPTPEKDAQNKTEQLASEETENKTGPSRDSANQTTVYCCPYCSFLSPESSQVRAHTLSQHAVQPKYRCPLCQEQLVGRPALHFHLSHLHNVVPECVEKLLLVATTVEMTFTTKVLSAPTLSPLDNGQEPPTHGPEPTPSRDQAAEGPNLTPEASPDPLPEPPLASVEVPDKPSGSPGQPPSPAPSPVPEPDAQAEDVAPPPTMAEEEEGTTGELRSAEPAPADSRHPLTYRKTTNFALDKFLDPARPYKCTVCKESFTQKNILLVHYNSVSHLHKMKKAAIDPSAPARGEAGAPPTTTAATDKPFKCTVCRVSYNQSSTLEIHMRSVLHQTRSRGTKTDSKIEGPERSQEEPKEGETEGEVGTEKKGPDTSGFISGLPFLSPPPPPLDLHRFPAPLFTPPVLPPFPLVPESLLKLQQQQLLLPFYLHDLKVGPKLTLAGPAPVLSLPAATPPPPPQPPKAELAEREWERPPMAKEGNEAGPSSPPDPLPNEAARTAAKALLENFGFELVIQYNEGKQAVPPPPTPPPPEALGGGDKLACGACGKLFSNMLILKTHEEHVHRRFLPFEALSRYAAQFRKSYDSLYPPLAEPPKPPDGSLDSPVPHLGPPFLVPEPEAGGTRAPEERSRAGGHWPIEEEESSRGNLPPLVPAGRRFSRTKFTEFQTQALQSFFETSAYPKDGEVERLASLLGLASRVVVVWFQNARQKARKNACEGGSMPTGGGTGGASGCRRCHATFSCVFELVRHLKKCYDDQTLEEEEEEAERGEEEEEVEEEEVEEEQGLEPPAGPEGPLPEPPDGEELSQAEATKAGGKEPEEKATPSPSPAHTCDQCAISFSSQDLLTSHRRLHFLPSLQPSAPPQLLDLPLLVFGERNPLVAATSPMPGPPLKRKHEDGSLSPTGSEAGGGGEGEPPRDKRLRTTILPEQLEILYRWYMQDSNPTRKMLDCISEEVGLKKRVVQVWFQNTRARERKGQFRSTPGGVPSPAVKPPATATPASLPKFNLLLGKVDDGTGREAPKREAPAFPYPTATLASGPQPFLPPGKEATTPTPEPPLPLLPPPPPSEEEGPEEPPKASPESEACSLSAGDLSDSSASSLAEPESPGAGGTSGGPGGGTGVPDGMGQRRYRTQMSSLQLKIMKACYEAYRTPTMQECEVLGEEIGLPKRVIQVWFQNARAKEKKAKLQGTAAGSTGGSSEGLLAAQRTDCPYCDVKYDFYVSCRGHLFSRQHLAKLKEAVRAQLKSESKCYDLAPAPEAPPALKAPPATTPASMPLGAAPTLPRLAPVLLSGPALAQPPLGNLAPFNSGPAASSGLLGLATSVLPTTTVVQTAGPGRPLPQRPMPDQTNTSTAGTTDPVPGPPTEPLGDKVSSERKPVAGPTSSSNDALKNLKALKTTVPALLGGQFLPFPLPPAGGTAPPAVFGPQLQGAYFQQLYGMKKGLFPMNPMIPQTLIGLLPNALLQPPPQPPEPTATAPPKPPELPAPGEGEAGEVDELLTGSTGISTVDVTHRYLCRQCKMAFDGEAPATAHQRSFCFFGRGSGGSMPPPLRVPICTYHCLACEVLLSGREALASHLRSSAHRRKAAPPQGGPPISITNAATAASAAVAFAKEEARLPHTDSNPKTTTTSTLLAL

SEQ ID NO: 42622 - protein, 32 aa, Homo sapiens
MIGLEFFKRPPRTSLPPGEPQFGFEAIAPQRR

SEQ ID NO: 42623 - protein, 287 aa, Homo sapiens
MKNLKLKGYIIQKREIKPSLEADKPVEDILTYEEFHPFLFSQHSQCPYIEFESFDKAVDEFYSKIEGQKIDLKALQQEKQALKKLDNVRKDHENRLEALQQAQEIDKLKGELIEMNLQIVDRAIQVVRSALANQIDWTEIGLIVKEAQAQGDPVASAIKELKLQTNHVTMLLRNPYLLSEEEDDDVDGDVNVEKNETEPPKGKKKKQKNKQLQKPQKNKPLLVDVDLSLSAYANAKKYYDHKRYAAKKTQKTVEAAEKAFKSAEKKTKQTLKEVQTVTSIQKARKVY

SEQ ID NO: 42624 - protein, 2095 aa, Homo sapiens
MLSLEEVAPVLQQTLLQDNLLGRVHFDQFKEALILILSRTLSNEEHFQEPDCSLEAQPKYVRGGKRYGRRSLPEFQESVEEFPEVTVIEPLDEEARPSHIPAGDCSEHWKTQRSEEYEAEGQLRFWNPDDLNASQSGSSPPQDWIEEKLQEVCEDLGITRDGHLNRKKLVSICEQYGLQNVDGEMLEEVFHNLDPDGTMSVEDFFYGLFKNGKSLTPSASTPYRQLKRHLSMQSFDESGRRTTTSSAMTSTIGFRVFSCLDDGMGHASVERILDTWQEEGIENSQEILKALDFSLDGNINLTELTLALENELLVTKNSIHQAALASFKAEIRHLLERVDQVVREKEKLRSDLDKAEKLKSLMASEVDDHHAAIERRNEYNLRKLDEEYKERIAALKNELRKEREQILQQAGKQRLELEQEIEKAKTEENYIRDRLALSLKENSRLENELLENAEKLAEYENLTNKLQRNLENVLAEKFGDLDPSSAEFFLQEERLTQMRNEYERQCRVLQDQVDELQSELEEYRAQGRVLRLPLKNSPSEEVEANSGGIEPEHGLGSEECNPLNMSIEAELVIEQMKEQHHRDICCLRLELEDKVRHYEKQLDETVVSCKKAQENMKQRHENETHTLEKQISDLKNEIAELQGQAAVLKEAHHEATCRHEEEKKQLQVKLEEEKTHLQEKLRLQHEMELKARLTQAQASFEREREGLQSSAWTEEKVRGLTQELEQFHQEQLTSLVEKHTLEKEELRKELLEKHQRELQEGREKMETECNRRTSQIEAQFQSDCQKVTERCESALQSLEGRYRQELKDLQEQQREEKSQWEFEKDELTQECAEAQELLKETLKREKTTSLVLTQEREMLEKTYKEHLNSMVVERQQLLQDLEDLRNVSETQQSLLSDQILELKSSHKRELREREEVLCQAGASEQLASQRLERLEMEHDQERQEMMSKLLAMENIHKATCETADRERAEMSTEISRLQSKIKEMQQATSPLSMLQSGCQVIGEEEVEGDGALSLLQQGEQLLEENGDVLLSLQRAHEQAVKENVKMATEISRLQQRLQKLEPGLVMSSCLDEPATEFFGNTAEQTEQFLQQNRTKQVEGVTRRHVLSDLEDDEVRDLGSTGTSSVQRQEVKIEESEASVEGFSELENSEETRTESWELKNQISQLQEQLMMLCADCDRASEKKQDLLFDVSVLKKKLKMLERIPEASPKYKLLYEDVSRENDCLQEELRMMETRYDEALENNKELTAEVFRLQDELKKMEEVTETFLSLEKSYDEVKIENEGLNVLVLRLQGKIEKLQESVVQRCDCCLWEASLENLEIEPDGNILQLNQTLEECVPRVRSVHHVIEECKQENQYLEGNTQLLEKVKAHEIAWLHGTIQTHQERPRVQNQVILEENTTLLGFQDKHFQHQATIAELELEKTKLQELTRKLKERVTILVKQKDVLSHGEKEEELKAMMHDLQITCSEMQQKVELLRYESEKLQQENSILRNEITTLNEEDSISNLKLGTLNGSQEEMWQKTETVKQENAAVQKMVENLKKQISELKIKNQQLDLENTELSQKNSQNQEKLQELNQRLTEMLCQKEKEPGNSALEEREQEKFNLKEELERCKVQSSTLVSSLEAELSEVKIQTHIVQQENHLLKDELEKMKQLHRCPDLSDFQQKISSVLSYNEKLLKEKEALSEELNSCVDKLAKSSLLEHRIATMKQEQKSWEHQSASLKSQLVASQEKVQNLEDTVQNVNLQMSRMKSDLRVTQQEKEALKQEVMSLHKQLQNAGGKSWAPEIATHPSGLHNQQKRLSWDKLDHLMNEEQQLLWQENERLQTMVQNTKAELTHSREKVRQLESNLLPKHQKHLNPSGTMNPTEQEKLSLKRECDQFQKEQSPANRKVSQMNSLEQELETIHLENEGLKKKQVKLDEQLMEMQHLRSTATPSPSPHAWDLQLLQQQACPMVPREQFLQLQRQLLQAERINQHLQEELENRTSETNTPQGNQEQLVTVMEERMIEVEQKLKLVKRLLQEKVNQLKEQLCKNTKADAMVKDLYVENAQLLKALEVTEQRQKTAEKKNYLLEEKIASLSNIVRNLTPAPLTSTPPLRS

SEQ ID NO: 42625 - protein, 2052 aa, Homo sapiens
MLSLEEVAPVLQQTLLQDNLLGRVHFDQFKEALILILSRTLSNEEHFQEPDCSLEAQPKYVRGGKRYGRRSLPEFQESVEEFPEVTVIEPLDEEARPSHIPAGDCSEHWKTQRSEEYEAEGQLRFWNPDDLNASQSGSSPPQDWIEEKLQEVCEDLGITRDGHLNRKKLVSICEQYGLQNVDGEMLEEVFHNLDPDGTMSVEDFFYGLFKNGKSLTPSASTPYRQLKRHLSMQSFDESGRRTTTSSAMTSTIGFRVFSCLDDGMGHASVERILDTWQEEGIENSQEILKALDFSLDGNINLTELTLALENELLVTKNSIHQAALASFKAEIRHLLERVDQVVREKEKLRSDLDKAEKLKSLMASEVDDHHAAIERRNEYNLRKLDEEYKERIAALKNELRKEREQILQQAGKQRLELEQEIEKAKTEENYIRDRLALSLKENSRLENELLENAEKLAEYENLTNKLQRNLENVLAEKFGDLDPSSAEFFLQEERLTQMRNEYERQCRVLQDQVDELQSELEEYRAQGRVLRLPLKNSPSEEVEANSGGIEPEHGLGSEECNPLNMSIEAELVIEQMKEQHHRDICCLRLELEDKVRHYEKQLDETVVSCKKAQENMKQRHENETHTLEKQISDLKNEIAELQGQAAVLKEAHHEATCRHEEEKKQLQVKLEEEKTHLQEKLRLQHEMELKARLTQAQASFEREREGLQSSAWTEEKVRGLTQELEQFHQEQLTSLVEKHTLEKEELRKELLEKHQRELQEGREKMETECNRRTSQIEAQFQSDCQKVTERCESALQSLEGRYRQELKDLQEQQREEKSQWEFEKDELTQECAEAQELLKETLKREKTTSLVLTQEREMLEKTYKEHLNSMVVERQQLLQDLEDLRNVSETQQSLLSDQILELKSSHKRELREREEVLCQAGASEQLASQRLERLEMEHDQERQEMMSKLLAMENIHKATCETADRERAEMSTEISRLQSKIKEMQQATSPLSMLQSGCQVIGEEEVEGDGALSLLQQGEQLLEENGDVLLSLQRAHEQAVKENVKMATEISRLQQRLQKLEPGLVMSSCLDEPATEFFGNTAEQTEQFLQQNRTKQVEGVTRRHVLSDLEDDEVRDLGSTGTSSVQRQEVKIEESEASVEGFSELENSEETRTESWELKNQISQLQEQLMMLCADCDRASEKKQDLLFDVSVLKKKLKMLERIPEASPKYKLLYEDVSRENDCLQEELRMMETRYDEALENNKELTAEVFRLQDELKKMEEVTETFLSLEKSYDEVKIENEGLNVLVLRLQGKIEKLQESVVQRCDCCLWEASLENLEIEPDGNILQLNQTLEECVPRVRSVHHVIEECKQENQYLEGNTQLLEKVKAHEIAWLHGTIQTHQERPRVQNQVILEENTTLLGFQDKHFQHQATIAELELEKTKLQELTRKLKERVTILVKQKDVLSHGEKEEELKAMMHDLQITCSEMQQKVELLRYESEKLQQENSILRNEITTLNEEDSISNLKLGTLNGSQEEMWQKTETVKQENAAVQKMVENLKKQISELKIKNQQLDLENTELSQKNSQNQEKLQELNQRLTEMLCQKEKEPGNSALEEREQEKFNLKEELERCKVQSSTLVSSLEAELSEVKIQTHIVQQENHLLKDELEKMKQLHRCPDLSDFQQKISSVLSYNEKLLKEKEALSEELNSCVDKLAKSSLLEHRIATMKQEQKSWEHQSASLKSQLVASQEKVQNLEDTVQNVNLQMSRMKSDLRVTQQEKEALKQEVMSLHKQLQNAGGKSWAPEIATHPSGLHNQQKRLSWDKLDHLMNEEQQLLWQENERLQTMVQNTKAELTHSREKVRQLESNLLPKHQKHLNPSGTMNPTEQEKLSLKRECDQFQKEQSPANRKVSQMNSLEQELETIHLENEGLKKKQVKLDEQLMEMQHLRSTATPSPSPHAWDLQLLQQQACPMVPREQFLQLQRQLLQAERINQHLQEELENRTSETNTPQGNQEQLVTVMEERMIEVEQKLKLVKRLLQEKVNQLKEQVSLPGHLCSPTSHSSFNSSFTSLYCH

SEQ ID NO: 42626 - protein, 248 aa, Homo sapiens
MAMLPLVLHWFFIEWYSGKKSSSALFQHITALFECSMAAIITLLVSDPVGVLYIRSCRVLMLSDWYTMLYNPSPDYVTTVHCTHEAVYPLYTIVFIYYAFCLVLMMLLRPLLVKKIACGLGKSDRFKSIYAALYFFPILTVLQAVGGGLLYYAFPYIILVLSLVTLAVYMSASEIENCYDLLVRKKRLIVLFSHWLLHAYGIISISRVDKLEQDLPLLALVPTPALFYLFTAKFTEPSRILSEGANGH

SEQ ID NO: 42627 - protein, 87 aa, Homo sapiens
MRRKNHTHQQDIDDLKRQNALLEQQVRALEKARSSAQLQTNYPSSDNSLYTNAKGSTISAFDGGSDSSSESEPEEPQSRKKLRMEAS

SEQ ID NO: 42628 - protein, 932 aa, Homo sapiens [sequence omitted]

SEQ ID NO: 42629 - protein, 35 aa, Homo sapiens
MAAVVSATPGQGPVECSTMGSTGYRAETALCQLCC

SEQ ID NO: 42630 - protein, 1356 aa, Homo sapiens
MLYLYCRHLNQMRKYNFEGKTESITVVKLLSCFDDLVAAGTASGRVAVFQLVSSLPGRNKQLRRFDVTGIHKNSITALAWSPNGMKLFSGDDKGKIVYSSLDLDQGLCNSQLVLEEPSSIVQLDYSQKVLLVSTLQRSLLFYTEEKSVRQIGTQPRKSTGKFGACFIPGLCKQSDLTLYASRPGLRLWKADVHGTVQATFILKDAFAGGVKPFELHPRLESPNSGSCSLPERHLGLVSCFFQEGWVLSWNEYSIYLLDTVNQATVAGLEGSGDIVSVSCTENEIFFLKGDRNIIRISSRPEGLTSTVRDGLEMSGCSERVHVQQAEKLPGATVSETRLRGSSMASSVASEPRSRSSSLNSTDSGSGLLPPGLQATPELGKGSQPLSQRFNAISSEDFDQELVVKPIKVKRKKKKKKTEGGSRSTCHSSLESTPCSEFPGDSPQSLNTDLLSMTSSVLGSSVDQLSAESPDQESSFNGEVNGVPQENTDPETFNVLEVSGSMPDSLAEEDDIRTEMPHCHHAHGRELLNGAREDVGGSDVTGLGDEPCPADDGPNSTQLPFQEQDSSPGAHDGEDIQPIGPQSTFCEVPLLNSLTVPSSLSWAPSAEQWLPGTRADEGSPVEPSQEQDILTSMEASGHLSTNLWHAVTDDDTGQKEIPISERVLGSVGGQLTPVSALAASTHKPWLEQPPRDQTLTSSDEEDIYAHGLPSSSSETSVTELGPSCSQQDLSRLGAEDAGLLKPDQFAESWMGYSGPGYGILSLVVSEKYIWCLDYKGGLFCSALPGAGLRWQKFEDAVQQVAVSPSGALLWKIEQKSNRAFACGKVTIKGKRHWYEALPQAVFVALSDDTAWIIRTSGDLYLQTGLSVDRPCARAVKVDCPYPLSQITARNNVVWALTEQRALLYREGVSSFCPEGEQWKCDIVSERQALEPVCITLGDQQTLWALDIHGNLWFRTGIISKKPQGDDDHWWQVSITDYVVFDQCSLFQTIIHATHSVATAAQAPVEKVADKLRMAFWSQQLQCQPSLLGVNNSGVWISSGKNEFHVAKGSLIGTYWNHVVPRGTASATKWAFVLASAAPTKEGSFLWLCQSSKDLCSVSAQSAQSRPSTVQLPPEAEMRAYAACQDALWALDSLGQVFIRTLSKSCPTGMHWTRLDLSQLGAVKLTSLACGNQHIWACDSRGGVYFRVGTQPLNPSLMLPAWIMIEPPVQPAGVSLVSVHSSPNDQMLWVLDSRWNVHVRTGITEEMPVGTAWEHVPGLQACQLALSTRTVWARCPNGDLARRYGVTDKNPAGDYWKKIPGSVSCFTVTASDELWAVGPPGYLLQRLTKTFSHSHGTQKSSQAAMPHPEDLEDEWEVI

SEQ ID NO: 42631 - protein, 482 aa, Homo sapiens
MVEKGPEVSGKRRGRNNAAASASAAAASAAASAACASPAATAASGAAASSASAAAASAAAAPNNGQNKSLAAAAPNGNSSSNSWEEGSSGSSSDEEHGGGGMRVGPQYQAVVPDFDPAKLARRSQERDNLGMLVWSPNQNLSEAKLDEYIAIAKEKHGYNMEQALGMLFWHKHNIEKSLADLPNFTPFPDEWTVEDKVLFEQAFSFHGKTFHRIQQMLPDKSIASLVKFYYSWKKTRTKTSVMDRHARKQKREREESEDELEEANGNNPIDIEVDQNKESKKEVPPTETVPQVKKEKHSTQAKNRAKRKPPKGMFLSQEDVEAVSANATAATTVLRQLDMELVSVKRQIQNIKQTNSALKEKLDGGIEPYRLPEVIQKCNARWTTEEQLLAVQAIRKYGRDFQAISDVIGNKSVVQVKNFFVNYRRRFNIDEVLQEWEAEHGKEETNGPSNQKPVKSPDNSIKMPEEEDEAPVLDVRYASAS

SEQ ID NO: 42632 - protein, 868 aa, Homo sapiens
MNLFATWEVDGSSPSCVPRLCSLTLKKLVVFKELEKELISVVIAVKMQGSKRILRSHEIVLPPSGQVETDLALTFSLQYPHFLKREGNKLQIMLQRRKRYKNRTILGYKTLAAGSISMAEVMQHPSEGGQVLSLCSSIKEAPVKAAEIWIASLSSQPIDHEDSTMQAGPKAKSTDNYSEEEYESFSSEQEASDDAVQGQDLDEDDFDVGKPKKQRRSIVRTTSMTRQQNFKQKVVALLRRFKVSDEVLDSEQDPAEHIPEAEEDLDLLYDTLDMEHPSDSGPDMEDDDSVLSTPKPKLRPYFEGLSHSSSQTEIGSIHSARSHKEPPSPADVPEKTRSLGGRQPSDSVSDTVALGVPGPREHPGQPEDSPEAEASTLDVFTERLPPSGRITKTESLVIPSTRSEGKQAGRRGRSTSLKERQAARPQNERANSLDNERCPDARSQLQIPRKTVYDQLNHILISDDQLPENIILVNTSDWQGQFLSDVLQRHTLPVVCTCSPADVQAAFSTIVSRIQRYCNCNSQPPTPVKIAVAGAQHYLSAILRLFVEQLSHKTPDWLGYMRFLVIPLGSHPVARYLGSVDYRYNNFFQDLAWRDLFNKLEAQSAVQDTPDIVSRITQYIAGANCAHQLPIAEAMLTYKQKSPDEESSQKFIPFVGVVKVGIVEPSSATSGDSDDAAPSGSGTLSSTPPSASPAAKEASPTPPSSPSVSGGLSSPSQGVGAELMGLQVDYWTAAQPADRKRDAEKKDLPVTKNTLKCTFRSLQVSRLPSSGEAAATPTMSMTVVTKEKNKKVMFLPKKAKDKDVESKSQCIEGISRLICTARQQQNMLRVLIDGVECSDVKFFQLAAQWSSHVKHFPICIFGHSKATF

SEQ ID NO: 42633 - protein, 1576 aa, Homo sapiens
MQLQGRNLADLRRSQSRGTFTISTTLRLGRQILESIESIHSVGFLHRDIKPSNFAMGRFPSTCRKCYMLDFGLARQFTNSCGDVRPPRAVAGFRGTVRYASINAHRNREMGRHDDLWSLFYMLVEFVVGQLPWRKIKDKEQVGSIKERYDHRLMLKHLPPEFSIFLDHISSLDYFTKPDYQMSIRVTRKSYKVSTSGPQAFNSLSYTSGPGACISSSSFSRMGSSSFRGGLGAGYGGASGGITTITVNQSLLSPLNLEVDPNIQAVRTQEEKQIKTLNNKFFSFIDKVRFLEQQNKMLETKWSLVQQQKMARSNMDNMFESYINNLKWQLETLGQEKLKLEAELGNMHGLVEDFRNKYEVEISKCTEMENEFVLIKEYVDEAYMNKMELESSLKELTAKISFLRQLYEEEIGSCSPRSRIHLWCCSWTTAASWTWTASSLRSRPEGFPGGCHADTEQRGELAIKDANAKLSELEAALQLASQDMARQLREYQELMNVKLALDIKIATYRKLLEGEESWLESGMQNMSIHMKTTSSYAGGQSLAYGGLTSPGLSYGLGSSFGSGMGSSSFSHTSSSRAVVMKKIETRDGKLVSESSNVLPNLRITATLLTSVFDNSIKTFGVIESDPFDWEKTGNDGSLTTTTTSTTPQLHTRLTPAAIGIANATPIPGDLLRENTDEVFPDEQLSDGENGIPVGVSPDKLPGSLGHPRPQEKDVWEEMDANKNKIKLGICKAATEEENSHGQANGLLNAPSLGSPIRVRSEITQPDRDIPLVRKLRSIHSFELEKRLTLEPKPDTDKFLETCLEKMQKDTSAGKESILPALLHKPCVPAVSRTDHIWHYDEEYLPDASKPASANTPEQADGGGSNGFIAVNLSSCKQEIDSKEWVIVDKEQDLQDFRTNEAVGHKTTGSPSDEEPEVLQVLEASPQDEKLQLGPWAENDHLKKETSGVVLALSAEGPPTAASEQYTDRLELQPGAASQFIAATPTSLMEAQAEGPLTAITIPRPSVASTQSTSGSFHCGQQPEKKDLQPMEPTVELYSPRENFSGLVVTEGEPPSGGSRTDLGLQIDHIGHDMLPNIRESNKSQDLGPKELPDHNRLVVREFENLPGETEEKSILLESDNEDEKLSRGQHCIEISSLPGDLVIVEKDHSATTEPLDVTKTQTFSVVPNQDKNNEIMKLLTVGTSEISSRDIDPHVEGQIGQVAEMQKNKISKDDDIMSEDLPGHQGDLSTFLHQEGKREKITPRNGELFHCVSENEHGAPTRKDMVRSSFVTRHSRIPVLAQEIDSTLESSSPVSAKEKLLQKKAYQPDLVKLLVEKRQFKSFLGDLSSASDKLLEEKLATVPAPFCEEEVLTPFSRLTVDSHLSRSAEDSFLSPIISQSRKSKIPRPVSWVNTDQVNSSTSSQFFPRPPPGKPPTRPGVEARLRRYKVLGSSNSDSDLFSRLAQILQNGSQKPRSTTQCKSPGSPHNPKTPPKSPVVPRRSPSASPRSSSLPRTSSSSPSRAGRPHHDQRSSSPHLGRSKSPPSHSGSSSSRRSCQQEHCKPSKNGLKGSGSLHHHSASTKTPQGKSKPASKLSR

SEQ ID NO: 42634 - protein, 530 aa, Homo sapiens
MVVVEQIKSQKIHGCQILETVYKHSCGGLPPVRSALEKILAVCHGVMYKQLSAWMLHGLLLDQHEEFFIKQGPSSGNVSAQPEEDEEDLGIGGLTGKQLRELQDLRLIEEENMLAPSLKQFSLRVEILPSYIPVRVAEKILFVGESVQMFENQNVNLTRKGSILKNQEDTFAAELHRLKQQPLFSLVDFEQVVDRIRSTVAEHLWKLMVEESDLLGQLKIIKDFYLLGRGELFQAFIDTAQHMLKTPPTAVTEHDVNVAFQQSAHKVLLDDDNLLPLLHLTIEYHGKEHKDATQAREGPSRETSPREAPASGWAALGLSYKVQWPLHILFTPAVLEKYNVVFKYLLSVRRVQAELQHCWALQMQRKHLKSNQTDAIKWRLRNHMAFLVDNLQYYLQVDVLESQFSQLLHQINSTRDFESIRLAHDHFLSNLLAQSFILLKPVFHCLNEILDLCHSFCSLVSQNLGPLDERGAAQLSILVKGFSRQSSLLFKILSSVRNHQINSDLAQLLLRLDYNKYYTQAGGTLGSFGM

SEQ ID NO: 42635 - protein, 969 aa, Homo sapiens
MKSEIPSDAPKTQESLKGILLHPEPIGAAKSFPAGVEMINSKVGNEFSHLCDDSQKQEKEMNGNQQEQEKSLVVRKKRKSQQAGPSYVQNCVKENQGILGLRQHLGTPSDEDNDSSFSDCLSSPSSSLHFGDSDTVTSDEDKEVSVRHSQTILNAKSRSHSARSHKWPRTETESVSGLLMKRPCLHGSSLRRLPCRKRFVKNNSSQRTQKQKERILMQRKKREVLARRKYALLPSSSSSSENDLSSESSSSSSTEGEEDLFVSASENHQNNPAVPSGSIDEDVVVIEASSTPQVTANEEINVTSTDSEVEIVTVGESYRSRSTLGHSRSHWSQGSSSHASRPQEPRNRSRISTVIQPLRQNAAEVVDLTVDEDEPTVVPTTSARMESQATSASINNSNPSTSEQASDTASAVTSSQPSTVSETSATLTSNSTTGTSIGDDSRRTTSSAVTETGPPAMPRLPSCCPQHSPCGGSSQNHHALGHPHTSCFQQHGHHFQHHHHHHHTPHPAVPVSPSFSDPACPVERPPQVQAPCGANSSSGTSYHEQQALPVDLSNSGIRSHGSGSFHGASAFDPCCPVSSSRAAIFGHQAAAAAPSQPLSSIDGYGSSMVAQPQPQPPPQPSLSSCRHYMPPPYASLTRPLHHQASACPHSHGNPPPQTQPPPQVDYVIPHPVHAFHSQISSHATSHPVAPPPPTHLASTAAPIPQHLPPTHQPISHHIPATAPPAQRLHPHEVMQRMEVQRRRMMQHPTRAHERPPPHPHRMHPNYGHGHHIHVPQTMSSHPRQAPERSAWELGIEAGVTAATYTPGALHPHLAHYHAPPRLHHLQLGALPLMVPDMAGYPHIRYISSGLDGTSFRGPFRGNFEELIHLEERLGNVNRGASQGTIERCTYPHKYKKRKLHCKQDGEEGTEEDTEEKCTICLSILEEGEDVRRLPCMHLFHQVCVDQWLITNKKCPICRVDIEAQLPSES

SEQ ID NO: 42636 - protein, 977 aa, Homo sapiens
MKSEIPSDAPKTQESLKGILLHPEPIGAAKSFPAGVEMINSKVGNEFSHLCDDSQKQEKEMNGNQQEQEKSLVVRKKRKSQQAGPSYVQNCVKENQGILGLRQHLGTPSDEDNDSSFSDCLSSPSSSLHFGDSDTVTSDEDKEVSVRHSQTILNAKSRSHSARSHKWPRTETESVSGLLMKRPCLHGSSLRRLPCRKRFVKNNSSQRTQKQKERILMQRKKREVLARRKYALLPSSSSSSENDLSSESSSSSSTEGEEDLFVSASENHQNNPAVPSGSIDEDVVVIEASSTPQVTANEEINVTSTDSEVEIVTVGESYRSRSTLGHSRSHWSQGSSSHASRPQEPRNRSRISTVIQPLRQNAAEVVDLTVDEDEPTVVPTTSARMESQATSASINNSNPSTSEQASDTASAVTSSQPSTVSETSATLTSNSTTGTSIGDDSRRTTSSAVTETGPPAMPRLPSCCPQHSPCGGSSQNHHALGHPHTSCFQQHGHHFQHHHHHHHTPHPAVPVSPSFSDPACPVERPPQVQAPCGANSSSGTSYHEQQALPVDLSNSGIRSHGSGSFHGASAFDPCCPVSSSRAAIFGHQAAAAAPSQPLSSIDGYGSSMVAQPQPQPPPQPSLSSCRHYMPPPYASLTRPLHHQASACPHSHGNPPPQTQPPPQVDYVIPHPVHAFHSQISSHATSHPVAPPPPTHLASTAAPIPQHLPPTHQPISHHIPATAPPAQRLHPHEVMQRMEVQRRRMMQHPTRAHERPPPHPHRMHPNYGHGHHIHVPQTMSSHPRQAPERSAWELGIEAGVTAATYTPGALHPHLAHYHAPPRLHHLQLGALPLMVPDMAGYPHIRYISSGLDGTSFRGPFRGNFEELIHLEERLGNVNRGASQGTIERCTYPHKYKKVTTDWFSQRKLHCKQDGEEGTEEDTEEKCTICLSILEEGEDVRRLPCMHLFHQVCVDQWLITNKKCPICRVDIEAQLPSES

SEQ ID NO: 42637 - protein, 214 aa, Homo sapiens
MEIQEIQLKEAKHIAEDADRKYEEVARKLVIIESDLERAEERAELSEGQVRQLEEQLRIMDQTLKALMAAEDKVLMARVVFRFNCNPDIFQLPMPPGSFGITTAPSLHPLLFISCLKCFPLVLYAPLFSLHKCSLGSQKRSQIIALQSCWIWSPCLLLLRGWGAVFLENLNILIPDDLATLRQPFVSRTQFSFFPIPLLFLSSFLWLVSHPFCL

SEQ ID NO: 42638 - protein, 128 aa, Homo sapiens [sequence omitted]

SEQ ID NO: 42639 - protein, 404 aa, Homo sapiens [sequence omitted]

SEQ ID NO: 42640 - protein, 322 aa, Homo sapiens [sequence omitted]

SEQ ID NO: 42641 - protein, 245 aa, Homo sapiens
MYLVIDDETKEAAIVDPVQPQKVVDAARKHGVKLTTVLTTHHHWDHAGGNEKLVKLESGLKVYGGDDRIGALTHKITHLSTLQVGSLNVKCLATPCHTSGHICYFVSKPGGSEPPAVFTGDTLFVAGCGKFYEGTADEMCKALLEVLGRLPPDTRVYCGHEYTINNLKFARHVEPGNAAIREKLAWAKEKYSIGEPTVPSTLAEEFTYNPFMRVSGPGSSGGRGSAQPAARCWPPQGEDGAAARR

SEQ ID NO: 42642 - protein, 680 aa, Homo sapiens [sequence omitted]

SEQ ID NO: 42643 - protein, 549 aa, Homo sapiens
MDFLLFQFGLCTFKYDYTDSKYITKSFNFYVFPKPFNRSSPDVKFVCQSSSIDFLASQGFDFNKVFRNGIPYLNQEEERQLREQYDEKRSQANGAGALSYVSPNTSKCPVTIPEDQKKFIDQVVEKIEDLLQSEENKNLDLEPCTGFQRKLIYQTLSWKYPKGIHVETLETEKKERYIVISKVDEEERKRREQQKHAKEQEELNDAVGFSRVIHAIANSGKLVIGHNMLLDVMHTVHQFYCPLPADLSEFKEMTTCVFPRLLDTKLMASTQPFKDIINNTSLAELEKRLKETPFNPPKVESAEGFPSYDTASEQLHEAGYDAYITGLCFISMANYLGSFLSPPKIHVSARSKLIEPFFNKLFLMRVMDIPYLNLEGPDCNIQISWIDDTSAFVSLSQPEQVKIAVNTSKYAESYRIQTYAEYMGRKQEEKQIKRKWTEDSWKEADSKRLNPQCIPYTLQNHYYRNNSFTAPSTVGKRNLSPSQEEAGLEDGVSGEISDTELEQTDSCAEPLSEGRKKAKKLKRMKKELSPAGSISKNSPATLFEVPDTW

SEQ ID NO: 42644 - protein, 168 aa, Homo sapiens
MHVWLAPFTRGRSHSITIDFTHPCHVALIRIWNYNKSRIHSFRGVKDITMLLDTQCIFEGEIAKASGTLAGAPEHFGDTILFTTDDDILEAIFYSDEMFDLDVGSLDSLQDEEAMRRPSTADGEGDERPFTQAGLGADERIPELELPSSSPVPQVTTPEPGIYHGICE

SEQ ID NO: 42645 - protein, 182 aa, Homo sapiens
MLPTAAGFSIWGQVGAAGEAPRCQTKISSCSCPTSSVSAAHGPGPNERARGLGGLPDPALSPRVPFQGYARIVFAIISFYFMPCCPLTASSFYLLSGLLDAFDGHAARALNQGTRFGAMLDMLTDRCSTMCLLVNLALLYPGATLFFQISMSLDVASHWLHLHRSAAILGAWATWRHYSGVG

SEQ ID NO: 42646 - protein, 228 aa, Homo sapiens
MGDFVDRGFYSVETFLLLLALKVRYPDRITLIRGNHESRQITQVYGFYDECLRKYGSVTVWRYCTEIFDYLSLSAIIDGKIFCVHGGLSPSIQTLDQIRTIDRKQEVPHDGPMCDLLWSDPEDTTGWGVSPRGAGYLFGSDVVAQFNAANDIDMICRAHQLVMEGYKWHFNETVLTVWSAPNYCYRCGNVAAILELDEHLQKDFIIFEAAPQETRGIPSKKPVADYFL

SEQ ID NO: 42647 - protein, 3212 aa, Homo sapiens
MVSDGMTGSNPVSPASSSSPASSGAGGISPQHIAQDSSLDGPPGPPDGATVPLEGFSLSQAADLANKGPKWEKSHAEIAEQAKHEAEIETRIAELRKEGFWSLKRLPKVPEPPRPKGHWDYLCEEMQWLSADFAQERRWKRGVARKVVRMVIRHHEEQRQKEERARREEQAKLRRIASTMAKDVRQFWSNVEKVVQFKQQSRLEEKRKKALDLHLDFIVGQTEKYSDLLSQSLNQPLTSSKAGSSPCLGSSSAASSPPPPASRLDDEDGDFQPQEDEEEDDEETIEVEEQQEGNDAEAQRREIELLRREGELPLEELLRSLPPQLLEGPSSPSQTPSSHDSDTRDGPEEGAEEEPPQVLEIKPPPSAVTQRNKQPWHPDEDDEEFTANEEEAEDEEDTIAAEEQLEGEVDHAMELSELAREGELSMEELLQQYAGAYAPGSGSSEDEDEDEVDANSSDCEPEGPVEAEEPPQEDSSSQSDSVEDRSEDEEDEHSEEEETSGSSASEESESEESEDAQSQSQADEEEEDDDFGVEYLLARDEEQSEADAGSGPPTPGPTTLGPKKEITDIAAAAESLQPKGYTLATTQVKTPIPLLLRGQLREYQHIGLDWLVTMYEKKLNGILADEMGLGKTIQTISLLAHLACEKGNWGPHLIIVPTSVMLNWEMELKRWCPSFKILTYYGAQKERKLKRQGWTKPNAFHVCITSYKLVLQDHQAFRRKNWRYLILDEAQNIKNFKSQRWQSLLNFNSQRRLLLTGTPLQNSLMELWSLMHFLMPHVFQSHREFKEWFSNPLTGMIEGSQEYNEGLVKRLHKVLRPFLLRRVKVDVEKQMPKKYEHVIRCRLSKRQRCLYDDFMAQTTTKETLATGHFMSVINILMQLRKVCNHPNLFDPRPVTSPFITPGICFSTASLVLRATDVHPLQRIDMGRFDLIGLEGRVSRYEADTFLPRHRLSRRVLLEVATAPDPPPRPKPVKMKVNRMLQPVPKQEGRTVVVVNNPRAPLGPVPVRPPPGPELSAQPTPGPVPQVLPASLMVSASPAGPPLIPASRPPGPVLLPPLQPNSGSLPQVLPSPLGVLSGTSRPPTPTLSLKPTPPAPVRLSPAPPPGSSSLLKPLTVPPGYTFPPAAATTTSTTTATATTTAVPAPTPAPQRLILSPDMQARLPSGEVVSIGQLASLAQRPVANAGGSKPLTFQIQGNKLTLTGAQVRQLAVGQPRPLQRNVVHLVSAGGQHHLISQPAHVALIQAVAPTPGPTPVSVLPSSTPSTTPAPTGLSLPLAANQVPPTMVNNTGVVKIVVRQAPRDGLTPVPPLAPAPRPPSSGLPAVLNPRPTLTPGRLPTPTLGTARAPMPTPTLVRPLLKLVHSPSPEVSASAPGAAPLTISSPLHVPSSLPGPASSPMPIPNSSPLASPVSSTVSVPLSSSLPISVPTTLPAPASAPLTIPISAPLTVSASGPALLTSVTPPLAPVVPAAPGPPSLAPSGASPSASALTLGLATAPSLSSSQTPGHPLLLAPTSSHVPGLNSTVAPACSPVLVPASALASPFPSAPNPAPAQASLLAPASSASQALATPLAPMAAPQTAILAPSPAPPLAPLPVLAPSPGAAPVLASSQTPVPVMAPSSTPGTSLASASPVPAPTPVLAPSSTQTMLPAPVPSPLPSPASTQTLALAPALAPTLGGSSPSQTLSLGTGNPQGPFPTQTLSLTPASSLVPTPAQTLSLAPGPPLGPTQTLSLAPAPPLAPASPVGPAPAHTLTLAPASSSASLLAPASVQTLTLSPAPVPTLGPAAAQTLALAPASTQSPASQASSLVVSASGAAPLPVTMVSRLPVSKDEPDTLTLRSGPPSPPSTATSFGGPRPRRQPPPPPRSPFYLDSLEEKRKRQRSERLERIFQLSEAHGALAPVYGTEVLDFCTLPQPVASPIGPRSPGPSHPTFWTYTEAAHRAVLFPQQRLDQLSEIIERFIFVMPPVEAPPPSLHACHPPPWLAPRQAAFQEQLASELWPRARPLHRIVCNMRTQFPDLRLIQYDCGKLQTLAVLLRQLKAEGHRVLIFTQMTRMLDVLEQFLTYHGHLYLRLDGSTRVEQRQALMERFNADKRIFCFILSTRSGGVGVNLTGADTVVFYDSDWNPTMDAQAQDRCHRIGQTRDVHIYRLISERTVEENILKKANQKRMLGDMAIEGGNFTTAYFKQQTIRELFDMPLEEPSSSSVPSAPEEEEETVASKQTHILEQALCRAEDEEDIRAATQAKAEQVAELAEFNENDGFPAGEGEEAGRPGAEDEEMSRAEQEIAALVEQLTPIERYAMKFLEASLEEVSREELKQAEEQVEAARKDLDQAKEEVFRLPQEEEEGPGAGDESSCGTGGGTHRRSKKAKAPERPGTRVSERLRGARAETQGANHTPVISAHQTRSTTTPPRCSPARERVPRPAPRPRPTPASAPAAIPALVPVPVSAPVPISAPNPITILPVHILPSPPPPSQIPPCSSPACTPPPACTPPPAHTPPPAQTCLVTPSSPLLLGPPSVPISASVTNLPLGLRPEAELCAQALASPESLELASVASSETSSLSLVPPKDLLPVAVEILPVSEKNLSLTPSAPSLTLEAGSIPNGQEQEAPDSAEGTTLTVLPEGEELPLCVSESNGLELPPSAASDEPLQEPLEADRTSEELTEAKTPTSSPEKPQELVTAEVAAPSTSSSATSSPEGPSPARPPRRRTSADVEIRGQGTGRPGQPPGPKVLRKLPGRLVTVVEEKELVRRRRQQRGAASTLVPGVSETSASPGSPSVRSMSGPESSPPIGGPCEAAPSSSLPTPPQQPFIARRHIELGVTGGGSPENGDGALLAITPPAVKRRRGRPPKKNRSPADAGRGVDEAPSSTLKGKTNGADPVPGPETLIVADPVLEPQLIPGPQPLGPQPVHRPNPLLSPVEKRRRGRPPKARDLPIPGTISSAGDGNSESRTQPPPHPSPLTPLPPLLVCPTATVANTVTTVTISTSPPKRKRGRPPKNPPSPRPSQLPVLDRDSTSVLESCGLGRRRQPQGQGESEGSSSDEDGSRPLTRLARLRLEAEGMRGRKSGGSMVVAVIQDDLDLADSGPGGLELTPPVVSLTPKLRSTRLRPGSLVPPLETEKLPRKRAGAPVGGSPGLAKRGRLQPPSPLGPEGSVEESEAEASGEEEEGDGTPRRRPGPRRLVGTTNQGDQRILRSSAPPSLAGPAVSHRGRKAKT

SEQ ID NO: 42648 - protein, 636 aa, Homo sapiens
MKKFGGPGRMKQSCLLRQCTAPVLPHTAVCLLCGEAGKEDTVEGEEEKFGLSLMECTICNEIVHPGCLKMGKAEGVINAEIPNCWECPRCTQEGRTSKDSGEGPGRRRADNGEEGASLGSGWKLTEEPPLPPPPPRRKGPLPAGPPPEDVPGPPKRKEREAGNEPPTPRKKVKGGRERHLKKVGGDACLLRGSDPGGPGLLPPRVLNPSQAFSSCHPGLPPENWEKPKPPLASAEGPAVPSPSPQREKLERFKRMCQLLERVPDTSSSSSDSDSDSDSSGTSLSEDEAPGEARNGRRPARGSSGEKENRGGRRAVRPGSGGPLLSWPLGPAPPPRPPQLERHVVRPPPRSPEPDTLPLAAGSDHPLPRAAWLRVFQHLGPRELCICMRVCRTWSRWCYDKRLWPRMDLSRRKSLTPPMLSGVVRRQPRALDLSWTGVSKKQLMWLLNRLQGLQELVLSGCSWLSVSALGSAPLPALRLLDLRWIEDVKDSQLRELLLPPPDTKPGQTESRGRLQGVAELRLAGLELTDASLRLLLRHAPQLSALDLSHCAHVGDPSVHLLTAPTSPLRETLVHLNLAGCHRLTDHCLPLFRRCPRLRRLDLRSCRQLSPEACARLAAAGPPGPFRCPEEKLLLKDS

SEQ ID NO: 42649 - protein, 67 aa, Homo sapiens
MELLYWLLEGGDSEDKEDATGNVEMKNIQPLVFEISCDVFQSRCKEHGKIKVLEWFKYVLGIPVYRL

SEQ ID NO: 42650 - protein, 21 aa, Homo sapiens
MELLYWLLEGGDSEDKEVKPV

SEQ ID NO: 42651 - protein, 519 aa, Homo sapiens
MGPADSLPPTPPSGTPSPGPPPALPLPPAPALLADGDWESREELRLRELEEARARAAQMEKTMRRWSDCTANWREKWSKVRAERNRAREEVRQLRQRLDALTKELAGARRERQEAQGECEARGRELARLRGARGVADQTRDGPEPEAEREPVRDVGSERPPGSQELELVESLLKSMPEESEDCWEARSLGAGGPRGSSGRQERSRLPWEDTAATEEEASKLTALRLRLDESQKVLLKEREDKLALSRNIEKLEGELSQWKIKYEELSKTKQEMLKQLSILKEAHQDELGRMSEDLEDELGARSSMDRKMAELRGEMERLQAENAAEWGRRERLETEKLGLERENKKLRAQVGDLEEALARRRRQTASALDCDLRASQAALFEKNKELADLKHVHGKLKKQFQEKVAELAHANRRVEQHEAEVKKLRLRVEELKKELAQAEDELDEAHNQARKLQRSLDEQTEQSENLQVQLEHLQSRLRRQQQNAPLFGKIRSARFGTEEAEDGTSDLDEDEDLQIQVA

SEQ ID NO: 42652 - protein, 1071 aa, Homo sapiens
MLEGFYEEISKGRKPTLILRTQLSVRVNAILEKLYSSSGPELRRSLFSLKQIFQEDKDLVPEFVHSEGLSCLIRVGAAADHNYQSYILRALGQLMLFVDGMLGVVAHSDTIQWLYTLCASLSRLVVKTALKLLLVFVEYSENNAPLFIRAVNSVASTTGAPPWANLVSILEEKNGADPELLVYTVTLINKTLAALPDQDSFYDVTDALEQQGMEALVQRHLGTAGTDVDLRTQLVLYENALKLEDGDIEEAPGAGGRRERRKPSSEEGKRSRRSLEGGGCPARAPEPGPTGPASPVGPTSSTGPALLTGPASSPVGPPSGLQASVNLFPTISVAPSADTSSERSIYKARFLENVAAAETEKQVALAQGRAETLAGAMPNEAGGHPDARQLWDSPETAPAARTPQSPAPCVLLRAQRSLAPEPKEPLIPASPKAEPIWELPTRAPRLSIGDLDFSDLGEDEDQDMLNVESVEAGKDIPAPSPPLPLLSGVPPPPPLPPPPPIKGPFPPPPPLPLAAPLPHSVPDSSALPTKRKTVKLFWRELKLAGGHGVSASRFGPCATLWASLDPVSVDTARLEHLFESRAKEVLPSKKAGEGRRTMTTVLDPKRSNAINIGLTTLPPVHVIKAALLNFDEFAVSKDGIEKLLTMMPTEEERQKIEEAQLANPDIPLGPAENFLMTLASIGGLAARLQLWAFKLDYDSMEREIAEPLFDLKVGMEQLVQNATFRCILATLLAVGNFLNGSQSSGFELSYLEKVSEVKDTVRRQSLLHHLCSLVLQTRPESSDLYSEIPALTRCAKVDFEQLTENLGQLERRSRAAEESLRSLAKHELAPALRARLTHFLDQCARRVAMLRIVHRRVCNRFHAFLLYLGYTPQAAREVRIMQFCHTLREFALEYRTCRERVLQQQQKQATYRERNKTRGRMITETEKFSGVAGEAPSNPSVPVAVSSGPGRGDADSHASMKSLLTSRPEDTTHNRRSRGMVQSSSPIMPTVGPSTASPEEPPGSSLPSDTSDEIMDLLVQSVTKSSPRALAARERKRSRGNRKSLRRTLKSGLGDDLVQALGLSKGPGLEV

SEQ ID NO: 42653 - protein, 1151 aa, Homo sapiens
MHVKDPGPPRPPAGATQDEELQGSPLSRKFQLPPAADESGDAQRGTVESSSVLSEGPGPSGVESLLCPMSSHLSLAQGESDTPGVGLVGDPGPSRAMPSGLSPGALDSDPVGLGDPLSEISKLLEAAPSGSGLPKPADCLLAQDLCWELLASGMATLPGTRDVQGRAVLLLCAHSPAWLQSECSSQELIRLLLYLRSIPRPEVQALGLTVLVDARICAPSSSLFSGLSQLQEAAPGAVYQVLLVGSTLLKEVPSGLQLEQLPSQSLLTHIPTAGLPTSLGGGLPYCHQAWLDFRRRLEALLQNCQAACALLQGAIESVKAVPQPMEPGEVGQLLQQTEVLMQQVLDSPWLAWLQCQGGRELTWLKQEVPEVTLSPDYRTAMDKADELYDRVDGLLHQLTLQSNQRIQALELVQTLEARESGLHQIEVWLQQVGWPALEEAGEPSLDMLLQAQGSFQELYQVAQEQVRQGEKFLQPLTGWEAAELDPPGARFLALRAQLTEFSRALAQRCQRLADAERLFQLFREALTWAEEGQRVLAELEQERPGVVLQQLQLHWTRHPDLPPAHFRKMWALATGLGSEAIRQECRWAWARCQDTWLALDQKLEASLKLPPVGSTASLCVSQVPAAPAHPPLRKAYSFDRNLGQSLSEPACHCHHAATIAACRRPEAGGGALPQASPTVPPPGSSDPRSLNRLQLVLAEMVATEREYVRALEYTMENYFPELDRPDVPQGLRGQRAHLFGNLEKLRDFHCHFFLRELEACTRHPPRVAYAFLRHRVQFGMYALYSKNKPRSDALMSSYGHTFFKDKQQALGDHLDLASYLLKPIQRMGKYALLLQELARACGGPTQELSALREAQSLVHFQLRHGNDLLAMDAIQGCDVNLKEQGQLVRQDEFVVRTGRHKSVRRIFLFEELLLFSKPRHGPTGVDTFAYKRSFKMADLGLTECCGNSNLRFEIWFRRRKARDTFVLQASSLAIKQAWTADISHLLWRQAVHNKEVRMAEMVSMGVGNKAFRDIAPSEEAINDRTVNYVLKCREVRSRASIAVAPFDHDSLYLGASNSLPGDPASCSVLGSLNLHLYRDPALLGLRCPLYPSFPEEAALEAEAELGGQPSLTAEDSEISSQCPSASGSSGSDSSCVSGQALGRGLEDLPCV

SEQ ID NO: 42654 - protein, 458 aa, Homo sapiens
MIGSGIFVSPKGVLVHTASYGMSLIVWAIGGLFSVVGALCYAELGTTITKSGASYAYILEAFGGFIAFIRLWVSLLVVEPTGQAIIAITFANYIIQPSFPSCDPPYLACRLLAAACICLLTFVNCAYVKWGTRVQDTFTYAKVVALIAIIVMGLVKLCQGHSEHFQDAFEGSSWDMGNLSLALYSALFSYSGWDTLNFVTEEIKNPERNLPLAIGISMPIVTLIYILTNVAYYTVLNISDVLSSDAVAVTFADQTFGMFSWTIPIAVALSCFGGLNASIFASSRLFFVGSREGHLPDLLSMIHIERFTPIPALLFNCTMALIYLIVEDVFQLINYFSFSYWFFVGLSVVGQLYLRWKEPKRPRPLKLSVFFPIVFCICSVFLVIVPLFTDTINSLIGIGIALSGVPFYFMGVYLPESRRPLFIRNVLAAITRGTQQLCFCVLTELDVAEEKKDERKTD

SEQ ID NO: 42655 - protein, 594 aa, Homo sapiens
MLENYSHLVSLGYQVSKPEVIFKLEQGEEPWISEGEIQRPFYPDWKTRPEVKSSHLQQDVSEVSHCTHDLLHATLEDSWDVSSQLDRQQENWKRHLGSEASTQKKIITPQENFEQNKFGENSRLNTNLVTQLNIPARIRPSECETLGSNLGHNADLLNENNILAKKKPYKCDKCRKAFIHRSSLTKHEKTHKGEGAFPNGTDQGIYPGKKHHECTDCGKTFLWKTQLTEHQRIHTGEKPFECNVCGKAFRHSSSLGQHENAHTGEKPYQCSLCGKAFQRSSSLVQHQRIHTGEKPYRCNLCGRSFRHGTSLTQHEVTHSGEKPFQCKECGKAFSRCSSLVQHERTHTGEKPFECSICGRAFGQSPSLYKHMRIHKRGKPYQSSNYSIDFKHSTSLTQDESTLTEVKSYHCNDCGEDFSHITDFTDHQRIHTAENPYDCEQAFSQQAISHPGEKPYQCNVCGKAFKRSTSFIEHHRIHTGEKPYECNECGEAFSRRSSLTQHERTHTGEKPYECIDCGKAFSQSSSLIQHERTHTGEKPYECNECGRAFRKKTNLHDHQRIHTGEKPYSCKECGKNFSRSSALTKHQRIHTRNKL

SEQ ID NO: 42656 - protein, 500 aa, Homo sapiens
MAGGGGSSDGSGRAAGRRASRSSGRARRGRHEPGLGGPAERGAGEARLEEAVNRWVLKFYFHEALRAFRGSRYGDFRQIRDIMQALLVRPLGKEHTVSRLLRVMQCLSRIEEGENLDCSFDMEAELTPLESAINVLEMIKTEFTLTEAVVESSRKLVKEAAVIICIKNKEFEKASKILKKHMSKDPTTQKLRNDLLNIIREKNLAHPVIQNFSYETFQQKMLRFLESHLDDAEPYLLTMAKKALKSESAASSTGKEDKQPAPGPVEKPPREPARQLRNPPTTIGMMTLKAAFKTLSGAQDSEAAFAKLDQKDLVLPTQALPASPALKNKRPRKDENESSAPADGEGGSELQPKNKRMTISRLVLEEDSQSTEPSAGLNSSQEAASAPPSKPTVLNQPLPGEKNPKVPKGKWNSSNGVEEKETWVEEDELFQVQAAPDEDSTTNITKKQKWTVEESEWVKAGVQKYGEGNWAAISKNYPFVNRTAVMIKDRWRTMKRLGMN

SEQ ID NO: 42657 - protein, 13 aa, Homo sapiens
MRSGAASGSMCLC

SEQ ID NO: 42658 - protein, 803 aa, Homo sapiens [sequence omitted]

SEQ ID NO: 42659 - protein, 2643 aa, Homo sapiens
MVEKQTGKKDKDKVSLTKTPKLERGDGGKEVRERASKRKLPFTAGANGEQKDSDTEKQGPERKRIKKEPVTRKAGLLFGMGLSGIRAGYPLSERQQVALLMQMTAEESANSPVDTTPKHPSQSTVCQKGTPNSASKTKDKVNKRNERGETRLHRAAIRGDARRIKELISEGADVNVKDFAGWTALHEACNRGYYDVAKQLLAAGAEVNTKGLDDDTPLHDAANNGHYKVVKLLLRYGGNPQQSNRKGETPLKVANSPTMVNLLLGKGTYTSSEESSTESSEEEDAPSFAPSSSVDGNNTDSEFEKGLKHKAKNPEPQKATAPVKDEYEFDEDDEQDRVPPVDDKHLLKKDYRKETKSNSFISIPKMEVKSYTKNNTIAPKKASHRILSDTSDEEDASVTVGTGEKLRLSAHTILPGSKTREPSNAKQQKEKNKVKKKRKKETKGREVRFGKRSDKFCSSESESESSESGEDDRDSLGSSGCLKGSPLVLKDPSLFSSLSASSTSSHGSSAAQKQNPSHTDQHTKHWRTDNWKTISSPAWSEVSSLSDSTRTRLTSESDYSSEGSSVESLKPVRKRQEHRKRASLSEKKSPFLSSAEGAVPKLDKEGKVVKKHKTKHKHKNKEKGQCSISQELKLKSFTYEYEDSKQKSDKAILLENDLSTENKLKVLKHDRDHFKKEEKLSKMKLEEKEWLFKDEKSLKRIKDTNKDISRSFREEKDRSNKAEKERSLKEKSPKEEKLRLYKEERKKKSKDRPSKLEKKNDLKEDKISKEKEKIFKEDKEKLKKEKVYREDSAFDEYCNKNQFLENEDTKFSLSDDQRDRWFSDLSDSSFDFKGEDSWDSPVTDYRDMKSDSVAKLILETVKEDSKERRRDSRAREKRDYREPFFRKKDRDYLDKNSEKRKEQTEKHKSVPGYLSEKDKKRRESAEAGRDRKDALESCKERRDGRAKPEEAHREELKECGCESGFKDKSDGDFGKGLEPWERHHPAREKEKKDGPDKERKEKTKPERYKEKSSDKDKSEKSILEKCQKDKEFDKCFKEKKDTKEKHKDTHGKDKERKASLDQGKEKKEKAFPGIISEDFSEKKDDKKGKEKSWYIADIFTDESEDDRDSCMGSGFKMGEASDLPRTDGLQEKEEGREAYASDRHRKSSDKQHPERQKDKEPRDRRKDRGAADAGRDKKEKVFEKHKEKKDKESTEKYKDRKDRASVDSTQDKKNKQKLPEKAEKKHAAEDKAKSKHKEKSDKEHSKERKSSRSADAEKSLLEKLEEEALHEYREDSNDKISEVSSDSFTDRGQEPGLTAFLEVSFTEPPGDDKPRESACLPEKLKEKERHRHSSSSSKKSHDRERAKKEKAEKKEKGEDYKEGGSRKDSGQYEKDFLEADAYGVSYNMKADIEDELDKTIELFSTEKKDKNDSEREPSKKIEKELKPYGSSAINILKEKKKREKHREKWRDEKERHRDRHADGLLRHHRDELLRHHRDEQKPATRDKDSPPRVLKDKSRDEGPRLGDAKLKEKFKDGAEKEKGDPVKMSNGNDKVAPSKDPGKKDARPREKLLGDGDLMMTSFERMLSQKDLEIEERHKRHKERMKQMEKLRHRSGDPKLKEKAKPADDGRKKGLDIPAKKPPGLDPPFKDKKLKESTPIPPAAENKLHPASGADSKDWLAGPHMKEVLPASPRPDQSRPTGVPTPTSVLSCPSYEEVMHTPRTPSCSADDYADLVFDCADSQHSTPVPTAPTSACSPSFFDRFSVASSGLSENASQAPARPLSTNLYRSVSVDIRRTPEEEFSVGDKLFRQQSVPAASSYDSPMPPSMEDRAPLPPVPAEKFACLSPGYYSPDYGLPSPKVDALHCPPAAVVTVTPSPEGVFSSLQAKPSPSPRAELLVPSLEGALPPDLDTSEDQQATAAIIPPEPSYLEPLDEGPFSAVITEEPVEWAHPSEQALASSLIGGTSENPVSWPVGSDLLLKSPQRFPESPKRFCPADPLHSAAPGPFSASEAPYPAPPASPAPYALPVAEPGLEDVKDGVDAVPAAISTSEAAPYAPPSGLESFFSNCKSLPEAPLDVAPEPACVAAVAQVEALGPLENSFLDGSRGLSHLGQVEPVPWADAFAGPEDDLDLGPFSLPELPLQTKDAADGEAEPVEESLAPPEEMPPGAPGVINGGDVSTVVAEEPPALPPDQASTRLPAELEPEPSGEPKLDVALEAAVEAETVPEERARGDPDSSVEPAPVPPEQRPLGSGDQGAEAEGPPAASLCAPDGPAPNTVAQAQAADGAGPEDDTEASRAAAPAEGPPGGIQPEAAEPKPTAEAPKAPRVEEIPQRMTRNRAQMLANQSKQGPPPSEKECAPTPAPVTRAKARGSEDDDAQAQHPRKRRFQRSTQQLQQQLNTSTQQTREVIQQTLAAIVDAIKLDAIEPYHSDRANPYFEYLQIRKKIEEKRKILCCITPQAPQCYAEYVTYTGSYLLDGKPLSKLHIPVIAPPPSLAEPLKELFRQQEAVRGKLRLQHSIEREKLIVSCEQEILRVHCRAARTIANQAVPFSACTMLLDSEVYNMPLESQGDENKSVRDRFNARQFISWLQDVDDKYDRMKTCLLMRQQHEAAALNAVQRMEWQLKVQELDPAGHKSLCVNEVPSFYVPMVDVNDDFVLLPA

SEQ ID NO: 42660 - protein, 247 aa, Homo sapiens
MVEKQTGKKDKDKVSLTKTPKLERGDGGKEVRERASKRKLPFTAGANGEQKDSDTEKQGPERKRIKKEPVTRKAGLLFGMGLSGIRAGYPLSERQQVALLMQMTAEESANSPVDTTPKHPSQSTVCQKGTPNSASKTKDKVNKRNERGETRLHRAAIRGDARRIKELISEGADVNVKDFAGWTALHEACNRGYYDVAKQLLAAGAEVNTKGLDDDTPLHDAANNGHYKVGIPPFFTHPACPGIWVVL

SEQ ID NO: 42661 - protein, 88 aa, Homo sapiens
MYKRLRVGLCGRLSPISHGNTIALFFRSLLPNYTMEGERPEEGVAGGLNRNQGLNRLMLAVRDMMANFHLNDLEAPHEDDAEGEGEWD

SEQ ID NO: 42662 - protein, 2337 aa, Homo sapiens
MPTTLPQGTINMNQCTDVVDGEGRTGQKFSLCILTPEKEHFIRAETKEIVSGWLEMLMVYPRTNKQNQKKKRKVEPPTPQEPGPAKVAVTSSSSSSSSSSSIPSAEKVPTTKSTLWQEEMRTKDQPDGSSLSPAQSPSQSQPPAASSLREPGLESKEEESAMSSDRMDCGRKVRVESGYFSLEKTKQDLKAEEQQLPPPLSPPSPSTPNHRYSCPESPSQELGGPLPSPGPRLPHQMVCSISLSSLDVASQPPAYVDSGSTRGRGTERLGSAFAFKASRQYATLADVPKAIRISHREAFQVERRRLERRTRARSPGREEVARLFGNERRRSQVIEKFEALDIEKAEHMETNAVGPSPSSDTRQGRSEKRAFPRKRDFTNEAPPAPLPDASASPLSPHRRAKSLDRRSTEPSVTPDLLNFKKGWLTKQYEDGQWKKHWFVLADQSLRYYRDSVAEEAADLDGEIDLSACYDVTEYPVQRNYGFQIHTKEGEFTLSAMTSGIRRNWIQTIMKHVHPTTAPDVTSSLPEEKNKSSCSFETCPRPTEKQEAELGEPDPEQKRSRARERRREGRSKTFDWAEFRPIQQALAQERVGGVGPADTHEPLRPEAEPGELERERARRREERRKRFGMLDATDGPGTEDAALRMEVDRSPGLPMSDLKTHNVHVEIEQRWHQVETTPLREEKQVPIAPVHLSSEDGGDRLSTHELTSLLEKELEQSQKEASDLLEQNRLLQDQLRVALGREQSAREGYVLQTEVAASPSGAWQRLHRVNQDLQSELEAQCQRQELITHQIQTLKRSYGEAKDTIRHHEAEIRSLQARLSNAAAELAIKEQALAKLKGDLKREQGRVREQLEERQHSEAALSSQLRASEQKLKSAEALLLEKTQELRGLETQQALQRDRQKEVQRLQERIADLSQQLGASEQAQRLMEEKLQRNYELLLESCEKEKQALLQNLKEVEDKASAYEDQLQGQAQQVETLQKEKLSATFEGSEQVHQLEEQLEAREASVRRLAEHVQSLCDERDLLRQRFQELTERVATSDEDVAELREKLRRREADNQSLEHSYQRVSSQLQSMHTLLREKEEELERIKEAHEKVLEKKEQDLNEALVKMVALGSSLEETEIKLQAKEEILRKFASESPKDMEEPRSTPEETERDGTLLPGQPVQATRAPLGLPHTRLEDEDEDLGAPPGEEYGDGSPSREDSMVPPKSVEVLDREGHQQGTAKLDQGAPGVKRQRIRFSTIQCQRYIHPEGSEKTWTSSTSSDTSQDRSPSEESMSSEPAPSVLPATGDSDTYLSIIHSLETKLYVTEEKLKDVTVRLESQQGQSREALLALHHQWAGTEAQLREQLRASLLQVGALASQLEQERQERARRVEGHVGELGDFQVKNSQALMCLENCREQLRSLPRASQEDEQDARAASLASVESALVSAIQALQHWPAPAHGGARAQLETGGTEENGKPASLQQCSQSELTEQEQVRLLSDQIALEASLISQIADSLKNTTSDVSRMLHEISWSGQPPMESAGAPVDTWARKVLVDGEFWSQVESLRKHLGTLGGEAVGASGDGQQSIPQGLAPILANATWVRAELSFATQSVRESFHRRLQSIQETLRGTQTALRQHKCLLREILGAYQTPDFERVMQQVLEALRLPAGHEDGVQLSWDLSPLGEVLGRDSDSSQEPFDVSDQSPGAFVAIQEELAQQLKEKASLLEEIAAALPSLPPVESLRDCQKLLQVSQSLSYNTCLGGLGQYSSLLVQDAIIQAQVCYASCRIRLEYEKELQLCKESWQTREPSCSEQAQAARALREEYEELLRKQKSEYLDVIAIVERENAELKAKAAQLDHQQQCLEDAESKHSMSMFTLRGRYEEEIRCVVEQLTRTESTLQAERSRVLSQLDASVRDRQDMERHHGEQIQTLEDRFQLKVRELQTIHEEELRTLQEHYSQSLRCLQDTLCLHQGPHPKALPAPAPNWQATQGEADSMTGLRERIQELEAQMDVMREELGHKDLEGDAATLREKYQRDLESLKATCERGFAAMEETHQKKIEDLQRQHQRELEKLREEKDRLLAEETAATISAIEAMKNAHREEMERELEKSQRSQISSVNSDVEALRRQYLEELQSVQRELEVLSEQYSQKCLENAHLAQALEAERQALRQCQRENQELNAHNQELNNRLAAEITRLRTLLTGDGGGEATGSPLAQGKDAYELEVLLRVKESEIQYLKQEISSLKDELQTALRDKKYASDKYKDIYTELSIAKAKADCDISRLKEQLKAATEALGEKSPDSATVSGYDIMKSKSNPDFLKKDRSCVTRQLRNIRSKSLKEGLTVQERLKLFESRDLKKD

SEQ ID NO: 42663 - protein, 641 aa, Homo sapiens
MEHVQADHELFLQAFEKPTQIYRFLRTRNLIAPIFLHRTLTYMSHRNSRTNIKSLSAHLQLTFTGFFHKNDKPSPNSENEQNSVTLEVLLVKVCHKKRKDVSCPIRQVPTGKKQVPLNPDLNQTKPGNFPSLAVSSNEFEPSNSHMVKSYSLLFRVTRPGRREFNGMINGETNENIDVNEELPARRKRNREDGEKTFVAQMTVFDKNRRLQLLDGEYEVAMQEMEECPISKKRATWETILDGKRLPPFETFSQGPTLQFTLRWTGETNDKSTAPIAKPLATRNSESLHQENKPGSVKPTQTIAVKESLTTDLQTRKEKDTPNENRQKLRIFYQFLYNNNTRQQTEARDDLHCPWCTLNCRKLYSLLKHLKLCHSRFIFNYVYHPKGARIDVSINECYDGSYAGNPQDIHRQPGFAFSRNGPVKRTPITHILVCRPKRTKASMSEFLESEDGEVEQQRTYSSGHNRLYFHSDTCLPLRPQEMEVDSEDEKDPEWLREKTITQIEEFSDVNEGEKEVMKLWNLHVMKHGFIADNQMNHACMLFVENYGQKIIKKNLCRNFMLHLVSMHDFNLISIMSIDKAVTKLREMQQKLEKGESASPANEEITEEQNGTANGFSEINSKEKALETDSVSGVSKQSKKQKL

SEQ ID NO: 42664 - protein, 862 aa, Homo sapiens
MAEQRFCVDYAKRGTAGCKKCKEKIVKGVCRIGKVVPNPFSESGGDMKEWYHIKCMFEKLERARATTKKIEDLTELEGWEELEDNEKEQITQHIADLSSKAAGTPKKKAVVQAKLTTTGQVTSPVKGASFVTSTNPRKFSGFSAKPNNSGEAPSSPTPKRSLSSSKCDPRHKDCLLREFRKLCAMVADNPSYNTKTQIIQDFLRKGSAGDGFHGDVYLTVKLLLPGVIKTVYNLNDKQIVKLFSRIFNCNPDDMARDLEQGDVSETIRVFFEQSKSFPPAAKSLLTIQEVDEFLLRLSKLTKEDEQQQALQDIASRCTANDLKCIIRLIKHDLKMNSGAKHVLDALDPNAYEAFKASRNLQDVVERVLHNAQEVEKEPGQRRALSVQASLMTPVQPMLAEACKSVEYAMKKCPNGMFSEIKYDGERVQVHKNGDHFSYFSRSLKPVLPHKVAHFKDYIPQAFPGGHSMILDSEVLLIDNKTGKPLPFGTLGVHKKAAFQDANVCLFVFDCIYFNDVSLMDRPLCERRKFLHDNMVEIPNRIMFSEMKRVTKALDLADMITRVIQEGLEGLVLKDVKGTYEPGKRHWLKVKKDYLNEGAMADTADLVVLGAFYGQGSKGGMMSIFLMGCYDPGSQKWCTVTKCAGGHDDATLARLQNELDMVKISKDPSKIPSWLKVNKIYYPDFIVPDPKKAAVWEITGAEFSKSEAHTADGISIRFPRCTRIRDDKDWKSATNLPQLKELYQLSKEKADFTVVAGDEGSSTTGGSSEENKGPSGSAVSRKAPSKPSASTKKAEGKLSNSNSKDGNMQTAKPSAMKVGEKLATKSSPVKVGEKRKAADETLCQTKRRPASEQRGRTVPAGRR

SEQ ID NO: 42665 - protein, 922 aa, Homo sapiens
MAEQRFCVDYAKRGTAGCKKCKEKIVKGVCRIGKVVPNPFSESGGDMKEWYHIKCMFEKLERARATTKKIEDLTELEGWEELEDNEKEQITQHIADLSSKAAGTPKKKAVVQAKLTTTGQVTSPVKGASFVTSTNPRKFSGFSAKPNNSGEAPSSPTPKRSLSSSKCDPRHKDCLLREFRKLCAMVADNPSYNTKTQIIQDFLRKGSAGDGFHGDVYLTVKLLLPGVIKTVYNLNDKQIVKLFSRIFNCNPDDMARDLEQGDVSETIRVFFEQSKSFPPAAKSLLTIQEVDEFLLRLSKLTKEDEQQQALQDIASRCTANDLKCIIRLIKHDLKMNSGAKHVLDALDPNAYEAFKASRNLQDVVERVLHNAQEVEKEPGQRRALSVQASLMTPVQPMLAEACKSVEYAMKKCPNGMFSEIKYDGERVQVHKNGDHFSYFSRSLKPVLPHKVAHFKDYIPQAFPGGHSMILDSEVLLIDNKTGKPLPFGTLGVHKKAAFQDANVCLFVFDCIYFNDVSLMDRPLCERRKFLHDNMVEIPNRIMFSEMKRVTKALDLADMITRVIQEGLEGLVLKDVKGTYEPGKRHWLKVKKDYLNEGAMADTADLVVLGAFYGQGSKGGMMSIFLMGCYDPGSQKWCTVTKCAGGHDDATLARLQNELDMVKISKDPSKIPSWLKVNKIYYPDFIVPDPKKAAVWEITGAEFSKSEAHTADGISIRFPRCTRIRDDKDWKSATNLPQLKELYQLSKEKADFTVVAGDEGSSTTGGSSEENKGPSGSAVSRKAPSKPSASTKKAEGKLSNSNSKDGNMQTAKPSAMKVGEKLATKSSPVKVGEKRKAADETLCQTKVLLDIFTGVRLYLPPSTPDFSRLRRYFVAFDGDLVQEFDMTSATHVLGSRDKNPAAQQVSPEWIWACIRKRRLVAPC

SEQ ID NO: 42666 - protein, 211 aa, Homo sapiens [sequence omitted]

SEQ ID NO: 42667 - protein, 101 aa, Homo sapiens
MRPRPAGRAEARRRRRLRGNPPPEGIWKNCNQNIISLRKFWVTEVLDNRAYQFNHHELELPDSPARGDSQPFHICGEDLAHCSDCLPDRPYSCRRRIHLLR

SEQ ID NO: 42668 - protein, 741 aa, Homo sapiens [sequence omitted]

SEQ ID NO: 42669 - protein, 290 aa, Homo sapiens
MPVQLTSRREIRKIMGVEEEDDDDDDDDNLPQLKKESELPFVPNYLANPAFPFIYTPTAEDSAQMQNGGPSTPPASPPADGSPPLLPPGEPPLLGTFPRDHTSLALVQNGDVSAPSAILRTPESTKPGPVCQPPVSQSRSLFSSVPSKPPMSLEPQNGTYAGPAPAFQPFFFTGAFPFNMQELVLKVRIQNPSLRENDFIEIELDRQELTYQELLRVCCCELGVNPDQVEKIRKLPNTLLRKDKDVARLQDFQELELVLMISENNFLFRNAASTLTERPCYNRRASKLTY

SEQ ID NO: 42670 - protein, 946 aa, Homo sapiens [sequence omitted]

SEQ ID NO: 42671 - protein, 36 aa, Homo sapiens
MNMIQKLQKQTDLELSPLTKEEKTAAEQFKFHMPDL

SEQ ID NO: 42672 - protein, 620 aa, Homo sapiens
MLAKPRLDTEQLAQRGAGLCFTFVSAQQNSPSSTGSGNTEHSCSSQKQISIQHRQTQSDLTIEKISALENSKNSDLEKKEGRIDDLLRANCDLRRQIDEQQKMLEKYKERLNRCVTMSKKLLIEKSKQEKMACRDKSMQDRLRLGHFTTVRHGASFTEQWTDGYAFQNLIKQQERINSQREEIERQRKMLAKRKPPAMGQAPPATNEQKQRKSKTNGAENETPSSGNTELKDTAPALGAHSLLRLTLAEYHEQEEIFKLRLGHLKKEEAEIQAELERLERVRNLHIRELKRIHNEDNSQFKDHPTLNDRYLLLHLLGRGGFSEVYKAFDLTEQRYVAVKIHQLNKNWRDEKKENYHKHACREYRIHKELDHPRIVKLYDYFSLDTDSFCTVLEYCEGNDLDFYLKQHKLMSEKEARSIIMQIVNALKYLNEIKPPIIHYDLKPGNILLVNGTACGEIKITDFGLSKIMDDDSYNSVDGMELTSQGAGTYWYLPPECFVVGKEPPKISNKVDVWSVGVIFYQCLYGRKPFGHNQSQQDILQENTILKATEVQFPPKPVVTPEAKAFIRRCLAYRKEDRIDVQQLACDPYLLPHIRKSVSTSSPAGAAIASTSGASNNSSSN

SEQ ID NO: 42673 - protein, 598 aa, Homo sapiens [sequence omitted]

SEQ ID NO: 42674 - protein, 424 aa, Homo sapiens
MWGCCVCGALFEGQRLRLLRAPGDGLSSPFTVVSRKWHLGHHGSYHPNFRGFDYYFGIPYSHDMGCTDTPGYNHPPCPACPQGDGPSRNLQRDCYTDVALPLYENLNIVEQPVNLSSLAQKYAEKATQFIQRASTSGRPFLLYVALAHMHVPLPVTQLPAAPRGRSLYGAGLWEMDSLVGQIKDKVDHTVKENTFLWFTGDNGPWAQKCELAGSVGPFTGFWQTRQGGSPAKQTTWEGGHRVPALAYWPGRVPVNVTSTALLSVLDIFPTVVALAQASLPQGRRFDGVDVSEVLFGRSQPGHRVLFHPNSGAAGEFGALQTVRLERYKAFYITGGARACDGSTGPELQHKFPLIFNLEDDTAEAVPLERGGAEYQAVLPEVRKVLADVLQDIANDNISSADYTQDPSVTPCCNPYQIACRCQAA

SEQ ID NO: 42675 - protein, 414 aa, Homo sapiens
MYSTNEEQVQEIEYLTKQLDTLRHVNEQHAKVYEQLDLTARDLELTNHRLVLESKAAQQKIHGLTETIERLQAQVEELQAQVEQLRGLEQLRVLREKRERRRTIHTFPCLKELCTSPRCKDAFRLHSSSLELGPRPLEQENERLQTLVGALRSQVSQERQRKERAEREYTAVLQEYSELERQLCEMEACRLRVQELEAELLELQQMKQAKTYLLGPDDHLAEALLAPLTQAPEADDPQPGRGDDLGAQDGVSSPAASPGHVVRKSCSDTALNAIVAKDPASRHAGNLTLHANSVRKRGMSILREVDEQYHALLEKYEELLSKCRQHGAGVRHAGVQTSRPISRDSSWRDLRGGEEGQGEVKAGEKSLSQHVEAVDKRLEQSQPEYKALFKEIFSRIQKTKADINATKVKTHSSK

SEQ ID NO: 42676 - protein, 425 aa, Homo sapiens
MGFSEQGRQRLHPEEALYLLECGSIHLFHQDLPLSIQEAYQLLLTDHTVTFLQYQVFSHLKRLGYVVRRFQPSSVLSPYERQLNLDASVQHLEDGDGKRKRSSSSPRSINKKAKALDNSLQPKSLAASSPPPCSQPSQCPEEKPQESSPMKGPGGPFQLLGSLGPSPGPAREGVGCSWESGRAENGVTGAGKRRWNFEQISFPNMASDSRHTLLRAPAPELLPANVAGRETDAESWCQKLNQRKEKLSRREREHHAEAAQFQEDVNADPEVQRCSSWREYKELLQRRQVQRSQRRAPHLWGQPVTPLLSPGQASSPAVVLQHISVLQTTHLPDGGARLLEKSGGLEIIFDVYQADAVATFRKNNPGKPYARMCISGFDEPVPDLCSLKRLSYQSGDVPLIFALVDHGDISFYSFRDFTLPQDVGH

SEQ ID NO: 42677 - protein, 217 aa, Homo sapiens
MALNKNHSEGGGVIVNNTESILMSYDHVELTFNDMKNVPEAFKGTKKGTVYLTPYRVIFLSKGKDAMQSFMMPFYLMKDCEIKQPVFGANYIKGTVKAEAGASRGEVPSGAYGYSYMPSGAYVYPPPVANGMYPCPPGYPYPPPPPEFYPGPPMMDGAMGYVQPPPPPYPGPMEPPVSGPDVPSTPAGEGPWVLAALRDQPSPPRCRTESLRMARDC

SEQ ID NO: 42678 - protein, 400 aa, Homo sapiens
MDELGAGIAQSRRTVALIKSAAVAERERVSRLFADAAAALQGFQTQVLGFIEEGEAAMLGRSQGDLRRQEEQRSRLSRARQNLSQVPEADSVSFLQELLALRLALEDGCGPGPGPPRELSFTKSSQAVRAVRDMLAVACVNQWEQLRGPGGNEDGPQKLDSEADAEPQDLESTNLLESEAPRDYFLKFAYIVDLDSDTADKFLQLFGTKGVKRVLCPINYPLSPTRFTHCEQVLGEGALDRGTYYWEVEIIEGWVSMGVMAEDFSPQEPYDRGRLGRNAHSCCLQWNGRSFSVWFHGLEAPLPHPFSPTVGVCLEYADRALAFYAVRDGKMSLLRRLKASRPRRGGIPASPIDPFQSRLDSHFAGLFTHRLKPAFFLESVDAHLQIGPLKKSCISVLKRR

SEQ ID NO: 42679 - protein, 346 aa, Homo sapiens
MPNSDIDLSNLERLEKYRSFDRYRRRAEQEAQAPHWWRTYREYFGEKTDPKEKIDIGLPPPKVSRTQQLLERKQAIQELRANVEEERAARLRTASVPLDAVRAEWERTCGPYHKQRLAEYYGLYRDLFHGATFVPRVPLHVAYAVGEDDLMPVYCGNEVTPTEAAQAPEVTYEAEEGSLWTLLLTSLDGHLLEPDAEYLHWLLTNIPGNRVAEGQVTCPYLPPFPARGSGIHRLAFLLFKQDQPIDFSEDARPSPCYQLAQRTFRTFDFYKKHQETMTPAGLSFFQCRWDDSVTYIFHQLLDMREPVFEFVRPPPYHPKQKRFPHRQPLRYLDRYRDSHEPTYGIY

SEQ ID NO: 42680 - protein, 116 aa, Homo sapiens
MKKEALTKSDSGSQPRGHRENRRETGWSGVRLFWANPFAGGPGEKAGHRSPGLSVLSLAPHRLPQVPYFVPNTPAARADLAAQYTTVGRMDQGGLAEPGTGGGATAGVPHPGPAPS

SEQ ID NO: 42681 - protein, 52 aa, Homo sapiens
MRRRPCRPRGSWRSSGAPTAACAGRVGPSPRRLSCSSCTSFPGAGWTWPRKA

SEQ ID NO: 42682 - protein, 923 aa, Homo sapiens
MARNEVIADINCKGRSKSNLGWTPLHLACYFGHRQVVQDLLKAGAEVNVLNDMGDTPLHRAAFTGRKELVMLLLEYNADTTIVNGSGQTAKEVTHAEEIRSMLEAVERTQQRKLEELLLAAAREGKTTELTALLNRPNPPDVNCSDQLGNTPLHCAAYRAHKQCALKLLRSGADPNLKNKNDQKPLDLAQGAEMKHILVGNKVIYKALKRYEGPLWKSSRFFGWRLFWVVLEHGVLSWYRKQPDAVHNIYRQGCKHLTQAVCTVKSTDSCLFFIKCFDDTIHGFRVPKNSLQQSREDWLEAIEEHSAYSTHYCSQDQLTDEEEEDTVSAADLKKSLEKAQSCQQRLDREISNFLKMIKECDMAKEMLPSFLQKVEVVSEASRETCVALTDCLNLFTKQEGVRNFKLEQEQEKNKILSEALETLATEHHELEQSLVKGSPPASILSEDEFYDALSDSESERSLSRLEAVTARSFEEEGEHLGSRKHRMSEEKDCGGGDALSNGIKKHRTSLPSPMFSRNDFSIWSILRKCIGMELSKITMPVIFNEPLSFLQRLTEYMEHTYLIHKASSLSDPVERMQCVAAFAVSAVASQWERTGKPFNPLLGETYELVRDDLGFRLISEQVSHHPPISAFHAEGLNNDFIFHGSIYPKLKFWGKSVEAEPKGTITLELLEHNEAYTWTNPTCCVHNIIVGKLWIEQYGNVEIINHKTGDKCVLNFKPCGLFGKELHKVEGYIQDKSKKKLCALYGKWTECLYSVDPATFDAYKKNDKKNTEEKKNSKQMSTSEELDEMPVPDSESVFIIPGSVLLWRIAPRPPNSAQMYNFTSFAMVLNEVDKDMESVIPKTDCRLRPDIRAMENGEIDQASEEKKRLEEKQRAARKNRSKSEEDWKTRWFHQGPNPYNGAQDWIYSGSYWDRNYFNLPDIY

SEQ ID NO: 42683 - protein, 1175 aa, Homo sapiens [sequence omitted]

SEQ ID NO: 42684 - protein, 1359 aa, Homo sapiens
MDRDYPQHEPPPAGSLLYSPPPLQSAMLHCPYWNTFSLPPYPAFSSDSRPFMSSASFLGSQPCPDTSYAPVATASSLPPKTCDFAQDSSYFEDFSNISIFSSSVDSLSDIVDTPDFLPADSLNQVSTIWDDNPAPSTHDKLFQLSRPFAGFEDFLPSHSTPLLVSYQEQSVQSQPEEEDEAEEEEAEELGHTETYADYVPSKSKIGKQHPDRVVETSTLSSVPPPDITYTLALPSDSGALSALQLEAITYACQQHEVLLPSGQRAGFLIGDGAGVGKGRTVAGVILENHLRGRKKALWFSVSNDLKYDAERDLRDIEATGIAVHALSKIKYGDTTTSEGVLFATYSALIGESQAGGQHRTRLRQILDWCGEAFEGVIVFDECHKAKNAGSTKMGKAVLDLQNKLPLARVVYASATGASEPRNMIYMSRLGIWGEGTPFRNFEEFLHAIEKRGVGAMEIVAMDMKVSGMYIARQLSFSGVTFRIEEIPLAPAFECVYNRAALLWAEALNVFQQAADWIGLESRKSLWGQFWSAHQRFFKYLCIAAKVRRLVELAREELARDKCVVIGLQSTGEARTREVLGENDGHLNCFVSAAEGVFLSLIQKHFPSTKRKRDRGAGSKRKRRPRGRGAKAPRLACETAGVIRISDDSSTESDPGLDSDFNSSPESLVDDDVVIVDAVGLPSDDRGPLCLLQRDPHGPGVLERVERLKQDLLDKVRRLGRELPVNTLDELIDQLGGPQRVAEMTGRKGRVVSRPDGTVAFESRAEQGLSIDHVNLREKQRFMSGEKLVAIISEASSSGVSLQADRRVQNQRRRVHMTLELPWSADRAIQQFGRTHRSNQVSAPEYVFLISELAGERRFASIVAKRLESLGALTHGDRRATESRDLSKYNFENKYGTRALHCVLTTILSQTENKVPVPQGYPGGVPTFFRDMKQGLLSVGIGGRESRNGCLDVEKDCSITKFLNRILGLEVHKQNALFQYFSDTFDHLIEMDKREGKYDMGILDLAPGIEEIYEESQQVFLAPGHPQDGQVVFYKISVDRGLKWEDAFAKSLALTGPYDGFYLSYKVRGNKPSCLLAEQNRGQFFTVYKPNIGRQSQLEALDSLRRKFHRVTAEEAKEPWESGYALSLTHCSHSAWNRHCRLAQEGKDCLQGLRLRHHYMLCGALLRVWGRIAAVMADVSSSSYLQIVRLKTKDRKKQVGIKIPEGCVRRVLQELRLMDADVKRRQAPALGCPAPPAPRPLALPCGPGEVLDLTYSPPAEAFPPPPHFSFPAPLSLDAGPGVVPLGTPDAQADPAALAHQGCDINFKEVLEDMLRSLHAGPPSEGALGEGAGAGGAAGGGPERQSVIQFSPPFPGAQAPL

SEQ ID NO: 42685 - protein, 260 aa, Homo sapiens
MLLCLAGPASGPRSLAELLPRPAVDPRGLGQPFLVPVPARPPLTRGQFEEARAHWPTSFHEDKQVTSALAGRLFSTQERAAMQSHMERAVWAARRAAARGLRAVGAVVVDPASDRVLATGHDCSCADNPLLHAVMVCVDLVARGQGRGTYDFRPFPACSFAPAAAPQAVRAGAVRKLDADEDGLPYLCTGYDLYVTREPCAMCAMALVHARILRVFYGAPSPDGALGTRFRIHARPDLNHRFQVFRGVLEEQCRWLDPDT

SEQ ID NO: 42686 - protein, 560 aa, Homo sapiens [sequence omitted]

SEQ ID NO: 42687 - protein, 377 aa, Homo sapiens [sequence omitted]

SEQ ID NO: 42688 - protein, 146 aa, Homo sapiens [sequence omitted]

SEQ ID NO: 42689 - protein, 154 aa, Homo sapiens
MKKELNYFAEALESPERPFLAILGRTKVADKIQLIKNMLGKVNEMIIGSGMACTFLKVLSNMEIGTSLFDEEGAKTVKDLMSKAEKNGVKIILPVDFVTAGKFDENTKTGQATVASGIPAGWLGLDCGPESSKKYAGAVTQAKQIVWNGPVGGF

SEQ ID NO: 42690 - protein, 343 aa, Homo sapiens [sequence omitted]

SEQ ID NO: 42691 - protein, 213 aa, Homo sapiens [sequence omitted]

SEQ ID NO: 42692 - protein, 365 aa, Homo sapiens
MVPHLETDMMQGGVYGSGGERYDSYESCDSRAVLSERDLYRSGYDYSELDPEMEMAYEGQYDAYRDQFRMRGNDTFGPRAQGWARDARSGRPMASGYGRMWEDPMGARGQCMSGASRLPSLFSQNIIPEYGMFQGMRGGGAFPGGSRFGFGFGNGMKQMRRTWKTWTTADFRTKKKKRKQGGSPDEPDSKATRTDCSDNSDSDNDEGTEGEATEGLEGTEAVEKGSRVDGEDEEGKEDGREEGKEDPEKGALTTQDENGQTKRKLQAGKKSQDKQKKRQRDRMVERAPALALASSASDSCSCWTFLSLAGARPLGSPDKADPVAQIRTSGRGSSLCVLCANTGPSMRTRWPAILTASSTRNTLST

SEQ ID NO: 42693 - protein, 294 aa, Homo sapiens
MTFTKTSQKFGQWADSRANTVYGLGFASEQHLTQFAEKFQEVKEAARLAREKSQDGGELTSPALGLASHQVPPSPLVSANGPGEEKLFRSQSADAPGPTERERLKKMLSEGSVGEVQWEAEFFALQDSNNKLAGALREANAAAAQWRQQLEAQRAEAERLRQRVAELEAQAASEVTPTGEKEGLGQGQSLEQLEALVQTKDQEIQTLKSQTGGPREALEAAEREETQQKVQDLETRNAELEHQLRAMERSLEEARAERERARAEVGRAAQLLDVSLFELSELREGLARLAEAAP

SEQ ID NO: 42694 - protein, 653 aa, Homo sapiens
MSLWPWPTGRTSTPYPEARMTEEACRTRSQKRALERDPTEDDVESKKIKMERGLLASDLNTDGDMRVTPEPGAGPTQGLLRATEATAMAMGRGEGLVGDGPVDMRTSHSDMKSERRPPSPDVIVLSDNEQPSSPRVNGLTTVALKETSTEALMKSSPEERERMIKQLKEELRLEEAKLVLLKKLRQSQIQKEATAQKPTGSVGSTVTTPPPLVRGTQNIPAGKPSLQTSSARMPGSVIPPPLVRGGQQASSKLGPQASSQVVMPPLVRGAQQIHSIRQHSSTGPPPLLLAPRASVPSVQIQGQRIIQQGLIRVANVPNTSLLVNIPQPTPASLKGTTATSAQANSTPTSVASVVTSAESPASRQAAAKLALRKQLEKTLLEIPPPKPPAPEMNFLPSAANNEFIYLVGLEEVVQNLLETQAGRMSAATVLSREPYMCAQCKTDFTCRWREEKSGAIMCENCMTTNQKKALKVEHTSRLKAAFVKALQQEQEIEQRLLQQGTAPAQAKAEPTAAPHPVLKQVIKPRRKLAFRSGEARDWSNGAVLQASSQLSRGSATTPRGVLHTFSPSPKLQNSASATALVSRTGRHSERTVSAGKGSATSNWKKTPLSTGGTLAFVSPSLAVHKSSSAVDRQREYLLDMIPPRSIPQSATWK

SEQ ID NO: 42695 - protein, 535 aa, Homo sapiens
MDLRQACRTPSRDEAGVELLMTYFIQLGFVESRFFPPTRQMGLLFTWYDSLTGVPVSQQNLLLEKASVLFNTGALYTQIGTRCDRQTQAGLESAIDAFQRAAGVLNYLKDTFTHTPSYDMSPAMLSVLVKMMLAQAQESVFEKISLPGIRNEFFMLVKVAQEAAKVGEVYQQLHAAMSQAPVKENIPYSWASLACVKAHHYAALAHYFTAILLIDHQVKPGTDLDHQEKCLSQLYDHMPEGLTPLATLKNDQQRRQLGKSHLRRAMAHHEESVREASLCKKLRSIEVLQKVLCAAQERSRLTYAQHQEEDDLLNLIDAPSVVAKTEQEVDIILPQFSKLTVTDFFQKLGPLSVFSANKRWTPPRSIRFTAEEGDLGFTLRGNAPVQVHFLDPYCSASVAGAREGDYIVSIQLVDCKWLTLSEVMKLLKSFGEDEIEMKVVSLLDSTSSMHNKSATYSVGMQKTYSMICLAIDDDDKTDKTKKISKKLSFLSWGTNKNRQKSASTLCLPSVGAARPQVKKKLPSPFSLLNSDSSWY

SEQ ID NO: 42696 - protein, 131 aa, Homo sapiens
MQSWYSMLSPTYKQRNEDFRKLFSKLPEAERLIVDYSCALQREILLQGRLYLSENWICFYSNIFRWETTISIQLKEVTCLKKEKTAKLIPNAIQICTESEKVTEDPVTGPRGPPLSRPPPPNMQSPICSAP

SEQ ID NO: 42697 - protein, 646 aa, Homo sapiens
MQSWYSMLSPTYKQRNEDFRKLFSKLPEAERLIVDYSCALQREILLQGRLYLSENWICFYSNIFRWETTISIQLKEVTCLKKEKTAKLIPNAIQICTESEKHFFTSFGARDRCFLLIFRLWQNALLEKTLSPRELWHLVHQCYGSELGLTSEDEDYVSPLQLNGLGTPKEVGDVIALSDITSSGAADRSQEPSPVGSRRGHVTPNLSRASSDADHGAEEDKEEQVDSQPDASSSQTVTPVAEPPSTEPTQPDGPTTLGPLDLLPSEELLTDTSNSSSSTGEEADLAALLPDLSGRLLINSVFHVGAERLQQMLFSDSPFLQGFLQQCKFTDVTLSPWSGDSKCHQRRVLTYTIPISNPLGPKSASVVETQTLFRRGPQAGGCVVDSEVLTQGIPYQDYFYTAHRYCILGLARNKARLRVSSEIRYRKQPWSLVKSLIEKNSWSGIEDYFHHLERELAKAEKLSLEEGGKDARGLLSGLRRRKRPLSWRAHGDGPQHPDPDPCARAGIHTSGSLSSRFSEPSVDQGPGAGIPSALVLISIVLIILIALNVLLFYRLWSLERTAHTFESWHSLALAKGKFPQTATEWAEILALQKQFHSVEVHKWRQILRASVELLDEMKFSLEKLHQGITVSDPPFDTQPRPDDSFS

SEQ ID NO: 42698 - protein, 705 aa, Homo sapiens
MRVPALLVLLFCFRGRAGPSPHFLQQPEDLVVLLGEEARLPCALGAYWGLVQWTKSGLALGGQRDLPGWSRYWISGNAANGQHDLHIRPVELEDEASYECQATQAGLRSRPAQLHVLVPPEAPQVLGGPSVSLVAGVPANLTCRSRGDARPTPELLWFRDGVLLDGATFHQTLLKEGTPGSVESTLTLTPFSHDDGATFVCRARSQALPTGRDTAITLSLQYPPEVTLSASPHTVQEGEKVIFLCQATAQPPVTGYRWAKGGSPVLGARGPRLEVVADASFLTEPVSCEVSNAVGSANRSTALDVLFGPILQAKPEPVSVDVGEDASFSCAWRGNPLPRVTWTRRGGAQVLGSGATLRLPSVGPEDAGDYVCRAEAGLSGLRGGAAEARLTVNAPPVVTALHSAPAFLRGPARLQCLVFASPAPDAVVWSWDEGFLEAGSQGRFLVETFPAPESRGGLGPGLISVLHISGTQESDFSRSFNCSARNRLGEGGAQASLGRRDLLPTVRIVAGVAAATTTLLMVITGVALCCWRHSKASASFSEQKNLMRIPGSSDGSSSRGPEEEETGSREDRGPIVHTDHSDLVLEEEGTLETKDPTNGYYKVRGVSVSLSLGEAPGGGLFLPPPSPLGPPGTPTFYDFNPHLGMVPPCRLYRARAGYLTTPHPRAFTSYIKPTSFGPPDLAPGTPPFPYAAFPTPSHPRLQTHV

SEQ ID NO: 42699 - protein, 409 aa, Homo sapiens
MFRNHLCLVFELLSYNLYDLLRNTHFRGVSLNLTRKLAQQLCTALLFLATPELSIIHCDLKPENILLCNPKRSAIKIVDFGSSCQLGQRIYQYIQSRFYRSPEVLLGTPYDLAIDMWSLGCILVEMHTGEPLFSGSNEVDQMNRIVEVLGIPPAAMLDQAPKARKYFERLPGGGWTLRRTKELRKDLVLRMLEYEPAARISPLGALQHGFFRRTADEATNTGPAGSSASTSPAPLDTCPSSSTASSISSSGGSSGSSSDNRTYRYSNRYCGGPGPPITDCEMNSPQVPPSQPLRPWAGGDVPHKTHQAPASASSLPGTGAQLPPQPRYLGRPPSPTSPPPPELMDVSLVGGPADCSPPHPAPAPQHPAASALRTRMTGGRPPLPPPDDPATLGPHLGLRGVPQSTAASS

SEQ ID NO: 42700 - protein, 288 aa, Homo sapiens
MNEVSVIKEGWLHKRGEYIKTWRPRYFLLKSDGSFIGYKERPEAPDQTLPPLNNFSVAECQLMKTERPRPNTFVIRCLQWTTVIERTFHVDSPDEREEWMRAIQMVANSLKQRAPGEDPMDYKCGSPSDSSTTEEMEVAVSKARAKVTMNDFDYLKLLGKGTFGKVILVREKATGRYYAMKILRKEVIIAKDEVAHTVTESRVLQNTRHPFLTVSCPPLPRQCEASLWTELRERALIFWYKAQSWGRPGGQGKVLLRPAKSSEPRHVVGVSRLGEWEGDSFFIDGGFM

SEQ ID NO: 42701 - protein, 428 aa, Homo sapiens [sequence omitted]

SEQ ID NO: 42702 - protein, 1588 aa, Homo sapiens
MFVWTNVEPRSVAVFPWHSLVPFLAPSQPDPSVQPSEAQQPASHPVASNQSKEPAESAAVAHERPPGGTGSADPERPPGATCPESPGPGPPHPLGVVESGKGPPPTTEEEASGPPGEPRLDSETESDHDDAFLSIMSPEIQLPLPPGKRRTQSLSALPKERDSSSEKDGRSPNKREKDHIRRPMNAFMIFSKRHRALVHQRHPNQDNRTVSKILGEWWYALGPKEKQKYHDLAFQVKEAHFKAHPDWKWCNKDRKKSSSEAKPTSLGLAGGHKETRERSMSETGTAAAPGVSSELLSVAAQTLLSSDTKAPGSSSCGAERLHTVGGPGSARPRAFSHSGVHSLDGGEVDSQALQELTQMVSGPASYSGPKPSTQYGAPGPFAAPGEGGALAATGRPPLLPTRASRSQRAASEDMTSDEERMVICEEEGDDDVIADDGFGTTDIDLKCKERVTDSESGDSSGEDPEGNKGFGRKVFSPVIRSSFTHCRPPLDPEPPGPPDPPVAFGKGYGSAPSSSASSPASSSASAATSFSLGSGTFKAQESGQGSTAGPLRPPPPGAGGPATPSKATRFLPMDPATFRRKRPESVGGLEPPGPSVIAAPPSGGGNILQTLVLPPNKEEQEGGGARVPSAPAPSLAYGAPAAPLSRPAATMVTNVVRPVSSTPVPIASKPFPTSGRAEASPNDTAGARTEMGTGSRVPGGSPLGVSLVYSDKKSAAATSPAPHLVAGPLLGTVGKAPATVTNLLVGTPGYGAPAPPAVQFIAQGAPGGGTTAGSGAGAGSGPNGPVPLGILQPGALGKAGGITQVQYILPTLPQQLQVAPAPAPAPGTKAAAPSGPAPTTSIRFTLPPGTSTNGKVLAATAPTPGIPILQSVPSAPPPKAQSVSPVQAPPPGGSAQLLPGKVLVPLAAPSMSVRGGGAGQPLPLVSPPFSVPVQNGAQPPSKIIQLTPVPVSTPSGLVPPLSPATLPGPTSQPQKVLLPSSTRITYVQSAGGHALPLGTSPASSQAGTVTSYGPTSSVALGFTSLGPSGPAFVQPLLSAGQAPLLAPGQVGVSPVPSPQLPPACAAPGGPVITAFYSGSPAPTSSAPLAQPSQAPPSLVYTVATSTTPPAATILPKGPPAPATATPAPTSPFPSATAGSMTYSLVAPKAQRPSPKAPQKVKAAIASIPVGSFEAGASGRPGPAPRQPLEPGPVREPTAPESELEGQPTPPAPPPLPETWTPTARSSPPLPPPAEERTSAKGPETMASKFPSSSSDWRVPGQGLENRGEPPTPPSPAPAPAVAPGGSSESSSGRAAGDTPERKEAAGTGKKVKVRPPPLKKTFDSVDNRVLSEVDFEERFAELPEFRPEEVLPSPTLQSLATSPRAILGSYRKKRKNSTDLDSAPEDPTSPKRKMRRRSSCSSEPNTPKSAKCEGDIFTFDRTGTEAEDVLGELEYDKVPYSSLRRTLDQRRALVMQLFQDHGFFPSAQATAAFQARYADIFPSKVCLQLKIREVRQKIMQAATPTEQPPGAEAPLPVPPPTGTAAAPAPTPSPAGGPDPTSPSSDSGTAQAAPPLPPPPESGPGQPGWEGAPQPSPPPPGPSTAATGR

SEQ ID NO: 42703 - protein, 2837 aa, Homo sapiens
MALVLALAVLGSLSPGARAGDCKGQRQVLREAPGFVTDGAGNYSVNGNCEWLIEAPSPQHRILLDFLFLDTECTYDYLFVYDGDSPRGPLLASLSGSTRPPPIEASSGKMLLHLFSDANYNLLGFNASFRFSLCPGGCQSHGQCQPPGVCACEPGWGGPDCGLQECSAYCGSHGTCASPLGPCRCEPGFLGRACDLHLWENQGAGWWHNVSARDPAFSARIGAAGAFLSPPGLLAVFGGQDLNNALGDLVLYNFSANTWESWDLSPAPAARHSHVAVAWAGSLVLMGGELADGSLTNDVWAFSPLGRGHWELLAPPASSSSGPPGLAGHAAALVDDVWLYVSGGRTPHDLFSSGLFRFRLDSTSGGYWEQVIPAGGRPPAATGHSMVFHAPSRALLVHGGHRPSTARFSVRVNSTELFHVDRHVWTTLKGRDGLQGPRERAFHTASVLGNYMVVYGGNVHTHYQEEKCYEDGIFFYHLGCHQWVSGAELAPPGTPEGRAAPPSGRYSHVAAVLGGSVLLVAGGYSGRPRGDLMAYKVPPFVFQAPAPDYHLDYCSMYTDHSVCSRDPECSWCQGACQAAPPPGTPLGACPAASCLGLGRLLGDCQACLAFSSPTAPPRGPGTLGWCVHNESCLPRPEQARCRGEQISGTVGWWGPAPVFVTSLEACVTQSFLPGLHLLTFQQPPNTSQPDKVSIVRSTTITLTPSAETDVSLVYRGFIYPMLPGGPGGPGAEDVAVWTRAQRLHVLARMARGPDTENMEEVGRWVAHQEKETRRLQRPGSARLFPLPGRDHKYAVEIQGQLNGSAGPGHSELTLLWDRTGVPGGSEISFFFLEPYRSSSCTSYSSCLGCLADQGCGWCLTSATCHLRQGGAHCGDDGAGGSLLVLVPTLCPLCEEHRDCHACTQDPFCEWHQSTSRKGDAACSRRGRGRGALKSPEECPPLCSQRLTCEDCLANSSQCAWCQSTHTCFLFAAYLARYPHGGCRGWDDSVHSEPRCRSCDGFLTCHECLQSHECGWCGNEDNPTLGRCLQGDFSGPLGGGNCSLWVGEGLGLPVALPARWAYARCPDVDECRLGLARCHPRATCLNTPLSYECHCQRGYQGDGISHCNRTCLEDCGHGVCSGPPDFTCVCDLGWTSDLPPPTPAPGPPAPRCSRDCGCSFHSHCRKRGPGFCDECQDWTWGEHCERCRPGSFGNATGSRGCRPCQCNGHGDPRRGHCDNLSGLCFCQDHTEGAHCQLCSPGYYGDPRAGGSCFRECGGRALLTNVSSVALGSRRVGGLLPPGGGAARAGPGLSYCVWVVSATEELQPCAPGTLCPPLTLTFSPDSSTPCTLSYVLAFDGFPRFLDTGVVQSDRSLIAAFCGQRRDRPLTVQALSGLLVLHWEANGSSSWGFNASVGSARCGSGGPGSCPVPQECVPQDGAAGAGLCRCPQGWAGPHCRMALCPENCNAHTGAGTCNQSLGVCICAEGFGGPDCATKLDGGQLVWETLMDSRLSADTASRFLHRLGHTMVDGPDATLWMFGGLGLPQGLLGNLYRYSVSERRWTQMLAGAEDGGPGPSPRSFHAAAYVPAGRGAMYLLGGLTAGGVTRDFWVLNLTTLQWRQEKAPQTVELPAVAGHTLTARRGLSLLLVGGYSPENGFNQQLLEYQLATGTWVSGAQSGTPPTGLYGHSAVYHEATDSLYVFGGFRFHVELAAPSPELYSLHCPDRTWSLLAPSQGAKRDRMRNVRGSSRGLGQVPGEQPGSWGFREVRKKMALWAALAGTGGFLEEISPHLKEPRPRLFHASALLGDTMVVLGGRSDPDEFSSDVLLYQVNCNAWLLPDLTRSASVGPPMEESVAHAVAAVGSRLYISGGFGGVALGRLLALTLPPDPCRLLSSPEACNQSGACTWCHGACLSGDQAHRLGCGGSPCSPMPRSPEECRRLRTCSECLARHPRTLQPGDGEASTPRCKWCTNCPEGACIGRNGSCTSENDCRINQREVFWAGNCSEAACGAADCEQCTREGKCMWTRQFKRTGETRRILSVQPTYDWTCFSHSLLNVSPMPVESSPPLPCPTPCHLLPNCTSCLDSKGADGGWQHCVWSSSLQQCLSPSYLPLRCMAGGCGRLLRGPESCSLGCAQATQCALCLRRPHCGWCAWGGQDGGGRCMEGGLSGPRDGLTCGRPGASWAFLSCPPEDECANGHHDCNETQNCHDQPHGYECSCKTGYTMDNMTGLCRPVCAQGCVNGSCVEPDHCRCHFGFVGRNCSTECRCNRHSECAGVGARDHCLLCRNHTKGSHCEQCLPLFVGSAVGGGTCRPCHAFCRGNSHICISRKELQMSKGEPKKYSLDPEEIENWVTEGPSEDEAVCVNCQNNSYGEKCESCLQGYFLLDGKCTKCQCNGHADTCNEQDGTGCPCQNNTETGTCQGSSPSDRRDCYKYQCAKCRESFHGSPLGGQQCYRLISVEQECCLDPTSQTNCFHEPKRRALGPGRTVLFGVQPKFTNVDIRLTLDVTFGAVDLYVSTSYDTFVVRVAPDTGVHTVHIQPPPAPPPPPPPADGGPRGAGDPGGAGASSGPGAPAEPRVREVWPRGLITYVTVTEPSAVLVVRGVRDRLVITYPHEHHALKSSRFYLLLLGVGDPSGPGANGSADSQGLLFFRQDQAHIDLFVFFSVFFSCFFLFLSLCVLLWKAKQALDQRQEQRRHLQEMTKMASRPFAKVTVCFPPDPTAPASAWKPAGLPPPAFRRSEPFLAPLLLTGAGGPWGPMGGGCCPPAIPATTAGLRAGPITLEPTEDGMAGVATLLLQLPGGPHAPNGACLGSALVTLRHRLHEYCGGGGGAGGSGHGTGAGRKGLLSQDNLTSMSL

SEQ ID NO: 42704 - protein, 368 aa, Homo sapiens
MAAAWPLLLVALLVLSWPPPGTGDVVVQAPTQVPGFLGDSVTLPCYLQVPNMEVTHVSQLTWARHGESGSMAVFHQTQGPSYSESKRLEFVAARLGAELRNASLRMFGLRVEDEGNYTCLFVTFPQGSRSVDIWLRVLAKPQNTAEVQKVQLTGEPVPMARCVSTGGRPPAQITWHSDLGGMPNTSQVPGFLSGTVTVTSLWILVPSSQVDGKNVTCKVEHESFEKPQLLTVNLTVYYPPEVSISGYDNNWYLGQNEATLTCDARSNPEPTGYNWSTTMGPLPPFAVAQGAQLLIRPVDKPINTTLICNVTNALGARQAELTVQVKEGPPSEHSGTEHASASANGHVSYSAVSRENSSSQDPQTEGTR

SEQ ID NO: 42705 - protein, 413 aa, Homo sapiens
MAAAWPLLLVALLVLSWPPPGTGDVVVQAPTQVPGFLGDSVTLPCYLQVPNMEVTHVSQLTWARHGESGSMAVFHQTQGPSYSESKRLEFVAARLGAELRNASLRMFGLRVEDEGNYTCLFVTFPQGSRSVDIWLRVLAKPQNTAEVQKVQLTGEPVPMARCVSTGGRPPAQITWHSDLGGMPNTSQVPGFLSGTVTVTSLWILVPSSQVDGKNVTCKVEHESFEKPQLLTVNLTVYYPPEVSISGYDNNWYLGQNEATLTCDARSNPEPTGYNWSTTMGPLPPFAVAQGAQLLIRPVDKPINTTLICNVTNALGARQAELTVQVKEGPPSEHSGMSRNAIIFLVLGILVFLILLGIGIYFYWSKCSREVLWHCHLCPSSTEHASASANGHVSYSAVSRENSSSQDPQTEGTR

SEQ ID NO: 42706 - protein, 388 aa, Homo sapiens
MPSGTGKTVSLLALIMAYQRAYPLEVTKLIYCSRTVPEIEKVIEELRKLLNFYEKQEGEKLPFLGLALSSRKNLCIHPEVTPLRFGKDVDGKCHSLTASYVRAQYQHDTSLPHCRFYEEFDAHGREVPLPAGIYNLDDLKALGRRQGWCPYFLARYSILHANVVVYSYHYLLDPKIADLVSKELARKAVVVFDEAHNIDNVCIDSMSVNLTRRTLDRCQGNLETLQKTVLRIKETDEQRLRDEYRRLVEGLREASAARETDAHLANPVLPDEVLQEAVPGSIRTAEHFLGFLRRLLEYVKWRLRVQHVVQESPPAFLSGLAQRVCIQRKPLRFCAERLRSLLHTLEITDLADFSPLTLLANFATLVSTYAKGQAQHCGSSRNQKRSHP

SEQ ID NO: 42707 - protein, 1318 aa, Homo sapiens
MALNTPTSQLLAKQVPVSGYLASAAGPSEPVTLASAGVSPQGAGLVIQKNLSAAVATTLNGNSVFGGAGAASAPTGTPSGQPLAVAPGLGSSPLVPAPNVILHRTPTPIQPKPAGVLPPKLYQLTPKPFAPAGATLTIQGEPGALPQQPKAPQNLTFMAAGKAGQNVVLSGFPAPALQANVFKQPPATTTGAAPPQPPGALSKPMSVHLLNQGSSIVIPAQHMLPGQNQFLLPGAPAVQLPQQLSALPANVGGQILAAAAPHTGGQLIANPILTNQNLAGPLSLGPVLAPHSGAHSAHILSAAPIQVGQPALFQMPVSLAAGSLPTQSQPAPAGPAATTVLQGVTLPPSAVAMLNTPDGLVQPATPAAATGEAAPVLTVQPAPQAPPAVSTPLPLGLQQPQAQQPPQAPTPQAAAPPQATTPQPSPGLASSPEKIVLGQPPSATPTAILTQDSLQMFLPQERSQQPLSAEGPHLSVPASVIVSAPPPAQDPAPATPVAKGAGLGPQAPDSQASPAPAPQIPAAAPLKGPGPSSSPSLPHQAPLGDSPHLPSPHPTRPPSRPPSRPQSVSRPPSEPPLHPCPPPQAPPTLPGIFVIQNQLGVPPPASNPAPTAPGPPQPPLRPQSQPPEGPLPPAPHLPPSSTSSAVASSSETSSRLPAPTPSDFQLQFPPSQGPHKSPTPPPTLHLVPEPAAPPPPPPRTFQMVTTPFPALPQPKALLERFHQVPSGIILQNKAGGAPAAPQTSTSLGPLTSPAASVLVSGQAPSGTPTAPSHAPAPAPMAATGLPPLLPAENKAFASNLPTLNVAKAASSGPGKPSGLQYESKLSGLKKPPTLQPSKEACFLEHLHKHQGSVLHPDYKTAFPSFEDALHRLLPYHVYQGALPSPSDYHKVDEEFETVSTQLLKRTQAMLNKYRLLLLEESRRVSPSAEMVMIDRMFIQEEKTTLALDKQLAKEKPDEYVSSSRSLGLPIAASSEGHRLPGHGPLSSSAPGASTQPPPHLPTKLVIRHGGAGGSPSVTWARASSSLSSSSSSSSAASSLDADEDGPMPSRNRPPIKTYEARSRIGLKLKIKQEAGLSKVVHNTALDPVHQPPPPPATLKVAEPPPRPPPPPPPTGQMNGTVDHPPPAAPERKPLGTAPHCPRLPLRKTYRENVGGPGAPEGTPAGRARGGSPAPLPAKVDEATSGLIRELAAVEDELYQRMLKGPPPEPAASAAQGTGDPDWEAPGLPPAKRRKSESPDVDQASFSSDSPQDDTLTEHLQSAIDSILNLQQAPGRTPAPSYPHAASAGTPASPPPLHRPEAYPPSSHNGGLGARTLTR

SEQ ID NO: 42708 - protein, 870 aa, Homo sapiens
MHLARCRWASAPPLYTLIDVLKYSYVRLVCKDVRAPSRPAVGPPQPGCPAFIIVKLSPLRDRLVVTECQLTHSHPACPLEFAYYFRPGHLLANACLPVRTTNKISKQFVAPADVRRLLSYCKGRDHGVLDALHVLEGLFRTDPEAKVKLVFVEDQAVVETVFFLTSRTRALLRRFPRMLLVDRLPGLQGALDLLAVLCVDGSGRARQAACCVARPGTPSLLRFALASLLQSAPDVKGRVRCLTAGPEVAAQLPAVRQLLPCARVQICRAQGLETLFSKAQELGGAGREDPGLWSRLCRLAGASSPAAYDEALAELHAHGPAAFVDYFERNWEPRRDMWVRFRAFEAARDLDACALVRGHRRRLLRRLSPSRGVAQCLRDLVAMQWADAAGEAVPEGPDGGGPWLEDEPGRGAQGENERVRGLETGDWGGAPKEGSIWRGAQMEKEWARALETRDWGGAQFEGEKGRALQIRDWRGGRLENQKPRGLEGGVLRGSKLEKGHLRGPEIRDWRGPQLEGEKDWGLEGYVWRGSQLEDQALRGLEGYTWRVAQLEDRRSTTDLRGTQFDYERVRSLEGSPWRGAQLHDERAGGLRTAEWKGPQSEVEKGRGLEVRNLRGIPLEKSLELAPENGDQRGPQWEDERRRGPEIAEERGARVGVKRRRGLEDIVLVQLGDTRVTGMENGDGGGARSVGPKSRAGRGMEWGDAGGRCLGLGNGVVSGTPVGTVLEGSPEWAAARSEHLAAGDGLQEGGEDGPREPKRLCRPPGEEEVDWEPLAKFRAACGPELADLVAEELAFARQHGTRGFHWTGAGFALKDGTSDFFLDGALTRCSCSIHAARRLPCRHLFAARLLTGAALFHMDLLRDCWGRAPEP

SEQ ID NO: 42709 - protein, 86 aa, Homo sapiens
MVYHPNIDLEGNVCLNILREDWKPVLTINSIIYGLQYLFLEPNPEDPLNKEAAEVLQNNRRLFEQNVQRSMRGGYIGSTYFERCLK

SEQ ID NO: 42710 - protein, 128 aa, Homo sapiens
MSLAALLIGGFAGLTSTVICRWTRTGTKSTLPISETGGGTPELRCGKHQAVGTSPQRAAAQDSEQVGHTMPHVSSCHRSGWTGSGCRSSSAGAPCIFLFTPCFLVRSAPSSGRFYLQANDSEPECEPA

SEQ ID NO: 42711 - protein, 363 aa, Homo sapiens [sequence omitted]

SEQ ID NO: 42712 - protein, 666 aa, Homo sapiens [sequence omitted]

SEQ ID NO: 42713 - protein, 330 aa, Homo sapiens
MLAKNLLFEKEREAEEKEKSNEIPTKNIEGQMTPYYPVGMGNGTPCSLKQNRPRSSTVMYICHPESKHEILSVAEVTTCEYEVVILTPLLCSHPKYRFRASPVNDIFCQSLPGSPFKPLTLRQLEQQEEILRVPFRRNKEEDLQSTKEERFPAIHKSIAIGSQPVLTVGTTHISKLTDDQLIKEFLSGSYCFRGGVGWWKYEFCYGKHVHQYHEDKDSGKTSVVVGTWNQEEHIEWAKKNTARAYHLQDDGTQTVRMVSHFYGNGDICDITDKPRQVTVKLKCKESDSPHAVTVYMLEPHSCQYILGVESPVICKILDTADENGLLSLPN

SEQ ID NO: 42714 - protein, 276 aa, Homo sapiens
MLAKNLLFEKEREAEEKEKSNEIPTKNIEGQMTPYYPVGMGNGTPCSLKQNRPRSSTVMYICHPESKHEILSVAEVTTCEYEVVILTPLLCSHPKYRFRASPVNDIFCQSLPGSPFKPLTLRQLEQQEEILRVPFRRNKEGVGWWKYEFCYGKHVHQYHEDKDSGKTSVVVGTWNQEEHIEWAKKNTARAYHLQDDGTQTVRMVSHFYGNGDICDITDKPRQVTVKLKCKESDSPHAVTVYMLEPHSCQYILGVESPVICKILDTADENGLLSLPN

SEQ ID NO: 42715 - protein, 125 aa, Homo sapiens
MRPGKKVLVMGIVDLNPESFAISLTCGDSEDPPADVAIELKAVFTDRQLLRNSCISGERGEEQSAIPYFPFIPDQPFRVEILCEHPRFRVFVDGHQLFDFYHRIQTLSAIDTIKINGDLQITKLG

SEQ ID NO: 42716 - protein, 721 aa, Homo sapiens [sequence omitted]

SEQ ID NO: 42717 - protein, 350 aa, Homo sapiens [sequence omitted]

SEQ ID NO: 42718 - protein, 199 aa, Homo sapiens
MGSPFALQNTITSGIVSSAQRPARDLGLPQTNVEYIQTDAAIDFGNSGGPLVNLDGEVIGVNTMKVTAGISFAIPSDRLREFLHRGEKKNSSSGISGSQRRYIGVMMLTLSPSILAELQLREPSFPDVQHGVLIHKVILGSPAHRAGLRPGDVILAIGEQMVQNAEDVYEAVRTQSQLAVQIRRGRETLTLYVTPEVTE

SEQ ID NO: 42719 - protein, 129 aa, Homo sapiens
MNECERHVIFARTDADAPPPPEDWEEHVNRTGWTMAQNKLFNKILKALQSDRLARLANEGACNEPVLRRVAVDKCARRVRQALASVSWDTKLIQWLHTTLVETLSLPMLAAYLDALQTLKGKVILTFCG

SEQ ID NO: 42720 - protein, 908 aa, Homo sapiens
MFLNLDEVFKVMEQLADVTLRRLLDNEVFDLDPDLQEPSQITKRDLEARAQNEFFRAFFRLPRKEKLHAVVDCSLWTPFSRCHTTGRMFASDSYICFASREDGCCKIILPLREVVSIEKMEDTSLLPHPIIVSIRSKVAFQFIELRDRDSLVEALLARLKQVHANHPVHYDTSADDDMASLVFHSTSMCSDHRFGDLEMMSSQNSEESEKEKSPLMHPDALVTAFQQSGSQSPDSRMSREQIKISLWNDHFVEYGRTVCMFRTEKIRKLVAMGIPESLRGRLWLLFSDAVTDLASHPGYYGNLVEESLGKCCLVTEEIERDLHRSLPEHPAFQNETGIAALRRVLTAYAHRNPKIGYCQSMNILTSVLLLYTKEEEAFWLLVAVCERMLPDYFNHRVIGAQVDQSVFEELIKGHLPELAEHMNDLSALASVSLSWFLTLFLSIMPLESAVNVVDCFFYDGIKAIFQLGLAVLEANAEDLCSSKDDGQALMILSRFLDHIKNEDSPGPPVGSHHAFFSDDQEPYPVTDISDLIRDSYEKFGDQSVEQIEHLRYKHRIRVLQGHEDTTKQNVLRVVIPEVSILPEDLEELYDLFKREHMMSCYWEQPRPMASRHDPSRPYAEQYRIDARQFAHLFQLVSPWTCGAHTEILAERTFRLLDDNMDQLIEFKAFVSCLDIMYNGEMNEKIKLLYRLHIPPALTENDRDSQSPLRNPLLSTSRPLVFGKPNGDAVDYQKQLKQMIKDLAKEKDKTEKELPKMSQREFIQFCKTLYSMFHEDPEENDLYQAIATVTTLLLQIGEVGQRGSSSGSCSQECGEELRASAPSPEDSVFADTGKTPQDSQAFPEAAERDWTVSLEHILASLLTEQSLVNFFEKPLDMKSKLENAKINQYNLKTFEMSHQSQSELKLSNL

SEQ ID NO: 42721 - protein, 490 aa, Homo sapiens [sequence omitted]

SEQ ID NO: 42722 - protein, 189 aa, Homo sapiens
MANAAQPEESTKKEGVKDTPQAAKQKNKNLKAGHKNGKQKKMKRKWPGPGNKGSNALLRNSGSQEEDGKPKEKQQHLSQAFINQHTVERKGKQICKYFLERKCIKGDQCKFDHDAEIEKKKEMCKFYVQGYCTRGENCLYLHNEYPCKFYHTGTKCYQGEYCKFSHAPLTPETQELLAKVLDTEKKSCK

SEQ ID NO: 42723 - protein, 103 aa, Homo sapiens
MTAMANEESRLTASSVGQIVGLCSAEIKQIVSEYAEKSELSAEESPEKLGTSQLHRRKVISLNKQIAQKTKHLEELRASHTSLQARYNEAKKTLTERTILIQT

SEQ ID NO: 42724 - protein, 1122 aa, Homo sapiens
MEPETTATTILASVKEQELQFQRLTRELEVERQIVASQLERCRLGAESPSIASTSSTEKSFPWRSTDVPNTGVSKPRVSDAVQPNNYLIRTEPEQGTLYSPEQTSLHESEGSLGNSRSSTQMNSYSDSGYQEAGSFHNSQNVSKADNRQQHSFIGSTNNHVVRNSRAEGQTLVQPSVANRAMRRVSSVPSRAQSPSYVISTGVSPSRGSLRTSLGSGFGSPSVTDPRPLNPSAYSSTTLPAARAASPYSQRPASPTAIRRIGSVTSRQTSNPNGPTPQYQTTARVGSPLTLTDAQTRVASPSQGQVGSSSPKRSGMTAVPQHLGPSLQRTVHDMEQFGQQQYDIYERMVPPRPDSLTGLRSSYASQHSQLGQDLRSAVSPDLHITPIYEGRTYYSPVYRSPNHGTVELQGSQTALYRTGSVGIGNLQRTSSQRSTLTYQRNNYALNTTATYAEPYRPIQYRVQECNYNRLQHAVPADDGTTRSPSIDSIQKDPREFAWRDPELPEVIHMLQHQFPSVQANAAAYLQHLCFGDNKVKMEVCRLGGIKHLVDLLDHRVLEVQKNACGALRNLVFGKSTDENKIAMKNVGGIPALLRLLRKSIDAEVRELVTGVLWNLSSCDAVKMTIIRDALSTLTNTVIVPHSGWNNSSFDDDHKIKFQTSLVLRNTTGCLRNLSSAGEEARKQMRSCEGLVDSLLYVIHTCVNTSDYDSKTVENCVCTLRNLSYRLELEVPQARLLGLNELDDLLGKESPSKDSEPSCWGKKKKKKKRTPQEDQWDGVGPIPGLSKSPKGVEMLWHPSVVKPYLTLLAESSNPATLEGSAGSLQNLSAGNWKFAAYIRAAVRKEKGLPILVELLRMDNDRVVSSVATALRNMALDVRNKELIGKYAMRDLVNRLPGGNGPSVLSDETMAAICCALHEVTSKNMENAKALADSGGIEKLVNITKGRGDRSSLKVVKAAAQVLNTLWQYRDLRSIYKKDGWNQNHFITPVSTLERDRFKSHPSLSTTNQQMSPIIQSGSSKPSPIYISSYSSPAREQNRRLQHQQLYYSQDDSNRKNFDAYRLYLQSPHSYEDPYFDDRVHFPASTDYSTQYGLKSTTNYVDFYSTKRPSYRAEQYPGSPDSWV

SEQ ID NO: 42725 - protein, 333 aa, Homo sapiens
MGKVWKQQMYPQYATYYYPQYLQAKQSLVPAHPMAPPSPSTTSSNNNSSSSSNSGWDQLSKTNLYIRGLPPHTTDQDLVKLCQPYGKIVSTKAILDKTTNKCKGYGFVDFDSPAAAQKAVSALKASGVQAQMAKQQEQDPTNLYISNLPLSMDEQELENMLKPFGQVISTRILRDSSGTSRGVGFARMESTEKCEAVIGHFNGKFIKTPPGVSAPTEPLLCKFADGGQKKRQNPNKYIPNGRPWHREGEVRLAGMTLTYDPTTAAIQNGFYPSPYSIATNRMITQTSITPYIASPVSAYQVCTFRIRQQYNHLRTMNLCYIFMCLKILSVYEI
